(19) United States
(12) Patent Application Publication
(10) Pub. No.: US 2023/0322900 A1
(43) Pub. Date: Oct. 12, 2023

(54) FACTOR VIII COMPOSITIONS AND METHODS OF MAKING AND USING SAME

(71) Applicant: BIOVERATIV THERAPEUTICS INC., Waltham, MA (US)

(72) Inventors: Volker Schellenberger, Palo Alto, CA (US); Pei-Yun Chang, Menlo Park, CA (US); Fatbardha Varfaj, Mountain View, CA (US); Sheng Ding, Redwood City, CA (US); Joshua Silverman, Sunnyvale, CA (US); Chia-wei Wang, Milpitas, CA (US); Benjamin Spink, San Carlos, CA (US); Willem P. Stemmer, Los Gatos, CA (US); Nathan Geething, Santa Clara, CA (US); John Kulman, Belmont, MA (US); Tongyao Liu, Lexington, MA (US); Garabet G. Toby, North Reading, MA (US); Haiyan Jiang, Belmont, MA (US); Robert Peters, Needham, MA (US); Deping Wang, Sharon, MA (US); Baisong Mei, Waban, MA (US)

(21) Appl. No.: 18/064,571

(22) Filed: Dec. 12, 2022

Related U.S. Application Data
(63) Continuation of application No. 16/521,789, filed on Jul. 25, 2019, now abandoned.
Application No. 16/521,789 is a division of application No. 14/379,192, filed on Feb. 20, 2015, now Pat. No. 10,421,798.
(60) Provisional application No. 61/599,400, filed on Feb. 15, 2012.

(51) Int. Cl. C07K 14/755

(52) U.S. Cl. CPC C07K 14/755; A61K 38/00

(57) ABSTRACT

The present invention relates to compositions comprising factor VIII coagulation factors linked to extended recombinant polypeptide (XTEN), isolated nucleic acids encoding the compositions and vectors and host cells containing the same, and methods of making and using such compositions in treatment of factor VIII-related diseases, disorders, and conditions.

### CROSS-REFERENCE TO RELATED APPLICATION

[0001] This application is a continuation of U.S. patent application Ser. No. 16/521,789, filed Jul. 25, 2019, which is a division of U.S. patent application Ser. No. 14/379,192, filed Feb. 20, 2015, now U.S. Pat. No. 10,421,798, which is a 35 U.S.C. § 371 filing of International Patent Application No. PCT/US2012/046326, filed Jul. 11, 2012, which claims priority to U.S. Provisional Patent Application Ser. No. 61/599,400, filed Feb. 15, 2012, the entire disclosures of which are hereby incorporated herein by reference.

### SEQUENCE LISTING

[0002] The instant application contains a Sequence Listing which has been submitted electronically in XML format and is hereby incorporated by reference in its entirety. Said XML file, created on Dec. 12, 2022, is named 737670_SA9-419USDIVCON_ST26.xml and is 5,881,141 bytes in size.

### BACKGROUND OF THE INVENTION

[0003] Factor VIII is an important component of the intrinsic pathway of the blood coagulation cascade. In the circulation, factor VIII is mainly complexed to von Willebrand factor. Upon activation by thrombin, (Factor IIa), it dissociates from the complex to interact with factor IXa in the intrinsic coagulation cascade, which, in turn, activates factor X. Once removed from the von Willebrand factor complex, activated factor VIII is proteolytically inactivated by activated Protein C (APC), factor Xa, and factor IXa, and is quickly cleared from the blood stream. When complexed with normal von Willebrand factor protein, the half-life of factor VIII is approximately 12 hours, whereas in the absence of von Willebrand factor, the half-life of factor VIII is reduced to 2 hours (Tuddenham E G, et al., Br J Haematol. (1982) 52(2):259-267).

[0004] In hemophilia, the clotting of blood is disturbed by a lack of certain plasma blood clotting factors. Hemophilia A is a deficiency of factor VIII, and is a recessive sex-linked, X chromosome disorder that represents 80% of hemophilia cases. The standard of care for the management of hemophilia A is replacement therapy with recombinant factor VIII concentrates. Subjects with severe hemophilia A have circulating procoagulant factor VIII levels below 1-2% of normal, and are generally on prophylactic therapy with the aim of keeping factor VIII above 1% between doses, which can usually be achieved by giving factor VIII two to three times a week. Persons with moderately severe hemophilia (factor VIII levels of 2-5% of normal) constitute 25-30% hemophilia incidents and manifest bleeding after minor trauma. Persons with mild hemophilia A (factor VIII levels of 5-40% of normal) comprise 15-20% of all hemophilia incidents, and develop bleeding only after significant trauma or surgery.

[0005] The in vivo activity of exogenously supplied factor VIII is limited both by a short protein half-life and inhibitors that bind to the factor VIII and diminish or destroy hemostatic function.

[0006] Up to 30% of hemophilia A patients receiving exogenously-supplied factor VIII mount an IgG immune response towards factor VIII (Towfighi, F., et al. Comparative measurement of anti-factor VIII antibody by Bethesda assay and ELISA reveals restricted isotype profile and epitope specificity. Acta Haematol (2005) 114:84-90), which can result in the complete inhibition of its procoagulant activity and/or promote more rapid clearance of the factor VIII (Briët E et al. High titer inhibitors in severe haemophilia A. A meta-analysis based on eight long-term follow-up studies concerning inhibitors associated with crude or intermediate purity factor VIII products. Throm. Haemost. (1994) 72: 162-164). The IgG antibodies, called FVIII inhibitors, are primarily directed towards the A2, A3 and C2 domains (Scandella D et al. Localization of epitopes for human factor VIII inhibitor antibodies by immunoblotting and antibody neutralization. Blood (1989) 74:1618-1626), but can arise against the A1, B and C1 domains, as well. As such, treatment options for patients with FVIII inhibitors are limited.

[0007] Large proteins such as factor VIII are normally given intravenously so that the medicament is directly available in the blood stream. It has been previously demonstrated that an unmodified factor VIII injected intramuscularly yielded a maximum circulating level of only 1.4% of the normal plasma level (Pool et al, Ineffectiveness of Intramuscularly Injected Factor VIII Concentrate in Two Hemophilic Patients. New England J. Medicine (1966) 275(10):547-548). Formulations that could be administered other than by the intravenous route would greatly simplify their use, increase safety, and result in substantial cost savings.

[0008] Chemical modifications to a therapeutic protein can modify its in vivo clearance rate and subsequent serum half-life. One example of a common modification is the addition of a polyethylene glycol (PEG) moiety, typically coupled to the protein via an aldehyde or N-hydroxysuccinimide (NHS) group on the PEG reacting with an amine group (e.g. lysine side chain or the N-terminus). However, the conjugation step can result in the formation of heterogeneous product mixtures that require extraction, purification and/or other further processes, all of which inevitably affect product yield and quality control. Also, the pharmacologic function of coagulation factors may be hampered if amino acid side chains in the vicinity of its binding site become modified by the PEGylation process. Other approaches include the genetic fusion of an Fc domain to the therapeutic protein, which increases the size of the therapeutic protein, hence reducing the rate of clearance through the kidney. In some cases, the Fc domain confers the ability to bind to, and be recycled from lysosomes by the FcRn receptor, resulting in increased pharmacokinetic half-life. Unfortunately, the Fc domain does not fold efficiently during recombinant expression, and tends to form insoluble precipitates known as inclusion bodies. These inclusion bodies must be solubilized and functional protein must be renatured from the misfolded aggregate, which is a time-consuming, inefficient, and expensive process.

### SUMMARY OF THE INVENTION

[0009] The present invention relates to novel coagulation factor VIII fusion protein compositions and the uses thereof. Specifically, the compositions provided herein are particularly used for the treatment or improvement of a condition associated with hemophilia A, deficiencies of factor VIII, bleeding disorders and coagulopathies. In one aspect, the present invention provides compositions of isolated fusion proteins comprising a factor VIII (FVIII) and one or more extended recombinant polypeptides (XTEN) wherein the fusion protein exhibits procoagulant activity. A subject XTEN useful for constructing such fusion proteins is typically a polypeptide with a non-repetitive sequence and unstructured conformation. In one embodiment, one or more XTEN is linked to a coagulation factor FVIII (“CF”) selected from native human factor VIII, factor VIII B-domain deleted sequences (“FVIII BDD”), and sequence variants thereof (all the foregoing collectively “FVIII” or “CF”), resulting in a recombinant factor VIII-XTEN fusion protein (“CFXTEN”). The factor VIII polypeptide component of the CFXTEN comprises an A1 domain, an A2 domain, a C1 domain, a C2 domain, and optionally a B domain or a portion thereof. In some embodiments, the FVIII is further characterized by delineation of the aforementioned domains to comprise an acidic a1, a2 and a3 spacer. In another embodiment, the present disclosure is directed to pharmaceutical compositions comprising the fusion proteins and the uses thereof in methods and regimens for treating factor VIII-related conditions. The CFXTEN compositions have enhanced pharmacokinetic and pharmacologic properties compared to FVIII not linked to XTEN, which may permit more convenient dosing and improved efficacy.

[0010] In a first aspect, the invention relates to recombinant factor VIII fusion proteins comprising a factor VIII polypeptide and one or more extended recombinant polypeptide (XTEN) linked to the factor VIII. In some embodiments, the invention provides recombinant factor VIII fusion proteins comprising a factor VIII polypeptide and at least one extended recombinant polypeptide (XTEN), wherein said factor VIII polypeptide comprises an A1 domain including an a1 acidic spacer region, an A2 domain including an a2 acidic spacer region, an A3 domain including an a3 acidic spacer region, C1 domain, C2 domain and optionally all or a portion of B domain, and wherein said at least one XTEN is linked to said factor VIII polypeptide at (i) the C-terminus of said factor VIII polypeptide; (ii) within B domain of said factor VIII polypeptide if all or a portion of B domain is present; (iii) within the A1 domain of said factor VIII polypeptide; (iv) within the A2 domain of said factor VIII polypeptide; (v) within the A3 domain of said factor VIII polypeptide; (vi) within the C1 domain of said factor VIII polypeptide; (vii) within the C2 domain of said factor VIII polypeptide; (viii) at the N-terminus of said factor VIII polypeptide, or (ix) between two domains of said factor VIII polypeptide, wherein the fusion protein retains at least about 10%, 20%, 30%, 40%, 50%, 60%, 70%, 80%, 90%, 100%, 200%, 300%, 400%, or 500% of the procoagulant activity, when measured by an in vitro coagulation assay, compared to a corresponding factor VIII not linked to XTEN. In one embodiment, in the foregoing recombinant factor VIII fusion protein the at least one XTEN is linked to said factor VIII polypeptide at a site at or within 1 to 6 amino acids of a site selected from Table 5, Table 6, Table 7, Table 8, and Table 9. In other embodiments, the invention provides recombinant factor VIII fusion proteins comprising a factor VIII polypeptide and at least a first extended recombinant polypeptide (XTEN), wherein said factor VIII polypeptide comprises an A1 domain including an a1 acidic spacer region, an A2 domain including an a2 acidic spacer region, an A3 domain including an a3 acidic spacer region, a C1 domain, a C2 domain and optionally all or a portion of a B domain, and wherein said first XTEN is linked to said factor VIII polypeptide at (i) the C-terminus of said factor VIII polypeptide; (ii) within the B domain of said factor VIII polypeptide if all or a portion of the B domain is present; (iii) within the A1 domain of said factor VIII polypeptide; (iv) within the A2 domain of said factor VIII polypeptide; (v) within the A3 domain of said factor VIII polypeptide; (vi) within the C1 domain of said factor VIII polypeptide; or (vii) within the C2 domain of said factor VIII polypeptide; and when compared to a corresponding factor VIII protein not linked to XTEN, the fusion protein (a) retains at least about 10%, 20%, 30%, 40%, 50%, 60%, 70%, 80%, 90% 100%, 200%, 300%, 400%, or 500% of the procoagulant activity in an in vitro coagulation assay described herein or other such assays known in the art, and/or (b) exhibits reduced binding to an anti-factor VIII antibody in an in vitro binding assay described herein or other such assays known in the art. In one embodiment, in the foregoing recombinant factor VIII fusion protein the at least one XTEN is linked to said factor VIII polypeptide at a site at or within 1 to 6 amino acids of a site selected from Table 5, Table 6, Table 7, Table 8, and Table 9. In other embodiments, the invention provides recombinant factor VIII fusion proteins comprising a factor VIII polypeptide and at least a first extended recombinant polypeptide (XTEN), wherein said factor VIII polypeptide comprises an A1 domain including an a1 acidic spacer region, an A2 domain including an a2 acidic spacer region, an A3 domain including an a3 acidic spacer region, a C1 domain, a C2 domain and optionally all or a portion of a B domain, and wherein said first XTEN is linked to said factor VIII polypeptide at an insertion site selected from Table 6 and Table 7 and wherein the fusion protein retains at least about 10%, 20%, 30%, 40%, 50%, 60%, 70%, 80%, 90%, 100%, 200%, 300%, 400%, or 500% of the procoagulant activity, when measured by an in vitro coagulation assay described herein or other such assays known in the art, compared to a corresponding factor VIII protein not linked to XTEN. Non-limiting examples of the factor VIII protein not linked to XTEN includes native FVIII, BDD FVIII, pBC100 and sequences from Table 1. In another embodiment of the recombinant factor VIII fusion protein, the factor VIII polypeptide has at least about 80% sequence identity, or about 90%, or about 91%, or about 92%, or about 93%, or about 94%, or about 95%, or about 96%, or about 97%, or about 98%, or about 99%, to about 100% sequence identity to a sequence selected from the group consisting of the sequences of Table 1, the sequence depicted in FIG. 3, and the sequence depicted in FIG. 4, when optimally aligned. In yet another embodiment, the fusion protein comprises at least another XTEN linked to said factor VIII polypeptide at the C-terminus of said factor VIII polypeptideor within or optionally replacing the B domain of said factor VIII polypeptide. In a specific embodiment, the fusion protein comprises at least one XTEN sequence located within or optionally replacing the B domain of said factor VIII polypeptide. In another specific embodiment, the fusion protein comprises at least one XTEN sequence linked to said factor VIII polypeptide at the C-terminus of said factor VIII polypeptide. In one embodiment, the recombinant factor VIII fusion protein comprises a B-domain deleted variant of human factor VIII, wherein the B-domain deletion starts from a first position at about amino acid residue number 741 to about 750 and ending at a second position at amino acid residue number 1635 to about 1648 with reference to full-length human factor VIII sequence as set forth in FIG. 3. In another embodiment, the recombinant factor VIII fusion protein comprises a first XTEN sequence linked to said factor VIII polypeptide at the C-terminus of said factor VIII polypeptide, and at least a second XTEN within or replacing the B domain of said factor VIII polypeptide, wherein the second XTEN is linked to the C-terminal end of about amino acid residue number 741 to about 750 and to the N-terminal end of amino acid residue numbers 1635 to about 1648 with reference to full-length human factor VIII sequence as set forth in FIG. 3, wherein the cumulative length of the XTEN is at least about 100 amino acid residues. In one embodiment, in the foregoing fusion protein, the second XTEN links the factor VIII amino acids between N745 to P1640 or between S743 to Q1638 or between P747 to V1642 or between N745 and Q1656 or between N745 and S1657 or between N745 and T1667 or between N745 and Q1686 or between R747 and V1642 or between T751 and T1667. In one embodiment, the recombinant factor VIII fusion protein comprises a sequence having at least about 80% sequence identity, or at least about 90%, or at least about 91%, or at least about 92%, or at least about 93%, or at least about 94%, or at least about 95%, or at least about 96%, or at least about 97%, or at least about 98%, or at least about 99%, to about 100% sequence identity compared to a sequence of comparable length selected from Table 21, when optimally aligned. In another embodiment, the recombinant factor VIII fusion protein comprises at least a second XTEN, optionally a third XTEN, optionally a fourth XTEN, optionally a fifth XTEN and optionally a sixth XTEN, wherein each of the second, third, fourth, fifth, or sixth XTEN is linked to said factor VIII polypeptide at a second, third, fourth, fifth, or sixth site selected from the group consisting of an insertion site from Table 5, Table 6, Table 7 Table 8, and Table 9; a location within 6 amino acids of amino acid residue 32, 220, 224, 336, 339, 390, 399, 416, 603, 1656, 1711, 1725, 1905 and 1910 of mature factor VIII; a location between any two adjacent domains of said factor VIII polypeptide, wherein said two adjacent domains are selected from the group consisting of A1 and A2 domains, A2 and B domains, B and A3 domains, A3 and C1 domains, and C1 and C2 domains; a location within the B domain of said factor VIII polypeptide, wherein the second XTEN is linked to the C-terminal end of about amino acid residue number 741 to about 750 and to the N-terminal end of amino acid residue numbers 1635 to about 1648 of a native factor VIII sequence; and the C-terminus of said factor VIII polypeptide. In one embodiment, the first XTEN is separated from the second XTEN by at least 10 amino acids, at least 50 amino acids, at least 100 amino acids, at least 200 amino acids, at least 300 amino acids, or at least 400 amino acids. In one embodiment of the recombinant factor VIII fusion protein that comprises at least a second XTEN, optionally a third XTEN, optionally a fourth XTEN, optionally a fifth XTEN and optionally a sixth XTEN, each XTEN has at least about 80% sequence identity, or at least about 90%, or at least about 91%, or at least about 92%, or at least about 93%, or at least about 94%, or at least about 95%, or at least about 96%, or at least about 97%, or at least about 98%, or at least about 99%, or about 100% sequence identity compared to an XTEN of comparable length selected from the group consisting of the sequences in Table 4, Table 13, Table 14, Table 15, Table 16, and Table 17, when optimally aligned. In yet another embodiment of the recombinant factor VIII fusion protein that comprises at least a second XTEN, optionally a third XTEN, optionally a fourth XTEN, optionally a fifth XTEN and optionally a sixth XTEN, In preferred embodiments, the recombinant factor VIII fusion protein exhibits a terminal half-life at least about 3 hours, or 4 hours, or 6 hours, or 12 hours, or 13 hours, or 14 hours, or 16 hours, or 24 hours, or 48 hours, or 72 hours, or 96 hours, or 120 hours, or 144 hours, or 7 days, or 14 days, or 21 days when administered to a subject, wherein said subject is selected from human and factor VIII/von Willebrand factor double knock-out mouse. Further, in the embodiments of this paragraph, the fusion protein exhibits reduced binding to anti-factor VIII antibody or greater retained procoagulant activity, or both as compared to a corresponding factor VIII not linked to XTEN. In one embodiment, the procoagulant activity of the recombinant factor VIII fusion protein is at least 30%, or 40%, 50%, 80%, 100%, 200%, 300%, 400%, or 500% greater procoagulant activity in the presence of the anti-FVIII antibody compared to a corresponding factor VIII not linked to XTEN when each are assayed by an in vitro coagulation assay. In one embodiment, the reduced binding of the fusion protein to anti-factor VIII antibody is determined using a Bethesda assay using anti-factor VIII antibody selected from the group consisting of the antibodies of Table 10 and polyclonal antibody from a hemophilia A patient with factor VIII inhibitors, wherein the reduced binding and retained procoagulant activity of the fusion protein is evidenced by a lower Bethesda titer of at least about 2, 4, 6, 8, 10, 12, 15, 20, 30, 40, 50, 60, 70, 80, 100, or 200 Bethesda units for the fusion protein compared to that for the factor VIII not linked to XTEN.

[0011] In one embodiment, the recombinant factor VIII fusion protein can, for example, comprise one or more XTEN wherein the XTEN has at least about 80% sequence identity, or about 90%, or about 91%, or about 92%, or about 93%, or about 94%, or about 95%, or about 96%, or about 97%, or about 98%, or about 99%, to about 100% sequence identity compared to one or more XTEN of comparable length selected from Table 4, Table 13, Table 14, Table 15, Table 16, and Table 17, when optimally aligned.

[0012] In another aspect, the invention relates to recombinant factor VIII fusion proteins comprising FVIII and one or more XTEN in specific N- to C-terminus configurations. In one embodiment of the CFXTEN composition, the invention provides a recombinant factor VIII fusion protein of formula I:

(XTEN)ₓ-CF-(XTEN)_{y} I

wherein independently for each occurrence, CF is a factor VIII as defined herein, including sequences having at least about 80%, or at least about 90%, or at least about 95%, or at least about 96%, or at least about 97%, or at least about 98%, or at least about 99% or 100% sequence identity with sequenced from Table 1; x is either 0 or 1 and y is either 0 or 1 wherein x+y≥1; and XTEN is an extended recombinant polypeptide as described herein, including, but not limited to sequences having at least about 80%, or at least about 90%, or at least about 95%, or at least about 96%, or at least about 97%, or at least about 98%, or at least about 99% or 100% sequence identity to sequences set forth in Table 4. Accordingly, the CFXTEN fusion composition can have XTEN-CF, XTEN-CF-XTEN, or CF-XTEN configurations.

[0013] In another embodiment of the CFXTEN composition, the invention provides a recombinant factor VIII fusion protein of formula II:

(XTEN)ₓ-(S)ₓ-(CF)-(XTEN)_{y} II

wherein independently for each occurrence, CF is a factor VIII as defined herein, including sequences having at least about 80%, or at least about 90%, or at least about 95%, or at least about 96%, or at least about 97%, or at least about 98%, or at least about 99% or 100% sequence identity to sequences set forth in Table 1; S is a spacer sequence having between 1 to about 50 amino acid residues that can optionally include a cleavage sequence or amino acids compatible with restrictions sites; x is either 0 or 1 and y is either 0 or 1 wherein x+y≥1; and XTEN is an extended recombinant polypeptide as described herein including, but not limited to sequences having at least about 80%, or at least about 90%, or at least about 95%, or at least about 96%, or at least about 97%, or at least about 98%, or at least about 99% or 100% sequence identity to sequences set forth in Table 4.

[0014] In another embodiment of the CFXTEN composition, the invention provides a recombinant factor VIII fusion protein, wherein the fusion protein is of formula III:

(XTEN)ₓ-(S)ₓ-(CF)-(S)_{y}-(XTEN)_{y} III

wherein independently for each occurrence, CF is a factor VIII as defined herein, including sequences having at least about 80%, or at least about 90%, or at least about 95%, or at least about 96%, or at least about 97%, or at least about 98%, or at least about 99% or 100% sequence identity to sequence set for in Table 1; S is a spacer sequence having between 1 to about 50 amino acid residues that can optionally include a cleavage sequence or amino acids compatible with restrictions sites; x is either 0 or 1 and y is either 0 or 1 wherein x+y≥1; and XTEN is an extended recombinant polypeptide as described herein including, but not limited to sequences having at least about 80%, or at least about 90%, or at least about 95%, or at least about 96%, or at least about 97%, or at least about 98%, or at least about 99% or 100% sequence identity to sequences set forth in Table 4.

[0015] In another embodiment of the CFXTEN composition, the invention provides a recombinant factor VIII fusion protein of formula IV:

(A1)-(XTEN)ᵤ-(A2)-(XTEN)ᵥ-(B)-(XTEN)_{w}-(A3)-(XTEN)ₓ-(C1)-(XTEN)_{y}-(C2)-(XTEN)_{z} IV

wherein independently for each occurrence, A1 is an A1 domain of FVIII; A2 is an A2 domain of FVIII; A3 is an A3 domain of FVIII; B is a B domain of FVIII which can be a fragment or a splice variant of the B domain; C1 is a C1 domain of FVIII; C2 is a C2 domain of FVIII; v is either 0 or 1; w is either 0 or 1; x is either 0 or 1; y is either 0 or 1; y is either 0 or 1 with the proviso that u+v+x+y+z≥1; and XTEN is an extended recombinant polypeptide as described herein including, but not limited to sequences having at least about 80%, or at least about 90%, or at least about 95%, or at least about 96%, or at least about 97%, or at least about 98%, or at least about 99% or 100% sequence identity to sequences set forth in Table 4.

[0016] In another embodiment of the CFXTEN composition, the invention provides a recombinant factor VIII fusion protein of formula V:

(XTEN)ₜ-(S)ₐ-(A1)-(S)_{b}-(XTEN)ᵤ-(S)_{b}-(A2)-(S)_{c}-(XTEN)ᵥ-(S)_{c}-(B)-(S)_{d}-(XTEN)_{w}-(S)_{d}-(A3)-(S)ₑ-(XTEN)ₓ-(S)ₑ-(C1)-(S)_{f}-(XTEN)_{y}-(S)_{f}-(C2)-(S)_{g}-(XTEN)_{z} V

wherein independently for each occurrence, A1 is an A1 domain of FVIII; A2 is an A2 domain of FVIII; A3 is an A3 domain of FVIII; B is a B domain of FVIII which can be a fragment or a splice variant of the B domain; C1 is a C1 domain of FVIII; C2 is a C2 domain of FVIII; S is a spacer sequence having between 1 to about 50 amino acid residues that can optionally include a cleavage sequence or amino acids compatible with restrictions sites; a is either 0 or 1; b is either 0 or 1; c is either 0 or 1; d is either 0 or 1; e is either 0 or 1; f is either 0 or 1; g is either 0 or 1; t is either 0 or 1; u is either 0 or 1; v is either 0 or 1; w is 0 or 1, x is either 0 or 1; y is either 0 or 1; z is either 0 or 1 with the proviso that t+u+v+w+x+y+z≥1; and XTEN is an extended recombinant polypeptide as described herein including, but not limited to sequences having at least about 80%, or at least about 90%, or at least about 95%, or at least about 96%, or at least about 97%, or at least about 98%, or at least about 99% or 100% sequence identity to sequences set forth in Table 4. In another embodiment of formula V, the spacer sequence is glycine or a sequence selected from Tables 11 and 12.

[0017] In another embodiment of the CFXTEN composition, the invention provides a recombinant factor VIII fusion protein of formula VI:

(XTEN)ᵤ-(S)ₐ-(A1)-(S)_{b}-(XTEN)ᵥ-(S)_{b}-(A2)-(S)_{c}-(XTEN)_{w}-(S)_{c}-(A3)-(S)_{d}-(XTEN)ₓ-(S)_{d}-(C1)-(S)ₑ-(XTEN)_{y}-(S)ₑ-(C2)-(S)_{f}-(XTEN)_{z} VI

wherein independently for each occurrence, A1 is an A1 domain of FVIII; A2 is an A2 domain of FVIII; A3 is an A3 domain of FVIII; C1 is a C1 domain of FVIII; C2 is a C2 domain of FVIII; S is a spacer sequence having between 1 to about 50 amino acid residues that can optionally include a cleavage sequence or amino acids compatible with restrictions sites; a is either 0 or 1; b is either 0 or 1; c is either 0 or 1; d is either 0 or 1; e is either 0 or 1; f is either 0 or 1; u is either 0 or 1; v is either 0 or 1; w is 0 or 1, x is either 0 or 1; y is either 0 or 1; z is either 0 or 1 with the proviso that u+v+w+x+y+z≥1; and XTEN is an extended recombinant polypeptide as described herein including, but not limited to sequences having at least about 80%, or at least about 90%, or at least about 95%, or at least about 96%, or at least about 97%, or at least about 98%, or at least about 99% or 100% sequence identity to sequences set forth in Table 4. In another embodiment of formula V, the spacer sequence is glycine or a sequence selected from Tables 11 and 12.

[0018] In another embodiment of the CFXTEN composition, the invention provides a recombinant factor VIII fusion protein of formula VII:

(SP)-(XTEN)ₓ-(CS)ₓ-(S)ₓ-(FVIII_1-745)-(S)_{y}-(XTEN)_{y}-(S)_{y}-(FVIII_1640-2332)-(S)_{z}-(CS)_{z}-(XTEN)_{z} VII

wherein independently for each occurrence, SP is a signal peptide, preferably with sequence MQIELSTCFFLCLLRFCFS (SEQ ID NO: 1611), CS is a cleavage sequence listed in Table 12, S is a spacer sequence having between 1 to about 50 amino acid residues that can optionally include amino acids compatible with restrictions sites, “FVIII_1-745” is residues 1-745 of Factor FVIII and “FVIII_1640-2332” is residues 1640-2332 of FVIII, x is either 0 or 1, y is either 0 or 1, and z is either 0 or 1, wherein x+y+z≥2; and XTEN is an extended recombinant polypeptide as described herein including, but not limited to sequences having at least about 80%, or at least about 90%, or at least about 95%, or at least about 96%, or at least about 97%, or at least about 98%, or at least about 99% or 100% sequence identity sequences set forth in Table 4. In one embodiment of formula VII, the spacer sequence is GPEGPS (SEQ ID NO: 1612). In another embodiment of formula V, the spacer sequence is glycine or a sequence selected from Tables 11 and 12.

[0019] In another embodiment of the CFXTEN composition, the invention provides a recombinant factor VIII fusion protein of formula VIII:

(A1)-(S)ₐ-(XTEN)ᵥ-(S)ₐ-(A2)-(B1)-(S)_{b}-(XTEN)_{w}-(S)_{b}-(B2)-(A3)-(S)_{c}-(XTEN)ₓ-(S)_{c}-(C1)-(S)_{d}-(XTEN)_{y}-(S)_{d}-(C2)-(S)ₑ-(XTEN)_{z} VIII

wherein independently for each occurrence, A1 is an A1 domain of FVIII; A2 is an A2 domain of FVIII; B1 is a fragment of the B domain that can have from residue 741 to 743-750 of FVIII or alternatively from about residue 741 to about residues 745 of FVIII; B2 is a fragment of the B domain that can have from residues 1635-1686 to 1689 of FVIII or alternatively from about residue 1640 to about residues 1689 of FVIII; A3 is an A3 domain of FVIII; C1 is a C1 domain of FVIII; C2 is a C2 domain of FVIII; S is a spacer sequence having between 1 to about 50 amino acid residues that can optionally include a cleavage sequence or amino acids compatible with restrictions sites; a is either 0 or 1; b is either 0 or 1; c is either 0 or 1; d is either 0 or 1; e is either 0 or 1; f is either 0 or 1; u is either 0 or 1; v is either 0 or 1; w is 0 or 1, x is either 0 or 1; y is either 0 or 1; z is either 0 or 1 with the proviso that u+v+w+x+y+z≥1; and XTEN is an extended recombinant polypeptide as described herein including, but not limited to sequences having at least about 80%, or at least about 90%, or at least about 95%, or at least about 96%, or at least about 97%, or at least about 98%, or at least about 99% or 100% sequence identity to sequences set forth in Table 4. In one embodiment of formula VIII, the spacer sequence is GPEGPS (SEQ ID NO: 1612). In another embodiment of formula V, the spacer sequence is glycine or a sequence selected from Tables 11 and 12.

[0020] In another embodiment of the CFXTEN composition, the invention provides a recombinant factor VIII fusion protein of formula IX:

(A1_{N})-(S)ₐ-(XTEN)ₜ-(S)_{b}-(A1_{C})-(A2_{N})-(S)_{c}-(XTEN)ᵤ-(S)_{d}-(A2_{C})-(B_{N})-(S)ₑ-(XTEN)ᵥ-(S)_{f}-(B_{C})-(A3_{N})- (S)_{g}-(XTEN)_{w}-(S)ₕ-(A3_{C})-(C1_{N})-(S)ᵢ-(XTEN)ₓ-(S)ⱼ-(C1_{C})-(C2_{N})-(S)ₖ-(XTEN)_{y}-(S)ₖ-(C2_{C})-(S)ₘ-(XTEN)_{z} IX

wherein independently for each occurrence, A1_{N} is a fragment of the A1 domain from at least residue number 1 (numbered relative to native, mature FVIII) to no more than residue number 371, A1_{C} is a fragment of the A1 domain from at least residue number 2 to no more than residue number 372, with the priviso that no sequence of the A1_{N} fragment is duplicated in the A1_{c} is a fragment; A2_{N} is a fragment of the A2 domain from at least residue number 373 to no more than residue number 739, A2_{c} is a fragment of the A2 domain from at least residue number 374 to no more than residue number 740, with the priviso that no sequence of the A2_{N} fragment is duplicated in the A2_{c} is a fragment; B_{N} is a fragment of the B domain from at least residue number 741 to no more than residue number 1647, B_{c} is a fragment of the B domain from at least residue number 742 to no more than residue number 1648, with the priviso that no sequence of the B_{N} fragment is duplicated in the B_{c} is a fragment; A3_{N} is a fragment of the A3 domain from at least residue number 1649 to no more than residue number 2019, A3_{c} is a fragment of the A3 domain from at least residue number 1650 to no more than residue number 2019, with the priviso that no sequence of the A3_{N} fragment is duplicated in the A3_{c} is a fragment; C1_{N} is a fragment of the C1 domain from at least residue number 2020 to no more than residue number 2171, C1_{c} is a fragment of the C1 domain from at least residue number 2021 to no more than residue number 2172, with the priviso that no sequence of the C1_{N} fragment is duplicated in the C1_{c} is a fragment; C2_{N} is a fragment of the C2 domain from at least residue number 2173 to no more than residue number 2331, C2_{c} is a fragment of the C2 domain from at least residue number 2174 to no more than residue number 2332, with the priviso that no sequence of the C2_{N} fragment is duplicated in the C2_{c} is a fragment; S is a spacer sequence having between 1 to about 50 amino acid residues that can optionally include a cleavage sequence or amino acids compatible with restrictions sites; a is either 0 or 1; b is either 0 or 1; c is either 0 or 1; d is either 0 or 1; e is either 0 or 1; f is either 0 or 1; g is either 0 or 1; his either 0 or 1; i is either 0 or 1; j is either 0 or 1; k is either 0 or 1; 1 is either 0 or 1; m is either 0 or 1; t is either 0 or 1; u is either 0 or 1; v is either 0 or 1; w is 0 or 1, x is either 0 or 1; y is either 0 or 1; z is either 0 or 1 with the proviso that t+u+v+w+x+y+z≥1; and XTEN is an extended recombinant polypeptide as described herein including, but not limited to sequences having at least about 80% sequence identity, or about 90%, or about 91%, or about 92%, or about 93%, or about 94%, or about 95%, or about 96%, or about 97%, or about 98%, or about 99%, to about 100% sequence identity compared to one or more XTEN of comparable length selected from Table 4. In one embodiment of formula IX, the spacer sequence is GPEGPS (SEQ ID NO: 1612). In another embodiment of formula V, the spacer sequence is glycine or a sequence selected from Tables 11 and 12. In another embodiment of formula IX, Z is 1. In another embodiment of the fusion protein of formula IX V is 1 and the XTEN is linked to the C-terminal end of about amino acid residue number 741 to about 750 and to the N-terminal end of amino acid residue numbers 1635 to about 1648 with reference to full-length human factor VIII sequence as set forth in FIG. 3. In another embodiment of the fusion protein of formula IX, the sum oft, u, v, w, x, y, and z equals 2, 3, 4, 5, or 6. In another embodiment of formula IX, the sum of t, u, v, w, x, y, and z equals 2, and v is 1 and z is 1. In another embodiment of the fusion protein of formula IX, the sum of t, u, v, w, x, y, and z equals 3, v and z each equal 1, and either t, u, w, x or y is 1. In another embodiment of formula IX, the sum of t, u, v, w, x, y, and z equals 4, v and w and z each equal 1, and two oft, u, x or y is 1. In another embodiment of the fusion protein of formula IX, the cumulative length of the XTENs is between about 84 to about 3000 amino acid residues. In another embodiment of formula IX, at least one XTEN is inserted immediately downstream of an amino acid which corresponds to an amino acid in mature native human factor VIII selected from the group consisting of amino acid residue number 32, 220, 224, 336, 339, 399, 416, 603, 1656, 1711, 1725, 1905 and 1910. In another embodiment of the fusion protein formula IX, each XTEN is linked to said fusion protein at sites selected from Table 5, Table 6, Table 7, Table 8, and Table 9. In another embodiment of the fusion protein formula IX, each XTEN has at least about 80%, or about 90%, or at least about 91%, or at least about 92%, or at least about 93%, or at least about 94%, or at least about 95%, or at least about 96%, or at least about 97%, or at least about 98%, or at least about 99%, or about 100% sequence identity compared to an XTEN of comparable length selected from the group consisting of the sequences in Table 4, Table 13, Table 14, Table 15, Table 16, and Table 17, when optimally aligned.

[0021] In another embodiment of the CFXTEN composition, the invention provides a first recombinant factor VIII polypeptide of formula X:

(A1)-a1-(A2)-a2-[B] X

[0022] and a second polypeptide comprising Formula XI:

a3-(A3)-(C1)-(C2) XI

wherein the first polypeptide and the second polypeptide are fused or exist as a heterodimer; wherein, A1 is an A1 domain of factor VIII; A2 is an A2 domain of factor VIII; [B] is a B domain of factor VIII, a fragment thereof, or is deleted; A3 is an A3 domain of factor VIII; C1 is a C1 domain of factor VIII; C2 is a C2 domain of factor VIII; a1, a2, and a3 are acidic spacer regions; wherein the A1 domain comprises an XTEN permissive loop-1 (A1-1) region and an XTEN permissive loop-2 (A1-2) region; wherein the A2 domain comprises an XTEN permissive loop-1 (A2-1) region and an XTEN permissive loop-2 (A2-2) region; wherein the A3 domain comprises an XTEN permissive loop-1 (A3-1) region and an XTEN permissive loop-2 (A3-2) region; wherein an XTEN sequence is inserted into at least one of the regions A1-1, A1-2, A2-1, A2-2, A3-1, or A3-2; and wherein the recombinant factor VIII protein exhibits procoagulant activity. In one embodiment of the heterodimer, the first polypeptide and the second polypeptide form a single polypeptide chain comprising the formula (A1)-a1-(A2)-a2-[B]-[a3]-(A3)-(C1)-(C2). In one embodiment of the foregoing, “fused” means a peptidic bond.

[0023] In another embodiment of the CFXTEN composition, the invention provides a first recombinant factor VIII polypeptide of formula X:

(A1)-a1-(A2)-a2-[B] X

[0024] and a second polypeptide comprising Formula XI:

a3-(A3)-(C1)-(C2) XI

wherein the first polypeptide and the second polypeptide are fused or exist as a heterodimer; wherein, A1 is an A1 domain of factor VIII; A2 is an A2 domain of factor VIII; [B] is a B domain of factor VIII, a fragment thereof, or is deleted; A3 is an A3 domain of factor VIII; C1 is a C1 domain of factor VIII; C2 is a C2 domain of factor VIII; a1, a2, and a3 are acidic spacer regions; wherein an XTEN sequence is inserted into a3; and wherein the recombinant factor VIII protein exhibits procoagulant activity. In one embodiment of the heterodimer, the first polypeptide and the second polypeptide form a single polypeptide chain comprising the formula (A1)-a1-(A2)-a2-[B]-[a3]-(A3)-(C1)-(C2). In one embodiment of the foregoing, “fused” means a peptidic bond.

[0025] In embodiments of the foregoing formulae X and XI polypeptides, the XTEN permissive loops are contained within surface-exposed, flexible loop structures, and wherein A1-1 is located between beta strand 1 and beta strand 2, A1-2 is located between beta strand 11 and beta strand 12, A2-1 is located between beta strand 22 and beta strand 23, A2-2 is located between beta strand 32 and beta strand 33, A3-1 is located between beta strand 38 and beta strand 39 and A3-2 is located between beta strand 45 and beta strand 46, according to the secondary structure of mature factor VIII stored as Accession Number 2R7E of the DSSP database. In other embodiments of the foregoing formulae X and XI polypeptides, the surface-exposed, flexible loop structure comprising A1-1 corresponds to a region in native mature human factor VIII from about amino acid 15 to about amino acid 45. In other embodiments of the foregoing formulae X and XI polypeptides the A1-1 corresponds to a region in native mature human factor VIII from about amino acid 18 to about amino acid 41. In other embodiments of the foregoing formulae X and XI polypeptides, the surface-exposed, flexible loop structure comprising A1-2 corresponds to a region in native mature human factor VIII from about amino acid 201 to about amino acid 232. In other embodiments of the foregoing formulae X and XI polypeptides the A1-2 corresponds to a region in native mature human factor VIII from about amino acid 218 to about amino acid 229. In other embodiments of the foregoing formulae X and XI polypeptides, the surface-exposed, flexible loop structure comprising A2-1 corresponds to a region in native mature human factor VIII from about amino acid 395 to about amino acid 421. In other embodiments of the foregoing formulae X and XI polypeptides, the A2-1 corresponds to a region in native mature human factor VIII from about amino acid 397 to about amino acid 418. In other embodiments of the foregoing formulae X and XI polypeptides, the surface-exposed, flexible loop structure comprising A2-2 corresponds to a region in native mature human factor VIII from about amino acid 577 to about amino acid 635. In other embodiments of the foregoing formulae X and XI polypeptides, the A2-2 corresponds to a region in native mature human factor VIII from about amino acid 595 to about amino acid 607. In other embodiments of the foregoing formulae X and XI polypeptides, the surface-exposed, flexible loop structure comprising A3-1 corresponds to a region in native mature human factor VIII from about amino acid 1705 to about amino acid 1732. In other embodiments of the foregoing formulae X and XI polypeptides, the A3-1 corresponds to a region in native mature human factor VIII from about amino acid 1711 to about amino acid 1725. In other embodiments of the foregoing formulae X and XI polypeptides, the the surface-exposed, flexible loop structure comprising A3-2 corresponds to a region in native mature human factor VIII from about amino acid 1884 to about amino acid 1917. In other embodiments of the foregoing formulae X and XI polypeptides, the A3-2 corresponds to a region in native mature human factor VIII from about amino acid 1899 to about amino acid 1911. In other embodiments of the foregoing formulae X and XI polypeptides, an XTEN sequence is inserted into at least two of the regions A1-1, A1-2, A2-1, A2-2, A3-1, or A3-2. In other embodiments of the foregoing formulae X and XI polypeptides, an XTEN sequence is inserted immediately downstream of an amino acid which corresponds to an amino acid in mature native human factor VIII selected from the group consisting of amino acid residue number 32, 220, 224, 336, 339, 399, 416, 603, 1656, 1711, 1725, 1905 and 1910. In other embodiments of the foregoing formulae X and XI polypeptides, an additional XTEN sequence is inserted into the a3 acidic spacer region. In other embodiments of the foregoing formulae X and XT poly-peptides, an additional XTEN sequence is inserted into the a3 acid spacer immediately downstream of an amino acid which corresponds to amino acid 1656. In other embodiments of the foregoing formulae X and XI polypeptides, the A1 domain comprises an XTEN permissive loop-1 (A1-1) region and an XTEN permissive loop-2 (A1-2) region wherein the A2 domain comprises an XTEN permissive loop-1 (A2-1) region and an XTEN permissive loop-2 (A2-2) region, and wherein the A3 domain comprises an XTEN permissive loop-1 (A3-1) region and an XTEN permissive loop-2 (A3-2) region, and wherein an additional XTEN sequence is inserted into at least one of the regions A1-1, A1-2, A2-1, A2-2, A3-1, or A3-2. In other embodiments oldie foregoing formulae X and XI polypeptides, an additional XTEN sequence is inserted immediately downstream of an amino acid which corresponds to an amino acid in mature native human factor VIII selected from the group consisting of amino acid residue number 32, 220, 224, 336, 339, 390, 399, 416, 603, 1656, 1711, 1725, 1905 and 1910. In the foregoing embodiments of formulae X and XI polypeptides, the fusion protein exhibits at least about 30%, 40%, 50%, 60%, 70%, or 80%, or 90% of the procoagulant activity of the corresponding factor VIII not linked to XTEN, wherein the procoagulant activity is assayed by an in vitro coagulation assay.

[0026] In all embodiments, the polypeptide can, for example, exhibit an in vitro procoagulant activity exceeding 0.5 IU/ml, or 1.0, or 1.5, or 2.0 IU/ml when expressed in cell-culture medium and assayed by an in vitro coagulation assay. The procoagulant activity can be measured by a chromogenic assay, a one stage clotting assay (e.g., a aPTT) or both.

[0027] In some embodiments, wherein the recombinant factor VIII fusion protein comprises a factor VIII and at least a first and a second XTEN, the at least first XTEN is separated from the at least second XTEN by at least 10 amino acids, at least 50 amino acids, at least 100 amino acids, at least 200 amino acids, at least 300 amino acids, or at least 400 amino acids.

[0028] In preferred embodiments, the recombinant factor VIII fusion protein comprising a factor VIII and at least a first XTEN and, optionally, at least a second, or optionally at least a third, or optionally at least a fourth XTEN, the fusion protein exhibits reduced binding to an anti-factor VIII antibody as compared to the corresponding factor VIII not linked to XTEN. The reduced binding can be assessed either in vivo or by an in vitro assay. In one embodiment, the in vitro assay is an ELISA assay, wherein the binding of an anti-FVIII antibody to the fusion protein is reduced at least about 5%, 10%, 15%, 20%, 25%, 30%, 35% or at least about 40% or more compared to a FVIII not linked to XTEN. In another embodiment, the in vitro assay is a Bethesda assay wherein the reduced binding of the fusion protein is evidenced by a lower Bethesda titer of at least about 2, 4, 6, 8, 10, 12, 15, 20, 30, 40, 50, 60, 70, 80, 100, or 200 Bethesda units for the fusion protein compared to that for a factor VIII not linked to XTEN. In the in vitro assays, the anti-factor VIII antibody is selected from an antibody of Table 10 and polyclonal antibody from a hemophilia A patient with factor VIII inhibitors. In particular embodiments of a recombinant factor VIII fusion protein comprising a factor VIII and at least a first and a second XTEN exhibiting reduced binding to a factor VIII inhibitor antibody, the first XTEN is linked to said factor VIII polypeptide within a C2 domain of said factor VIII polypeptide, and the second XTEN is linked to said factor VIII polypeptide within an A1 or A2 domain of said factor VIII polypeptide, wherein said fusion protein exhibits reduced binding to a factor VIII inhibitor antibody as compared to the corresponding factor VIII not linked to XTEN, wherein the factor VIII inhibitor antibody is capable of binding to an epitope located within the A1, A2 or C2 domain, and further wherein the fusion protein exhibits procoagulant activity. In one embodiment of the foregoing fusion protein, the second XTEN is linked to said factor VIII polypeptide within the A2 domain of the factor VIII polypeptide and the factor VIII inhibitor antibody binds to the A2 domain of the factor VIII polypeptide. In another embodiment of the foregoing fusion protein, the second XTEN is linked to said factor VIII polypeptide within the C2 domain of the factor VIII polypeptide and the factor VIII inhibitor antibody, binds to the C2 domain of the factor VIII polypeptide. The binding of an anti-factor VIII antibody to the fusion protein is reduced by at least about 5%, 10%, 15%, 20%, 25%, 30%, 35% or 40% compared to the corresponding factor VIII not linked to XTEN when assayed by an ELISA assay, wherein the anti-factor VIII antibody is selected from the group consisting of the antibodies in Table 10 and a polyclonal antibody from a hemophilia A subject with factor VIII inhibitors. The foregoing fusion proteins can further comprise at least three XTENs, wherein the at least third XTEN is linked to the factor VIII at a site selected from within or replacing the B domain, at the C-terminus, and at or within 1, 2, 3, 4, 5, or 6 amino acids of an insertion site selected from Table 7 or Table 9. In the embodiments with reduced binding to anti-factor VIII antibodies, the fusion protein has greater procoagulant activity in the presence of the anti-FVIII antibody of at least 10%, 20%, 30%, 40%, 50%, 80%, 100%, 200%, 300%, 400%, or 500% or more compared to a corresponding factor VIII not linked to XTEN when assayed by an in vitro coagulation assay (e.g., a chromogenic or one-stage clotting assay).

[0029] In all embodiments, the XTEN of the fusion protein can, for example, be characterized in that the XTEN comprise at least 36, or at least 42, or at least 72, or at least 96, or at least 144, or at least 288, or at least 400, or at least 500, or at least 576, or at least 600, or at least 700, or at least 800, or at least 864, or at least 900, or at least 1000, or at least 2000, to about 3000 amino acid residues or even more residues; the sum of glycine (G), alanine (A), serine (S), threonine (T), glutamate (E) and proline (P) residues constitutes at least about 80%, or at least about 90%, or at least about 95%, or at least about 96%, or at least about 97%, or at least about 98%, or at least about 99% of the total amino acid residues of the XTEN; the XTEN is substantially non-repetitive such that (i) the XTEN contains no three contiguous amino acids that are identical unless the amino acids are serine; (ii) at least about 80% of the XTEN sequence consists of non-overlapping sequence motifs, each of the sequence motifs comprising about 9 to about 14, or about 12 amino acid residues consisting of four to six amino acids selected from glycine (G), alanine (A), serine (S), threonine (T), glutamate (E) and proline (P), wherein any two contiguous amino acid residues do not occur more than twice in each of the non-overlapping sequence motifs; or (iii) the XTEN sequence has a subsequence score of less than 10; the XTEN has greater than 90%, or greater than 95%, or greater than 99% random coil formation as determined by GOR algorithm; the XTEN has less than 2% alpha helices and 2% beta-sheets as determined by Chou-Fasman algorithm; the XTEN lacks a predicted T-cell epitope when analyzed by TEPITOPE algorithm, wherein the TEPITOPE threshold score for said prediction by said algorithm has a threshold of −9, and wherein said fusion protein exhibits a terminal half-life that is longer than at least about 12 h, or at least about 24 h, or at least about 48 h, or at least about 72 h, or at least about 96 h, or at least about 120 h, or at least about 144 h, or at least about 21 days or greater. In one embodiment, the recombinant factor VIII fusion protein comprises at least a second, or at least a third, or at least a fourth XTEN, which can be identical or different to the other XTEN. According to a different approach, the at least one, at least a second, or at least a third, or at least a fourth XTEN of the CFXTEN fusion protein each have at least about 80% sequence identity, or about 90%, or about 91%, or about 92%, or about 93%, or about 94%, or about 95%, or about 96%, or about 97%, or about 98%, or about 99%, to about 100% sequence identity compared to one or more XTEN of comparable length selected from Table 4, Table 13, Table 14, Table 15, Table 16, and Table 17, when optimally aligned. In yet another different approach, the at least one, at least a second, or at least a third, or at least a fourth XTEN of the CFXTEN fusion protein each have at least 90%, or about 91%, or about 92%, or about 93%, or about 94%, or about 95%, or about 96%, or about 97%, or about 98%, or about 99%, to about 100% sequence identity compared to a sequence selected from AE42_1, AE42_2, AE42_3, AG42_1, AG42_2, AG42_3, AG42_4, AE144_1A, AE144_2A, AE144_2B, AE144_3A, AE144_3B, AE144_4A, AE144_4B, AE144_5A, AE144_6B, AG144_1, AG144_2, AG144_A, AG144_B, AG144_C, AG144_F, AG144_3, AG144_4, AE288_1, AE288_2, AG288_1, and AG288_2.

[0030] In one embodiment, the factor VIII component of the CFXTEN recombinant factor VIII fusion protein comprises one, two or three amino acid substitutions selected from residues R1648, Y1680, and R1689, numbered relative to mature human factor VIII, wherein the substitutions are selected from alanine, glycine, and phenylalanine. Non-limiting examples of said substitutions include R1648A, Y1680F, and R1689A.

[0031] In another embodiment, the CFXTEN fusion protein exhibits an apparent molecular weight factor of at least about 1.3, or at least about two, or at least about three, or at least about four, or at least about five, or at least about six, or at least about seven, or at least about eight, or at least about nine, or at least about 10, when measured by size exclusion chromatography or comparable method.

[0032] In some embodiments of the CFXTEN fusion proteins, one or more of the XTEN is to the FVIII via one or two cleavage sequences that each is cleavable by a mammalian protease selected from the group consisting of factor XIa, factor XIIa, kallikrein, factor VIIa, factor IXa, factor Xa, factor IIa (thrombin), Elastase-2, MMP-12, MMP13, MMP-17 and MMP-20, wherein cleavage at the cleavage sequence by the mammalian protease releases the factor VIII sequence from the XTEN sequence, and wherein the released factor VIII sequence exhibits an increase in procoagulant activity compared to the uncleaved fusion protein. In one embodiment, the cleavage sequence(s) are cleavable by factor XIa.

[0033] According to a different approach, the CFXTEN fusion proteins comprise at least three XTENs located at different locations of the factor VIII polypeptide, wherein said different locations are selected from: an insertion location at or within 1 to 6 amino acids from a site selected from Table 5, Table 6, Table 7 Table 8, and Table 9; a location at or within 1 to 6 amino acids of amino acid residue 32, 220, 224, 336, 339, 390, 399, 416, 603, 1656, 1711, 1725, 1905 and 1910 of mature factor VIII; a location between any two adjacent domains in the factor VIII sequence, wherein said two adjacent domains are selected from the group consisting of A1 and A2, A2 and B, B and A3, A3 and C1, and C1 and C2; a location within an internal B domain deletion starting from a first position at about amino acid residue number 741 to about 750 and ending at a second position at amino acid residue number 1635 to about 1648 with reference to full-length human factor VIII sequence as set forth in FIG. 3 and the C-terminus of the factor VIII sequence, wherein the cumulative length of the multiple XTENs is at least about 100 to about 3000 amino acid residues and wherein the fusion protein retains at least about 30%, or about 40%, or about 50%, or about 60%, or about 70%, or about 80%, or about 90% of the procoagulant activity compared to the corresponding factor VIII not linked to XTEN, wherein the procoagulant activity is assayed by an in vitro coagulation assay. In one embodiment of the foregoing, the fusion protein exhibits a prolonged terminal half-life when administered to a subject as compared to a corresponding factor VIII polypeptide lacking said XTEN, wherein said fusion protein exhibits a terminal half-life at least about 3 hours, or 4 hours, or 6 hours, or 12 hours, or 13 hours, or 14 hours, or 16 hours, or 24 hours, or 48 hours, or 72 hours, or 96 hours, or 120 hours, or 144 hours, or 7 days, or 14 days, or 21 days when administered to a subject. In one embodiment, the subject is selected from the group consisting of human and a factor VIII/von Willebrand factor double knock-out mouse. In one embodiment of the foregoing, the fusion protein does not comprise a sequence selected from GTPGSGTASSSP (SEQ ID NO: 31), GSSTPSGATGSP (SEQ ID NO: 32), GSSPSASTGTGP (SEQ ID NO: 33), GASPGTSSTGSP (SEQ ID NO: 34), and GSEPATSGSETPGTSESATPESGPGSEPATSGSETPGSPAGSPTSTEEGTSTEPSEGSAPGSEPATSG SETPGSEPATSGSETPGSEPATSGSETPGTSTEPSEGSAPGTSESATPESGPGSEPATSGSETPGTST EPSEGSAP (SEQ ID NO: 59). In another embodiment of the foregoing, the fusion protein does not contain an XTEN sequence consisting of

(SEQ ID NO: 59)
GSEPATSGSETPGTSESATPESGPGSEPATSGSETPGSPAGSPTSTEEG
TSTEPSEGSAPGSEPATSGSETPGSEPATSGSETPGSEPATSGSETPGT
STEPSEGSAPGTSESATPESGPGSEPATSGSETPGTSTEPSEGSAP,
(SEQ ID NO: 71)
PGSSPSASTGTGPGSSPSASTGTGPGTPGSGTASSSPGSSTPSGATGSP
GSSPSASTGTGPGASPGTSSTGSPGTPGSGTASSSPGSSTPSGATGSPG
TPGSGTASSSPGASPGTSSTGSPGASPGTSSTGSPGTPGSGTASSS,
or
(SEQ ID NO: 80)
PGASPGTSSTGSPGASPGTSSTGSPGTPGSGTASSSPGSSTPSGATGSP
GTPGSGTASSSPGSSTPSGATGSPGTPGSGTASSSPGSSTPSGATGSPG
SSTPSGATGSPGSSPSASTGTGPGSSPSASTGTGPGASPGTSSTGSPGT
PGSGTASSSPGSSTPSGATGSPGSSPSASTGTGPGSSPSASTGTGPGAS
PGTSSTGSPGASPGTSSTGSPGSSTPSGATGSPGSSPSASTGTGPGASP
GTSSTGSPGSSPSASTGTGPGTPGSGTASSSPGSSTPSGATGS.

[0034] In a further aspect, the invention concerns CFXTEN fusion proteins with enhanced pharmacokinetic properties, including enhanced parameters compared to FVIII not linked to XTEN, wherein the enhanced properties include but are not limited to longer terminal half-life, larger area under the curve, increased time in which the blood concentration remains within the therapeutic window, increased time between consecutive doses results in blood concentrations within the therapeutic window, and decreased dose in IU over time that can be administered compared to a FVIII not linked to XTEN, yet still result in a blood concentration above a threshold concentration needed for a procoagulant effect. In some embodiments, a CFXTEN fusion proteins exhibit a prolonged terminal half-life when administered to a subject as compared to a corresponding factor VIII polypeptide lacking said XTEN. The subject can be a human or a mouse, such as a factor VIII/von Willebrand factor double knock-out mouse. In one embodiment of the foregoing, the CFXTEN exhibits a terminal half-life that is at least about two-fold, or about three fold, or about four-fold, or about five-fold, or about 10-fold, or about 20-fold longer when administered to a subject compared to the corresponding factor VIII not linked to XTEN. In one embodiment, the CFXTEN fusion protein exhibits a terminal half-life at least about 3 hours, or 4 hours, or 6 hours, or 12 hours, or 13 hours, or 14 hours, or 16 hours, or 24 hours, or 48 hours, or 72 hours, or 96 hours, or 120 hours, or 144 hours, or 7 days, or 14 days, or 21 days when administered to the subject. In other embodiments, the enhanced pharmacokinetic property of the fusion proteins of the embodiments is the property of maintaining a circulating blood concentration of procoagulant fusion protein in a subject in need thereof above a threshold concentration of 0.01 IU/ml, or 0.05 IU/ml, or 0.1 IU/ml, or 0.2 IU/ml, or 0.3 IU/ml, or 0.4 IU/ml or 0.5 IU/ml for a period that is at least about two fold, or at least about three-fold, or at least about four-fold, or at least about five-fold, or at least about six-fold, or at least about eight-fold, or at least about ten-fold, or at least about 20-fold, or at least about 40-fold, or at least about 60-fold longer compared to the corresponding FVIII not linked to XTEN and administered to a subject at a comparable dose. The increase in half-life and time spent above the threshold concentration permits less frequent dosing and decreased amounts of the fusion protein (in moles equivalent) that are administered to a subject, compared to the corresponding FVIII not linked to XTEN. In one embodiment, administration of a subject fusion protein to a subject using a therapeutically-effective dose regimen results in a gain in time of at least two-fold, or at least three-fold, or at least four-fold, or at least five-fold, or at least six-fold, or at least eight-fold, or at least 10-fold, or at least about 20-fold, or at least about 40-fold, or at least about 60-fold or higher between at least two consecutive Cmax peaks and/or Cmin troughs for blood levels of the fusion protein compared to the corresponding FVIII not linked to the XTEN and administered using a comparable dose regimen to a subject.

[0035] In preferred embodiments, the CFXTEN fusion proteins retain at least about 30%, or about 40%, or about 50%, or about 60%, or about 70%, or about 80%, or about 90% of the procoagulant activity compared to the corresponding factor VIII not linked to XTEN, wherein the procoagulant activity is assayed by an in vitro coagulation assay such as, but not limited to a chromogenic assay or a one- or two-stage clotting assay.

[0036] According to a different approach, the invention provides recombinant factor VIII fusion proteins comprising a factor VIII polypeptide and at least one extended recombinant polypeptide (XTEN), wherein said factor VIII polypeptide comprises A1 domain, A2 domain, A3 domain, C1 domain, C2 domain and optionally all or a portion of B domain, and wherein said at least one XTEN is linked to said factor VIII polypeptide at an insertion site selected form residue numbers 18-32, or 40, or 211-224, or 336-403, or 599, or 745-1640, or 1656-1728, or 1796-1804, or 1900-1912, or 2171-2332; and wherein the fusion protein retains at least about 30%, or about 40%, or about 50%, or about 60%, or about 70%, or about 80%, or about 90% of the procoagulant activity compared to the corresponding factor VIII not linked to XTEN. In one embodiment of the foregoing, the fusion protein comprises at least a second XTEN, or at least a third, or at least a fourth XTEN wherein the XTEN are linked to the factor VIII at a site at or within 1 to 6 amino acids of a site selected from Table 5, Table 6, Table 7, Table 8, and Table 9. In another embodiment, the invention provides an recombinant factor VIII fusion protein further comprising at least a second XTEN, or at least a third, or at least a fourth XTEN linked to said FVIII polypeptide at an insertion site selected from Table 5, Table 6, Table 7, Table 8, Table 9, at or within 6 amino acids to the N- or C-terminus side of an insertion location at one or more insertion locations from FIG. 8 and within one or more insertion ranges from FIG. 9 wherein at least two XTEN are separated by an amino acid sequence of at least 100 to about 400 amino acids.

[0037] The invention provides CFXTEN wherein the XTEN have a Ratio XTEN Radii of at least 2.3 or at least 2.5, and are separated by an amino acid sequence of at least about 20 amino acid residues, or at least about 50, or at least about 100, or at least about 200, or at least about 300, or at least about 400 amino acid residues. In other embodiments, the CFXTEN comprise at least four XTEN wherein the XTEN have a Ratio XTEN Radii of at least 2.3, or at least 2.5, or at least 2.8, and wherein at least three of the four of the XTEN linked to the fusion protein are separated by an amino acid sequence of at least about 20 amino acid residues, or at least about 50, or at least about 100, or at least about 200, or at least about 300, or at least about 400 amino acid residues, and the fourth XTEN is linked within the B domain (or a fragment thereof) or within the C domain (or the terminus thereof).

[0038] In some embodiments, the subject compositions are configured to have reduced binding affinity for a clearance receptor in a subject as compared to the corresponding FVIII not linked to the XTEN. In one embodiment, the CFXTEN fusion protein exhibits binding affinity for a clearance receptor of the FVIII in the range of about 0.01%-30%, or about 0.1% to about 20%, or about 1% to about 15%, or about 2% to about 10% of the binding affinity of the corresponding FVIII not linked to the XTEN. In another embodiment, a fusion protein with reduced affinity for a clearance receptor has reduced active clearance and a corresponding increase in half-life of at least about 2-fold, or 3-fold, or at least 4-fold, or at least about 5-fold, or at least about 6-fold, or at least about 7-fold, or at least about 8-fold, or at least about 9-fold, or at least about 10-fold, or at least about 12-fold, or at least about 15-fold, or at least about 17-fold, or at least about 20-fold longer compared to the corresponding FVIII that is not linked to the XTEN.

[0039] In an embodiment, the invention provides a recombinant factor VIII fusion protein comprising FVIII and one or more XTEN wherein the fusion protein exhibits increased solubility of at least three-fold, or at least about four-fold, or at least about five-fold, or at least about six-fold, or at least about seven-fold, or at least about eight-fold, or at least about nine-fold, or at least about ten-fold, or at least about 15-fold, or at least a 20-fold, or at least 40-fold, or at least 60-fold at physiologic conditions compared to the FVIII not linked to XTEN.

[0040] In a further aspect, the invention provides a pharmaceutical composition comprising the fusion protein of any of the embodiments described herein and a pharmaceutically acceptable carrier.

[0041] In another embodiment, the invention provides a method of treating a coagulopathy in a subject, comprising administering to said subject a composition comprising a clotting effective amount of the pharmaceutical composition. In one embodiment of the method, after said administration, a blood concentration of procoagulant factor VIII is maintained at about 0.05, or 1, or 1.5 IU/ml or more for at least 48 hours after said administration. In another embodiment, the invention provides a method of clotting blood in a subject, comprising contacting a clotting effective amount of the pharmaceutical composition with the blood.

[0042] In another embodiment, the invention provides a method of treating a coagulopathy in a subject with circulating inhibitors of factor VIII, comprising administering to said subject a composition comprising a therapeutically effective amount of the pharmaceutical composition of CFXTEN, wherein the composition exhibits greater procoagulant activity in said subject compared to a composition comprising the corresponding factor VIII not linked to XTEN and administered using a comparable amount. In one embodiment of the method, the coagulopathy is hemophilia A. In another embodiment, the coagulopathy is the result of trauma or surgery or infection.

[0043] The invention provides a method of treating a bleeding episode in a subject, comprising administering to said subject a composition comprising a clotting effective amount of the CFXTEN pharmaceutical composition, wherein the clotting effective amount of the fusion protein arrests a bleeding episode for a period that is at least three-fold, or at least four-fold, or at least five-fold longer compared to a corresponding factor VIII not linked to XTEN and administered using a comparable amount to said subject. Non-limiting examples of a corresponding factor VIII not linked to XTEN include native FVIII, the sequences of Table 1, BDD-FVIII, and the pCB0114 FVIII.

[0044] In another embodiment, the invention provides a CFXTEN recombinant factor VIII fusion protein for use in a pharmaceutical regimen for treating a hemophilia A patient, said regimen comprising a pharmaceutical composition comprising a CFXTEN fusion protein. In one embodiment of the pharmaceutical regimen, the regimen further comprises the step of determining the amount of pharmaceutical composition comprising the CFXTEN needed to achieve hemostasis in the hemophilia A patient. In another embodiment, the pharmaceutical regimen for treating a hemophilia A subject comprises administering the pharmaceutical composition in two or more successive doses to the subject at an effective amount, wherein the administration results in at least a 10%, or 20%, or 30%, or 40%, or 50%, or 60%, or 70%, or 80%, or 90% greater improvement of at least one, two, or three parameters associated with the hemophilia A disease compared to the factor VIII not linked to XTEN and administered using a comparable dose. Non-limited examples of parameters improved include blood concentration of procoagulant FVIII, a reduced activated partial prothrombin (aPTT) assay time, a reduced one-stage or two-stage clotting assay time, delayed onset of a bleeding episode, a reduced chromogenic assay time, a reduced bleeding assay time, resolution of a bleeding event, or a reduced Bethesda titer to native FVIII.

[0045] In another aspect, the invention provides isolated nucleic acid sequences encoding the fusion proteins of any one of the embodiments of the CFXTEN fusion protein. In one embodiment, the isolated nucleic acid is the complement of a sequence encoding a CFXTEN fusion protein of the embodiments. In one embodiment, the isolated nucleic acid further comprises a sequence encoding a signal peptide, wherein said sequence is ATGCAAATAGAGCTCTCCACCTGCTTCTTTCTGTGCCTTTTGCGATTCTGCTTTAGT (SEQ ID NO: 1613), or the complement thereof. In another embodiment, the invention provides an expression vector comprising the nucleic acid encoding the fusion protein, or the complement thereof. In another embodiment, the invention provides an isolated host cell comprising the foregoing expression vector. In another embodiment, the invention provides a method of producing the fusion protein of any of the embodiments, comprising providing a host cell comprising the expression vector; culturing the host cell to effect production of the fusion protein; and recovering the fusion protein.

[0046] In one embodiment, the invention provides an isolated fusion protein comprising a polypeptide having at least about 80% sequence identity, or about 90%, or about 91%, or about 92%, or about 93%, or about 94%, or about 95%, or about 96%, or about 97%, or about 98%, or about 99%, to about 100% sequence identity compared to a sequence of comparable length selected from Table 21, when optimally aligned.

[0047] In another embodiment, the invention provides an isolated nucleic acid comprising a polynucleotide sequence selected from (a) a sequence having at least about 80% sequence identity, or about 90%, or about 91%, or about 92%, or about 93%, or about 94%, or about 95%, or about 96%, or about 97%, or about 98%, or about 99%, to about 100% sequence identity compared to a sequence of comparable length selected from Table 21, when optimally aligned, or (b) the complement of the polynucleotide of (a). In another embodiment, the isolated nucleic acid comprises the sequence ATGCAAATAGAGCTCTCCACCTGCTTCTTTCTGTGCCTTTTGCGATTCTGCTTTAGT (SEQ ID NO: 1613) linked to the 5′ end of the nucleic acid of (a) or the complement of the sequence linked to the 3′ end of (b).

[0048] It is specifically contemplated that the recombinant factor VIII fusion proteins can exhibit one or more or any combination of the properties disclosed herein.

### INCORPORATION BY REFERENCE

[0049] All publications, patents, and patent applications mentioned in this specification are herein incorporated by reference to the same extent as if each individual publication, patent, or patent application was specifically and individually indicated to be incorporated by reference.

### BRIEF DESCRIPTION OF THE DRAWINGS

[0050] The features and advantages of the invention may be further explained by reference to the following detailed description and accompanying drawings that sets forth illustrative embodiments.

[0051] FIGS. 1A-1C show a schematic representation of the FVIII architecture and spatial arrangement of the domains during processing and clotting, and is intended to represent both native FVIII and B domain deleted variants. The A1 domain ranges from residue 1 to 372 (numbering relative to the mature form of FVIII sequence NCBI Protein RefSeq NP_000123 and encompassing a1 residues), A2 domain ranges from residue 373 to 740, B domain ranges from residue 741 to 1648, A3 domain ranges from residue 1649 to 2019 (encompassing a3 acidic region), C1 domain ranges from 2020 to 2172, and the C2 domain ranges from residue 2173 to 2332. BDD variants include deletions between the range 741 to 1648, leaving some or no remnant residues, with a non-limiting BDD remnant sequence being SFSQNPPVLKRHQR (SEQ ID NO: 1614). FIG. 1A shows the domain architecture of a single chain FVIII prior to processing. Arrows indicate the sites at residues R372, R740, R1648, and R1689 that are cleaved in the processing and conversion of FVIII to FVIIIa. FIG. 1B shows the FVIII molecule that has been processed into the heterodimer by the cleavage at the R1648 residue, with the a3 acidic region of the A3 domain indicated on the N-terminus of the A3. FIG. 1C shows the FVIII molecule processed into the FVIIIa heterotrimer by the cleavage at the R372, R740, and R1689 residues.

[0052] FIG. 2 is a schematic of the coagulation cascade, showing the intrinsic and extrinsic arms leading to the common pathway.

[0053] FIG. 3 depicts the amino acid sequence of mature human factor VIII (SEQ ID NO: 1592).

[0054] FIG. 4 depicts a factor VIII sequence with a deletion of a portion of the B domain (SEQ ID NO: 1593).

[0055] FIGS. 5A-5D illustrate several examples of CFXTEN configurations of FVIII linked to XTEN (the latter shown as thick, wavy lines). In all cases, the FVIII can be either native or a BDD form of FVIII, or a single chain form in which the entire B domain, including the native cleavage sites are removed. FIG. 5A shows, left to right, three variations of single chain factor VIII with XTEN linked to the N-terminus, the C-terminus, and two XTEN linked to the N- and C-terminus. FIG. 5B shows six variations of mature heterodimer FVIII with, left to right, an XTEN linked to the N-terminus of the A1 domain; an XTEN linked to the C-terminus of the C2 domain; an XTEN linked to the N-terminus of the A1 domain and the C-terminus of the C2 domain; an XTEN linked to the N-terminus of the A1 domain and to the N-terminus of the A3 domain; an XTEN linked to the C-terminus of the C2 domain and to the N-terminus of the A3 domain via residual B domain amino acids; and an XTEN linked to the N-terminus of the A1 domain, the C-terminus of the A2 domain via residual B domain amino acids, and to the C-terminus of the C2 domain. FIG. 5C shows, left to right, three variations of single chain factor VIII: an XTEN linked to the N-terminus of the A1 domain, an XTEN linked within a surface loop of the A1 domain and an XTEN linked within a surface loop of the A3 domain; an XTEN linked within a surface loop of the A2 domain, an XTEN linked within a surface loop of the C2 domain and an XTEN linked to the C terminus of the C2 domain; an XTEN linked to the N-terminus of the A1 domain and within a surface loop of the C1 domain and to the C-terminus of the C domain. FIG. 5D shows six variations of mature heterodimer FVIII with, left to right, an XTEN linked to the N-terminus of the A1 domain, an XTEN linked within a surface loop of the A1 domain, and an XTEN linked within a surface loop of the A3 domain; an XTEN linked within a surface loop of the A2 domain, and an XTEN linked within a surface loop of the C1 domain, and an XTEN linked to the C-terminus of the C2 domain; an XTEN linked to the N-terminus of the A1 domain, an XTEN linked within a surface loop of the A1 domain, an XTEN linked within a surface loop of the A3 domain, and an XTEN linked to the C-terminus of the C2 domain; an XTEN linked to the N-terminus of the A1 domain, an XTEN linked to the N-terminus of the A3 domain via residual amino acids of the B domain, and an XTEN linked within a surface loop of the C2 domain; an XTEN linked within a surface loop of the A2 domain, an XTEN linked to the N-terminus of the A3 domain via residual amino acids of the B domain, an XTEN linked within a surface loop of the C1 domain, and an XTEN linked to the C-terminus of the C2 domain; and an XTEN linked within the B domain or between the residual B domain residues of the BDD variant (and the invention also contemplates a variation in which the XTEN replaces the entirety of the B domain, including all native cleavage sites, linking the A2 and A3 domains, resulting in a single chain form of factor VIII). This figure also embodies all variations in which one or more XTEN sequences are inserted within the B domain and the resulting fusions are cleaved at one or more sites (e.g., at R1648 site) during intracellular processing.

[0056] FIG. 6A is a graphic portrayal of a CFXTEN construct with an XTEN inserted within the B domain and linked to the C-terminus of the C2 domain illustrating the unstructured characteristic of the XTEN leading to random coil formation that can cover portions of the factor VIII proximal to the XTEN. In the lower panel (FIG. 6B), the drawing depicts that when XTEN is in random coil, it can adopt a conformation resulting in steric hindrance that blocks binding of factor VIII inhibitor antibodies that would otherwise have affinity for epitopes proximal to the XTEN site of insertion.

[0057] FIG. 7 is a graphic portrayal of the various analyses performed on a FVIII B-domain deleted sequence to identify insertion sites for XTEN within the FVIII sequence. Each of lines A-H are on an arbitrary scale of Y axis values across the FVIII BDD sequence such that low values represent areas with a high predicted tolerance for XTEN insertion, with the residue numbers on the X axis. Line A shows the domain boundaries; all discontinuities in this line represent boundaries that are likely to accept XTEN. Line B shows exon boundaries; i.e., each step in the line represents a new exon. Line C shown regions that were not visible in the X-ray structure due to a lack of order in the crystal. Lines labeled D represents multiple predictions of order that were calculated using the respective programs FoldIndex found on the World-Wide web site bip.weizmann.ac.il/fldbin/findex (last accessed Feb. 23, 2011) (see Jaime Prilusky, Clifford E. Felder, Tzviya Zeev-Ben-Mordehai, Edwin Rydberg, Orna Man, Jacques S. Beckmann, Israel Silman, and Joel L. Sussman, 2005, Bioinformatics based on the Kyte & Doolitlle algorithm, as well as RONN found on the World-Wide web site strubi.ox.ac.uk/RONN (last accessed Feb. 23, 2011) (see Yang, Z. R., Thomson, R., McMeil, P. and Esnouf, R. M. (2005) RONN: the bio-basis function neural network technique applied to the detection of natively disordered regions in proteins Bioinformatics 21: 3369-3376. Lines E and F were calculated based on multiple sequence alignments of FVIII genes from 11 mammals available in GenBank. Line E represents the conservation of individual residues. Line F represent the conservation of 3 amino acid segments of FVIII. Lines G and H represent gaps and insertions observed in the multiple sequence alignment of 11 mammalian FVIII genes. Line J lists the XTEN insertion points by amino acid number that were obtained based by combining the multiple measurements above.

[0058] FIG. 8 depicts the sites in a FVIII B-domain deleted sequence (SEQ ID NO: 1594) identified as active insertion points for XTEN using the information depicted in FIG. 8 and as confirmed in the assays of Example 34.

[0059] FIG. 9 depicts the range of sites in a FVIII B-domain deleted sequence (SEQ ID NO: 1595) identified for insertion of XTEN using the information depicted in FIG. 8 and or Example 34 plus a span of amino acids around each insertion point that are considered suitable for insertion of XTEN.

[0060] FIG. 10 is a schematic of the assembly of a CFXTEN library created by identifying insertion points as described for FIG. 7 followed by insertion of single XTEN (black bars) at the various insertion points using molecular biology techniques. The constructs are expressed and recovered, then evaluated for FVIII activity and pharmacokinetic properties to identify those CFXTEN configurations that result in enhanced properties.

[0061] FIG. 11 is a schematic of the assembly of a CFXTEN component library in which segments of FVIII BDD domains, either singly or linked to various lengths of XTEN (black bars) are assembled in a combinatorial fashion into libraries of genes encoding the CFXTEN, which can then be evaluated for FVIII activity and pharmacokinetic properties to identify those CFXTEN configurations that result in enhanced properties.

[0062] FIGS. 12A-12D illustrate several examples of CFXTEN configurations with XTEN (shown as thick, wavy lines), with certain XTEN releasable by inserting cleavage sequences (indicated by black triangles) that are cleavable by procoagulant proteases. FIG. 12A illustrates a scFVIII with two terminal releasable XTENS. FIG. 12B illustrates the same configuration as FIG. 12A but with an additional non-releasable XTEN linking the A3 and C1 domains. FIG. 12C illustrates a mature heterodimer FVIII with two terminal releasable XTEN. FIG. 12D illustrates the same configuration as 10 C but with an additional non-releasable XTEN linking the A3 and C1 domains.

[0063] FIG. 13 is a schematic flowchart of representative steps in the assembly, production and the evaluation of an XTEN.

[0064] FIG. 14 is a schematic flowchart of representative steps in the assembly of a CFXTEN polynucleotide construct encoding a fusion protein. Individual oligonucleotides 501 are annealed into sequence motifs 502 such as a 12 amino acid motif (“12-mer”), which is ligated to additional sequence motifs from a library to create a pool that encompasses the desired length of the XTEN 504, as well as ligated to a smaller concentration of an oligo containing BbsI, and KpnI restriction sites 503. The resulting pool of ligation products is gel-purified and the band with the desired length of XTEN is cut, resulting in an isolated XTEN gene with a stopper sequence 505. The XTEN gene is cloned into a stuffer vector. In this case, the vector encodes an optional CBD sequence 506 and a GFP gene 508. Digestion is then performed with BbsI/HindIII to remove 507 and 508 and place the stop codon. The resulting product is then cloned into a BsaI/HindIII digested vector containing a gene encoding the FVIII, resulting in the gene 500 encoding an FVIII-XTEN fusion protein.

[0065] FIG. 15 is a schematic flowchart of representative steps in the assembly of a gene encoding fusion protein comprising a CF and XTEN, its expression and recovery as a fusion protein, and its evaluation as a candidate CFXTEN product.

[0066] FIGS. 16A-16F illustrate the use of donor XTEN sequences to produce truncated XTENs. FIG. 16A provides the sequence of AG864 (SEQ ID NO: 1596), with the underlined sequence used to generate a sequence length of 576 (SEQ ID NO: 1597). FIG. 16B provides the sequence of AG864 (SEQ ID NO: 1598), with the underlined sequence used to generate a sequence length of 288 (SEQ ID NO: 1599). FIG. 16C provides the sequence of AG864 (SEQ ID NO: 1600), with the underlined sequence used to generate a sequence length of 144 (SEQ ID NO: 1601). FIG. 16D provides the sequence of AE864 (SEQ ID NO: 1602), with the underlined sequence used to generate a sequence length of 576 (SEQ ID NO: 1603). FIG. 16E provides the sequence of AE864 (SEQ ID NO: 1604), with the underlined sequence used to generate a sequence length of 288 (SEQ ID NO: 1605). FIG. 16F provides the sequence of AE864 (SEQ ID NO: 1606) used to generate four sequences of 144 length (SEQ ID NOS 1607-1610, respectively, in order of appearance) (the double underline indicates the first amino acid in the 144 sequence with the single underline representing the balance of that sequence).

[0067] FIGS. 17A-17C are schematic representations of the design of Factor VIII-XTEN expression vectors with different strategies introducing XTEN elements into the FVIII coding sequence. FIG. 17A shows an expression vector encoding XTEN fused to the 3′ end of the sequence encoding FVIII. FIG. 17B depicts an expression vector encoding an XTEN element inserted into the middle of the coding sequence encoding a single FVIII. FIG. 17C depicts an expression vector encoding two XTEN elements: one inserted internal to the FVIII coding sequence, and the other fused to the 3′ end of the FVIII coding sequence.

[0068] FIG. 18 illustrates the process of combinatorial gene assembly of genes encoding XTEN. In this case, the genes are assembled from 6 base fragments and each fragment is available in 4 different codon versions (A, B, C and D). This allows for a theoretical diversity of 4096 in the assembly of a 12 amino acid motif.

[0069] FIG. 19 shows the pharmacokinetic profile (plasma concentrations) in cynomolgus monkeys after single doses of different compositions of GFP linked to unstructured polypeptides of varying length, administered either subcutaneously or intravenously, as described in Example 41. The compositions were GFP-L288, GFP-L576, GFP-XTEN_AF576, GFP-Y576 and XTEN_AD836-GFP. Blood samples were analyzed at various times after injection and the concentration of GFP in plasma was measured by ELISA using a polyclonal antibody against GFP for capture and a biotinylated preparation of the same polyclonal antibody for detection. Results are presented as the plasma concentration versus time (h) after dosing and show, in particular, a considerable increase in half-life for the XTEN_AD836-GFP, the composition with the longest sequence length of XTEN. The construct with the shortest sequence length, the GFP-L288 had the shortest half-life.

[0070] FIGS. 20A-20C show an SDS-PAGE gel of samples from a stability study of the fusion protein of XTEN_AE864 fused to the N-terminus of GFP (see Example 42). The GFP-XTEN was incubated in (A) cynomolgus plasma and (C) rat kidney lysate for up to 7 days at 37° C. In addition, GFP-XTEN administered to (B) cynomolgus monkeys was also assessed. Samples were withdrawn at 0, 1 and 7 days and analyzed by SDS PAGE followed by detection using Western analysis with antibodies against GFP.

[0071] FIG. 21 shows results of a size exclusion chromatography analysis of glucagon-XTEN construct samples measured against protein standards of known molecular weight, with the graph output as absorbance versus retention volume, as described in Example 40. The glucagon-XTEN constructs are 1) glucagon-Y288; 2) glucagonY-144; 3) glucagon-Y72; and 4) glucagon-Y36. The results indicate an increase in apparent molecular weight with increasing length of XTEN moiety (see Example 40 for data).

[0072] FIG. 22 shows results of a Western blot of proteins expressed by cell culture of cells transformed with constructs as designated (Example 25). The samples in lanes 1-12 were: MW Standards, FVIII (42.5 ng), pBC0100B, pBC0114A, pBC0100, pBC0114, pBC0135, pBC0136, pBC0137, pBC0145, pBC0149, and pBC0146, respectively. Lanes 8, 9 and 12 show bands consistent with a FVIII with a C-terminal XTEN288, with an estimated MW of 95 kDa. Lanes 7 and 11 show bands consistent with a FVIII with a C-terminal XTEN42, with an estimated MW of 175 kDa. Lanes 2-6 show bands consistent with FVIII and heavy chain. Lanes 10 and 23 show bands consistent with heavy chain. Lane 7 shows a band consistent with heavy chain and an attached XTEN42.

[0073] FIG. 23 shows the results of FVIII assay on samples obtained from FVIII and von Willebrand factor double knock-out mice with hydrodynamic plasmid DNA injection, as detailed in Example 36.

[0074] FIGS. 24A-24B are graphic and tabular portrayals of the pharmacokinetic properties of rBDD-FVIII and the purified CFXTEN fusion proteins pBC0145 and pBC0146 (with C-terminal XTEN) administered to either HemA (FIG. 24A) or FVIII/VWF double knock-out (FIG. 24B) mice as described in Example 30, showing the enhanced half-life of the CFXTEN in both strains of mice.

[0075] FIGS. 25A-25B are graphic and tabular portrayals of the pharmacokinetic properties of rBDD-FVIII and the CFXTEN fusion proteins pSD0050 and pSD0062 (with internal inserted XTEN) administered to either HemA (FIG. 25A) or FVIII/VWF double knock-out mice (FIG. 25B) using a cell culture PK assay in HemA mice. Dose, 5-minute recovery, and half-life (T½) are shown, as described in Example 32, underscoring the enhanced recovery and half-life of the CFXTEN compared to the positive control FVIII in both strains of mice.

[0076] FIG. 26 is a graphic depiction of a titration of GMA8021 FVIII inhibitor using the pBC0114 BDD-FVIII AND CFXTEN construct LSD0049.002 with three 144 amino acid XTEN insertions at residues 18, 745 and 2332. The data indicate a right-shift of approximately 0.7 order of magnitude in the amount of antibody in μg/ml required to inhibit the CFXTEN to the 50% level, compared to FVIII positive control.

[0077] FIG. 27 is a schematic of the logic flow chart of the algorithm SegScore. In the figure the following legend applies: i, j—counters used in the control loops that run through the entire sequence; HitCount—this variable is a counter that keeps track of how many times a subsequence encounters an identical subsequence in a block; SubSeqX—this variable holds the subsequence that is being checked for redundancy; SubSeqY—this variable holds the subsequence that the SubSeqX is checked against; BlockLen—this variable holds the user determined length of the block; SegLen—this variable holds the length of a segment. The program is hardcoded to generate scores for subsequences of lengths 3, 4, 5, 6, 7, 8, 9, and 10; Block—this variable holds a string of length BlockLen. The string is composed of letters from an input XTEN sequence and is determined by the position of the i counter; SubSeqList—this is a list that holds all of the generated subsequence scores.

[0078] FIG. 28 depicts the application of the algorithm SegScore to a hypothetical XTEN of 11 amino acids (SEQ ID NO: 1591) in order to determine the repetitiveness. An XTEN sequence consisting of N amino acids is divided into N−S+1 subsequences of length S (S=3 in this case). A pair-wise comparison of all subsequences is performed and the average number of identical subsequences is calculated to result in the subsequence score of 1.89.

[0079] FIG. 29 is a graph of the individual construct values of the ratio of FVIII activity in the assayed CFXTEN to that of the pBC114 FVIII positive control after exposure to the GMA8021 antibody to FVIII, grouped according to the number of XTEN in the construct fusion protein (see Example 28). The results show an essentially linear relationship in the ability of the CFXTEN to retain FVIII activity with increasing number of incorporated XTEN.

[0080] FIGS. 30A-30H depict the primary sequence and domain structure of mature B-domain deleted (BDD) human FVIII construct (Example 46). The location of the introduced NheI and ClaI restriction sites is shown. Note that the amino acid numbering corresponds to the amino acid positions in the primary sequence of mature FVIII (FIGS. 30A-30H). Individual domains are bounded by gray lines/boxes with domain identification in gray text. Acidic regions (a1, a2, a3) are indicated with dashed boxes. Solid wedges/triangles indicate sites of thrombin cleavage in the activation of FVIII to FVIIIa. Unfilled wedges/triangle indicates the site of intracellular proteolytic processing to the two-chained form of FVIII. Hexagons indicate sites of N-linked glycosylation. Circles indicate sites of Tyr sulfation. Unique non-native restriction sites (NheI, GCTAG; ClaI, ATCGAT) introduced into cDNA to facilitate XTEN insertion/recombination are highlighted in gray with double underline.

[0081] FIG. 31 provides graphical representation of the FVIII construct described in FIG. 30, indicating the domain organization and the location of native and non-native restriction sites.

[0082] FIG. 32 shows the graphical ASAView outputs for structural datasets 2R7E, 3CDZ, and PM0076106. Accessible Solvent Areas (ASA) for the amino acids in domains A1, A2, A3, C1 and C2 are shown. Analyses were performed on X-ray crystallographic coordinates 3CDZ (Ngo et al., Structure 16: 597-606 (2008)) and 2R7E (Shen et al., Blood 111:1240-1247 (2008)) deposited in the Protein Data Bank maintained by the Research Collaboratory for Structural Bioinformatics (RCSB; http://www.rcsb.org/pdb), as well as on atomic coordinates PM0076106 for the predicted refined FVIII structure derived from a molecular dynamics simulation study (Venkateswarlu, BMC Struct. Biol. 10:7 (2010)) deposited in the Protein Model Database (http://mi.caspur.it/PMDB/main.php) maintained by Consorzio Interuniversitario per le Applicazioni di Supercalcolo per Università e Riserca (CASPUR) and the Department of Biochemical Sciences of the University of Rome.

[0083] FIG. 33 shows a structural representation of the location of XTEN insertion sites. The central drawing corresponding to the crystal structure of FVIII (PDB: 2R7E) is surrounded by detailed view of domains A1, A2, A3, C1 and C2. Beta strands and alpha helices are shown as ribbon representation. Loops are shown as alpha carbon pipes. The amino acids at XTEN insertion sites are shown as CPK sphere representation. The number in each graph indicate the location of the XTEN insertion sites according to the numbering in FIG. 30.

[0084] FIG. 34 shows a structural representation of the location of XTEN insertion sites shown in FIG. 33 wherein the resulting recombinant FVIII protein displays FVIII activity.

[0085] FIG. 35 shows a structural representation of the location of XTEN insertion sites shown in FIG. 34 wherein the resulting recombinant FVIII protein displays FVIII activity.

[0086] FIG. 36 shows a structural representation of the location of XTEN insertion sites shown in FIG. 35 wherein the resulting recombinant FVIII protein displays FVIII activity.

[0087] FIG. 37 shows a ClustalW multiple sequence alignment of domains A1, A2, A3, C1 and C2 of FVIII showing the location of XTEN insertions resulting in recombinant FVIII proteins displaying FVIII activity (black box, white text) or displaying no FVIII activity (grey box, bold text).

[0088] FIG. 38 shows a DSSP graphical representation of the secondary structure of the two polypeptide chains in a native active human FVIII crystal structure deposited under the identifier 2R7E at the Protein Data Bank (see Example 47). Amino acid sequence numbering is the same as in the protein sequence in FIG. 30. The beta sheet regions are shown as filled arrows and are designated β1 to β66. The location of the XTEN permissive loops is denoted by crosshatched boxes. Domain A1 XTEN permissive loops are designated Loop A1-1 and Loop A1-2. Domain A2 XTEN permissive loops are designated Loop A2-1 and Loop A2-2. Domain A3 XTEN permissive loops are designated Loop A3-1 and Loop A3-2.

[0089] FIG. 39 shows a DSSP graphical representation of the secondary structure of the two polypeptide chains in a native active human FVIII crystal structure deposited under the identifier 2R7E at the Protein Data Bank (see Example 47). Amino acid sequence numbering is the same as in the protein sequence in FIG. 30. The beta sheet regions are shown as filled arrows and are designated β1 to β66. The location of the XTEN permissive loops is denoted by crosshatched boxes. Domain A1 XTEN permissive loops are designated Loop A1-1 and Loop A1-2. Domain A2 XTEN permissive loops are designated Loop A2-1 and Loop A2-2. Domain A3 XTEN permissive loops are designated Loop A3-1 and Loop A3-2.

[0090] FIG. 40 shows a ClustalW multiple sequence alignment of domains A1, A2, A3, C1 and C2 of FVIII showing the location of XTEN insertions resulting in recombinant FVIII proteins displaying FVIII activity (black box, white text) or displaying no FVIII activity (grey box, bold text). The locations of the XTEN permissive loops are indicated by dashed rectangles (see Example 47).

[0091] FIG. 41A presents a front view structural representation of human FVIII (PDB:2R7E) showing the location of domains A1, A2, A3, C1 and C2 (circled in dashed lined) and the locations of XTEN permissive loops A1-1, A1-2, A2-1, A2-2, A3-1 and A3-2 highlighted as CPK sphere representations.

[0092] FIG. 41B presents a side view structural representation of human FVIII (PDB:2R7E) showing the location of domains A1, A2, A3, C1 and C2 (circled in dashed lined) and the locations of XTEN permissive loops A1-1, A1-2, A2-1, A2-2, A3-1 and A3-2 highlighted as CPK sphere representations.

[0093] FIGS. 42A, 42C, and 42E show the top view structural representations of isolated human FVIII (PDB:2R7E) A domains showing the location of XTEN permissive loops highlighted as CPK sphere representations. FIGS. 42B, 42D and 42F show side view structural representations of isolated human FVIII (PDB:2R7E) A domains showing the location of XTEN permissive loops highlighted as CPK sphere representations.

[0094] FIG. 43 shows sequences of various factor VIII B-domain deletions and individual mutations. Lines 4-10 show various B-domain deletions with indicated XTEN linking the flanking B-domain residual or A3 domain residues. The R1648A mutation is indicated by arrow in line 5 and 8, while the Y1680F mutation is indicated by arrow in lines 8-10.

[0095] FIG. 44 is a bar graph of chromogenic and aPTT assay activity of various CFXTEN with single XTEN insertions (Example 49).

[0096] FIG. 45 is a bar graph of chromogenic and aPTT assay activity of various CFXTEN with 2 XTEN insertions (Example 49).

[0097] FIG. 46 is a bar graph of chromogenic and aPTT assay activity of various CFXTEN with 3 XTEN insertions (Example 49).

[0098] FIG. 47 is a graph of plasma levels in DKO mice of various administered CFXTEN with single XTEN insertions compared to a BDD-FVIII control, demonstrating the 10- to 20-fold longer half-life achieved by the XTEN insertions at various locations (Example 50).

[0099] FIG. 48 is a graph of plasma levels in DKO mice of various administered CFXTEN with one, two, and three XTEN insertions compared to a BDD-FVIII control, demonstrating the increases in half-life achieved by the inclusion of additional XTEN insertions compared to single or two insertions (Example 51).

[0100] FIGS. 49A-49D are graphs of the plotted inhibition curves for remaining factor VIII procoagulant activity in samples assayed in the Bethesda assay with three hemophilia patient sera (FIGS. 49A-49C) or sheep anti-FVII (FIG. 49D) described in Example 52, demonstrating a clear left-shift of the inhibition curve for the two CFXTEN molecules compared to the FVIII not linked to XTEN.

### DETAILED DESCRIPTION OF THE INVENTION

[0101] Before the embodiments of the invention are described, it is to be understood that such embodiments are provided by way of example only, and that various alternatives to the embodiments of the invention described herein may be employed in practicing the invention. Numerous variations, changes, and substitutions will now occur to those skilled in the art without departing from the invention.

[0102] Unless otherwise defined, all technical and scientific terms used herein have the same meaning as commonly understood by one of ordinary skill in the art to which this invention belongs. Although methods and materials similar or equivalent to those described herein can be used in the practice or testing of the present invention, suitable methods and materials are described below. In case of conflict, the patent specification, including definitions, will control. In addition, the materials, methods, and examples are illustrative only and not intended to be limiting. Numerous variations, changes, and substitutions will now occur to those skilled in the art without departing from the invention.

### Definitions

[0103] In the context of the present application, the following terms have the meanings ascribed to them unless specified otherwise:

[0104] As used in the specification and claims, the singular forms “a”, “an” and “the” include plural references unless the context clearly dictates otherwise. For example, the term “a cell” includes a plurality of cells, including mixtures thereof.

[0105] The terms “polypeptide”, “peptide”, and “protein” are used interchangeably herein to refer to polymers of amino acids of any length. The polymer may be linear or branched, it may comprise modified amino acids, and it may be interrupted by non-amino acids. The terms also encompass an amino acid polymer that has been modified, for example, by disulfide bond formation, glycosylation, lipidation, acetylation, phosphorylation, or any other manipulation, such as conjugation with a labeling component.

[0106] As used herein, the term “amino acid” refers to either natural and/or unnatural or synthetic amino acids, including but not limited to both the D or L optical isomers, and amino acid analogs and peptidomimetics. Standard single or three letter codes are used to designate amino acids.

[0107] The term “domain,” when used in reference to a factor VIII polypeptide refers to either a full length domain or a functional fragment thereof, for example, full length or functional fragments of the A1 domain, A2 domain, A3 domain, B domain, C1 domain, and/or C2 domain of factor VIII.

[0108] The term “natural L-amino acid” means the L optical isomer forms of glycine (G), proline (P), alanine (A), valine (V), leucine (L), isoleucine (I), methionine (M), cysteine (C), phenylalanine (F), tyrosine (Y), tryptophan (W), histidine (H), lysine (K), arginine (R), glutamine (Q), asparagine (N), glutamic acid (E), aspartic acid (D), serine (S), and threonine (T).

[0109] The term “non-naturally occurring,” as applied to sequences and as used herein, means polypeptide or polynucleotide sequences that do not have a counterpart to, are not complementary to, or do not have a high degree of homology with a wild-type or naturally-occurring sequence found in a mammal. For example, a non-naturally occurring polypeptide or fragment may share no more than 99%, 98%, 95%, 90%, 80%, 70%, 60%, 50% or even less amino acid sequence identity as compared to a natural sequence when suitably aligned.

[0110] The terms “hydrophilic” and “hydrophobic” refer to the degree of affinity that a substance has with water. A hydrophilic substance has a strong affinity for water, tending to dissolve in, mix with, or be wetted by water, while a hydrophobic substance substantially lacks affinity for water, tending to repel and not absorb water and tending not to dissolve in or mix with or be wetted by water. Amino acids can be characterized based on their hydrophobicity. A number of scales have been developed. An example is a scale developed by Levitt, M, et al., J Mol Biol (1976) 104:59, which is listed in Hopp, T P, et al., Proc Natl Acad Sci USA (1981) 78:3824. Examples of “hydrophilic amino acids” are arginine, lysine, threonine, alanine, asparagine, and glutamine. Of particular interest are the hydrophilic amino acids aspartate, glutamate, and serine, and glycine. Examples of “hydrophobic amino acids” are tryptophan, tyrosine, phenylalanine, methionine, leucine, isoleucine, and valine.

[0111] A “fragment” when applied to a protein, is a truncated form of a native biologically active protein that retains at least a portion of the therapeutic and/or biological activity. A “variant”, when applied to a protein is a protein with sequence homology to the native biologically active protein that retains at least a portion of the therapeutic and/or biological activity of the biologically active protein. For example, a variant protein may share at least 70%, 75%, 80%, 85%, 90%, 95%, 96%, 97%, 98% or 99% amino acid sequence identity compared with the reference biologically active protein. As used herein, the term “biologically active protein moiety” includes proteins modified deliberately, as for example, by site directed mutagenesis, synthesis of the encoding gene, insertions, or accidentally through mutations.

[0112] The term “sequence variant” means polypeptides that have been modified compared to their native or original sequence by one or more amino acid insertions, deletions, or substitutions. Insertions may be located at either or both termini of the protein, and/or may be positioned within internal regions of the amino acid sequence. A non-limiting example is insertion of an XTEN sequence within the sequence of the biologically-active payload protein. In deletion variants, one or more amino acid residues in a polypeptide as described herein are removed. Deletion variants, therefore, include all fragments of a payload polypeptide sequence. In substitution variants, one or more amino acid residues of a polypeptide are removed and replaced with alternative residues. In one aspect, the substitutions are conservative in nature and conservative substitutions of this type are well known in the art.

[0113] As used herein, “internal XTEN” refers to XTEN sequences that have been inserted into the sequence of the coagulation factor. Internal XTENs can be constructed by insertion of an XTEN sequence into the sequence of a coagulation factor such as FVIII, either by insertion between two adjacent amino acids within a domain (“intradomain”) or between two domains (“interdomain”) of the coagulation factor or wherein XTEN replaces a partial, internal sequence of the coagulation factor.

[0114] As used herein, “terminal XTEN” refers to XTEN sequences that have been fused to or in the N- or C-terminus of the coagulation factor or to a proteolytic cleavage sequence or linker at the N- or C-terminus of the coagulation factor. Terminal XTENs can be fused to the native termini of the coagulation factor. Alternatively, terminal XTENs can replace a portion of a terminal sequence of the coagulation factor.

[0115] The term “XTEN release site” refers to a cleavage sequence in CFXTEN fusion proteins that can be recognized and cleaved by a mammalian protease, effecting release of an XTEN or a portion of an XTEN from the CFXTEN fusion protein. As used herein, “mammalian protease” means a protease that normally exists in the body fluids, cells or tissues of a mammal. XTEN release sites can be engineered to be cleaved by various mammalian proteases (a.k.a. “XTEN release proteases”) such as FXIa, FXIIa, kallikrein, FVIIIa, FVIIIa, FXa, FIIa (thrombin), Elastase-2, MMP-12, MMP13, MMP-17, MMP-20, or any protease that is present during a clotting event. Other equivalent proteases (endogenous or exogenous) that are capable of recognizing a defined cleavage site can be utilized. The cleavage sites can be adjusted and tailored to the protease utilized.

[0116] The term “within”, when referring to a first polypeptide being linked to a second polypeptide, encompasses linking that connects the N-terminus of the first or second polypeptide to the C-terminus of the second or first polypeptide, respectively, as well as insertion of the first polypeptide into the sequence of the second polypeptide. For example, when an XTEN is linked “within” a domain of a factor VIII polypeptide, the XTEN may be linked to the N-terminus, the C-terminus, or may be inserted in said domain.

[0117] As used herein, the term “site,” when used to refer to an insertion site of an XTEN within or to a biological polypeptide such as a factor VIII, represents the amino acid position at which the XTEN is linked. When numbered sites are described, such as a first, second, third, fourth, fifth, or sixth site for the insertion of an XTEN within or to the factor VIII, each site will be understood to represent a distinct site in the factor VIII; e.g., the second site is a different factor VIII location from the first site, the third site is different from the second and the first, etc.

[0118] “Activity” or “procoagulant activity” as applied to form(s) of a CFXTEN polypeptide provided herein, refers to the ability to bind to a target coagulation protein substrate or cofactor and promote a clotting event, whether measured by an in vitro, ex vivo or in vivo assay. Such assays include, but are not limited to, one-stage clotting assays, two-stage clotting assays, chromogenic assays, and ELISA assays. “Biological activity” refers to an in vitro or in vivo biological function or effect, including but not limited to either receptor or ligand binding, or an effect on coagulation generally known in the art for the FVIII coagulation factor, or a cellular, physiologic, or clinical response, including arrest of a bleeding episode.

[0119] As used herein, the term “ELISA” refers to an enzyme-linked immunosorbent assay as described herein or as otherwise known in the art.

[0120] A “host cell” includes an individual cell or cell culture which can be or has been a recipient for the subject vectors. Host cells include progeny of a single host cell. The progeny may not necessarily be completely identical (in morphology or in genomic of total DNA complement) to the original parent cell due to natural, accidental, or deliberate mutation. A host cell includes cells transfected in vivo with a vector of this invention.

[0121] “Isolated” when used to describe the various polypeptides disclosed herein, means polypeptide that has been identified and separated and/or recovered from a component of its natural environment. Contaminant components of its natural environment are materials that would typically interfere with diagnostic or therapeutic uses for the polypeptide, and may include enzymes, hormones, and other proteinaceous or non-proteinaceous solutes. As is apparent to those of skill in the art, a non-naturally occurring polynucleotide, peptide, polypeptide, protein, antibody, or fragments thereof, does not require “isolation” to distinguish it from its naturally occurring counterpart. In addition, a “concentrated”, “separated” or “diluted” polynucleotide, peptide, polypeptide, protein, antibody, or fragments thereof, is distinguishable from its naturally occurring counterpart in that the concentration or number of molecules per volume is generally greater than that of its naturally occurring counterpart. In general, a polypeptide made by recombinant means and expressed in a host cell is considered to be “isolated.”

[0122] An “isolated” polynucleotide or polypeptide-encoding nucleic acid or other polypeptide-encoding nucleic acid is a nucleic acid molecule that is identified and separated from at least one contaminant nucleic acid molecule with which it is ordinarily associated in the natural source of the polypeptide-encoding nucleic acid. An isolated polypeptide-encoding nucleic acid molecule is other than in the form or setting in which it is found in nature. Isolated polypeptide-encoding nucleic acid molecules therefore are distinguished from the specific polypeptide-encoding nucleic acid molecule as it exists in natural cells. However, an isolated polypeptide-encoding nucleic acid molecule includes polypeptide-encoding nucleic acid molecules contained in cells that ordinarily express the polypeptide where, for example, the nucleic acid molecule is in a chromosomal or extra-chromosomal location different from that of natural cells.

[0123] A “chimeric” protein contains at least one fusion polypeptide comprising at least one region in a different position in the sequence than that which occurs in nature. The regions may normally exist in separate proteins and are brought together in the fusion polypeptide; or they may normally exist in the same protein but are placed in a new arrangement in the fusion polypeptide. A chimeric protein may be created, for example, by chemical synthesis, or by creating and translating a polynucleotide in which the peptide regions are encoded in the desired relationship.

[0124] “Conjugated”, “linked,” “fused,” and “fusion” are used interchangeably herein. These terms refer to the joining together of two or more chemical elements, sequences or components, by whatever means including chemical conjugation or recombinant means. For example, a promoter or enhancer is operably linked to a coding sequence if it affects the transcription of the sequence. Generally, “operably linked” means that the DNA sequences being linked are contiguous, and in reading phase or in-frame. An “in-frame fusion” refers to the joining of two or more open reading frames (ORFs) to form a continuous longer ORF, in a manner that maintains the correct reading frame of the original ORFs. Thus, the resulting recombinant fusion protein is a single protein containing two or more segments that correspond to polypeptides encoded by the original ORFs (which segments are not normally so joined in nature).

[0125] In the context of polypeptides, a “linear sequence” or a “sequence” is an order of amino acids in a polypeptide in an amino to carboxyl terminus direction in which residues that neighbor each other in the sequence are contiguous in the primary structure of the polypeptide. A “partial sequence” is a linear sequence of part of a polypeptide that is known to comprise additional residues in one or both directions.

[0126] “Heterologous” means derived from a genotypically distinct entity from the rest of the entity to which it is being compared. For example, a glycine rich sequence removed from its native coding sequence and operatively linked to a coding sequence other than the native sequence is a heterologous glycine rich sequence. The term “heterologous” as applied to a polynucleotide, a polypeptide, means that the polynucleotide or polypeptide is derived from a genotypically distinct entity from that of the rest of the entity to which it is being compared.

[0127] The terms “polynucleotides”, “nucleic acids”, “nucleotides” and “oligonucleotides” are used interchangeably. They refer to a polymeric form of nucleotides of any length, either deoxyribonucleotides or ribonucleotides, or analogs thereof. Polynucleotides may have any three-dimensional structure, and may perform any function, known or unknown. The following are non-limiting examples of polynucleotides: coding or non-coding regions of a gene or gene fragment, loci (locus) defined from linkage analysis, exons, introns, messenger RNA (mRNA), transfer RNA, ribosomal RNA, ribozymes, cDNA, recombinant polynucleotides, branched polynucleotides, plasmids, vectors, isolated DNA of any sequence, isolated RNA of any sequence, nucleic acid probes, and primers. A polynucleotide may comprise modified nucleotides, such as methylated nucleotides and nucleotide analogs. If present, modifications to the nucleotide structure may be imparted before or after assembly of the polymer. The sequence of nucleotides may be interrupted by non-nucleotide components. A polynucleotide may be further modified after polymerization, such as by conjugation with a labeling component.

[0128] The term “complement of a polynucleotide” denotes a polynucleotide molecule having a complementary base sequence and reverse orientation as compared to a reference sequence, such that it could hybridize with a reference sequence with complete fidelity.

[0129] “Recombinant” as applied to a polynucleotide means that the polynucleotide is the product of various combinations of in vitro cloning, restriction and/or ligation steps, and other procedures that result in a construct that can potentially be expressed as a recombinant protein in a host cell.

[0130] The terms “gene” and “gene fragment” are used interchangeably herein. They refer to a polynucleotide containing at least one open reading frame that is capable of encoding a particular protein after being transcribed and translated. A gene or gene fragment may be genomic or cDNA, as long as the polynucleotide contains at least one open reading frame, which may cover the entire coding region or a segment thereof. A “fusion gene” is a gene composed of at least two heterologous polynucleotides that are linked together.

[0131] “Homology” or “homologous” or “sequence identity” refers to sequence similarity or interchangeability between two or more polynucleotide sequences or between two or more polypeptide sequences. When using a program such as BestFit to determine sequence identity, similarity or homology between two different amino acid sequences, the default settings may be used, or an appropriate scoring matrix, such as blosum45 or blosum80, may be selected to optimize identity, similarity or homology scores. Preferably, polynucleotides that are homologous are those which hybridize under stringent conditions as defined herein and have at least 70%, preferably at least 80%, more preferably at least 90%, more preferably 95%, more preferably 97%, more preferably 98%, and even more preferably 99% sequence identity compared to those sequences. Polypeptides that are homologous preferably have sequence identities that are at least 70%, preferably at least 80%, even more preferably at least 90%, even more preferably at least 95-99%, and most preferably 100% identical.

[0132] “Ligation” refers to the process of forming phosphodiester bonds between two nucleic acid fragments or genes, linking them together. To ligate the DNA fragments or genes together, the ends of the DNA must be compatible with each other. In some cases, the ends will be directly compatible after endonuclease digestion. However, it may be necessary to first convert the staggered ends commonly produced after endonuclease digestion to blunt ends to make them compatible for ligation.

[0133] The terms “stringent conditions” or “stringent hybridization conditions” includes reference to conditions under which a polynucleotide will hybridize to its target sequence, to a detectably greater degree than other sequences (e.g., at least 2-fold over background). Generally, stringency of hybridization is expressed, in part, with reference to the temperature and salt concentration under which the wash step is carried out. Typically, stringent conditions will be those in which the salt concentration is less than about 1.5 M Na ion, typically about 0.01 to 1.0 M Na ion concentration (or other salts) at pH 7.0 to 8.3 and the temperature is at least about 30° C. for short polynucleotides (e.g., 10 to 50 nucleotides) and at least about 60° C. for long polynucleotides (e.g., greater than 50 nucleotides)—for example, “stringent conditions” can include hybridization in 50% formamide, 1 M NaCl, 1% SDS at 37° C., and three washes for 15 min each in 0.1×SSC/1% SDS at 60° C. to 65° C. Alternatively, temperatures of about 65° C., 60° C., 55° C., or 42° C. may be used. SSC concentration may be varied from about 0.1 to 2×SSC, with SDS being present at about 0.1%. Such wash temperatures are typically selected to be about 5° C. to 20° C. lower than the thermal melting point for the specific sequence at a defined ionic strength and pH. The Tm is the temperature (under defined ionic strength and pH) at which 50% of the target sequence hybridizes to a perfectly matched probe. An equation for calculating Tm and conditions for nucleic acid hybridization are well known and can be found in Sambrook, J. et al., “Molecular Cloning: A Laboratory Manual,” 3^{r}d edition, Cold Spring Harbor Laboratory Press, 2001. Typically, blocking reagents are used to block non-specific hybridization. Such blocking reagents include, for instance, sheared and denatured salmon sperm DNA at about 100-200 μg/ml. Organic solvent, such as formamide at a concentration of about 35-50% v/v, may also be used under particular circumstances, such as for RNA:DNA hybridizations. Useful variations on these wash conditions will be readily apparent to those of ordinary skill in the art.

[0134] The terms “percent identity,” percentage of sequence identity,” and “% identity,” as applied to polynucleotide sequences, refer to the percentage of residue matches between at least two polynucleotide sequences aligned using a standardized algorithm. Such an algorithm may insert, in a standardized and reproducible way, gaps in the sequences being compared in order to optimize alignment between two sequences, and therefore achieve a more meaningful comparison of the two sequences. Percent identity may be measured over the length of an entire defined polynucleotide sequence, or may be measured over a shorter length, for example, over the length of a fragment taken from a larger, defined polynucleotide sequence, for instance, a fragment of at least 45, at least 60, at least 90, at least 120, at least 150, at least 210 or at least 450 contiguous residues. Such lengths are exemplary only, and it is understood that any fragment length supported by the sequences shown herein, in the tables, figures or Sequence Listing, may be used to describe a length over which percentage identity may be measured. The percentage of sequence identity is calculated by comparing two optimally aligned sequences over the window of comparison, determining the number of matched positions (at which identical residues occur in both polypeptide sequences), dividing the number of matched positions by the total number of positions in the window of comparison (i.e., the window size), and multiplying the result by 100 to yield the percentage of sequence identity. When sequences of different length are to be compared, the shortest sequence defines the length of the window of comparison. Conservative substitutions are not considered when calculating sequence identity.

[0135] “Percent (%) sequence identity,” with respect to the polypeptide sequences identified herein, is defined as the percentage of amino acid residues in a query sequence that are identical with the amino acid residues of a second, reference polypeptide sequence or a portion thereof, after aligning the sequences and introducing gaps, if necessary, to achieve the maximum percent sequence identity, and not considering any conservative substitutions as part of the sequence identity. Alignment for purposes of determining percent amino acid sequence identity can be achieved in various ways that are within the skill in the art, for instance, using publicly available computer software such as BLAST, BLAST-2, ALIGN or Megalign (DNASTAR) software. Those skilled in the art can determine appropriate parameters for measuring alignment, including any algorithms needed to achieve maximal alignment over the full length of the sequences being compared. Percent identity may be measured over the length of an entire defined polypeptide sequence, or may be measured over a shorter length, for example, over the length of a fragment taken from a larger, defined polypeptide sequence, for instance, a fragment of at least 15, at least 20, at least 30, at least 40, at least 50, at least 70 or at least 150 contiguous residues. Such lengths are exemplary only, and it is understood that any fragment length supported by the sequences shown herein, in the tables, figures or Sequence Listing, may be used to describe a length over which percentage identity may be measured.

[0136] The term “non-repetitiveness” as used herein in the context of a polypeptide refers to a lack or limited degree of internal homology in a peptide or polypeptide sequence. The term “substantially non-repetitive” can mean, for example, that there are few or no instances of four contiguous amino acids in the sequence that are identical amino acid types or that the polypeptide has a subsequence score (defined infra) of 10 or less or that there is no a pattern in the order, from N- to C-terminus, of the sequence motifs that constitute the polypeptide sequence. The term “repetitiveness” as used herein in the context of a polypeptide refers to the degree of internal homology in a peptide or polypeptide sequence. In contrast, a “repetitive” sequence may contain multiple identical copies of short amino acid sequences. For instance, a polypeptide sequence of interest may be divided into n-mer sequences and the number of identical sequences can be counted. Highly repetitive sequences contain a large fraction of identical sequences while non-repetitive sequences contain few identical sequences. In the context of a polypeptide, a sequence can contain multiple copies of shorter sequences of defined or variable length, or motifs, in which the motifs themselves have non-repetitive sequences, rendering the full-length polypeptide substantially non-repetitive. The length of polypeptide within which the non-repetitiveness is measured can vary from 3 amino acids to about 200 amino acids, about from 6 to about 50 amino acids, or from about 9 to about 14 amino acids. “Repetitiveness” used in the context of polynucleotide sequences refers to the degree of internal homology in the sequence such as, for example, the frequency of identical nucleotide sequences of a given length. Repetitiveness can, for example, be measured by analyzing the frequency of identical sequences.

[0137] A “vector” is a nucleic acid molecule, preferably self-replicating in an appropriate host, which transfers an inserted nucleic acid molecule into and/or between host cells. The term includes vectors that function primarily for insertion of DNA or RNA into a cell, replication of vectors that function primarily for the replication of DNA or RNA, and expression vectors that function for transcription and/or translation of the DNA or RNA. Also included are vectors that provide more than one of the above functions. An “expression vector” is a polynucleotide which, when introduced into an appropriate host cell, can be transcribed and translated into a polypeptide(s). An “expression system” usually connotes a suitable host cell comprised of an expression vector that can function to yield a desired expression product.

[0138] “Serum degradation resistance,” as applied to a polypeptide, refers to the ability of the polypeptides to withstand degradation in blood or components thereof, which typically involves proteases in the serum or plasma. The serum degradation resistance can be measured by combining the protein with human (or mouse, rat, monkey, as appropriate) serum or plasma, typically for a range of days (e.g. 0.25, 0.5, 1, 2, 4, 8, 16 days), typically at about 37° C. The samples for these time points can be run on a Western blot assay and the protein is detected with an antibody. The antibody can be to a tag in the protein. If the protein shows a single band on the western, where the protein's size is identical to that of the injected protein, then no degradation has occurred. In this exemplary method, the time point where 50% of the protein is degraded, as judged by Western blots or equivalent techniques, is the serum degradation half-life or “serum half-life” of the protein.

[0139] The term “t_{1/2}” as used herein means the terminal half-life calculated as ln(2)/Kₑₗ. Kₑₗ is the terminal elimination rate constant calculated by linear regression of the terminal linear portion of the log concentration vs. time curve. Half-life typically refers to the time required for half the quantity of an administered substance deposited in a living organism to be metabolized or eliminated by normal biological processes. The terms “t_{1/2}”, “terminal half-life”, “elimination half-life” and “circulating half-life” are used interchangeably herein.

[0140] “Active clearance” means the mechanisms by which a protein is removed from the circulation other than by filtration or coagulation, and which includes removal from the circulation mediated by cells, receptors, metabolism, or degradation of the protein.

[0141] “Apparent molecular weight factor” and “apparent molecular weight” are related terms referring to a measure of the relative increase or decrease in apparent molecular weight exhibited by a particular amino acid sequence. The apparent molecular weight is determined using size exclusion chromatography (SEC) or similar methods by comparing to globular protein standards, and is measured in “apparent kD” units. The apparent molecular weight factor is the ratio between the apparent molecular weight and the actual molecular weight; the latter predicted by adding, based on amino acid composition, the calculated molecular weight of each type of amino acid in the composition or by estimation from comparison to molecular weight standards in an SDS electrophoresis gel.

[0142] The terms “hydrodynamic radius” or “Stokes radius” is the effective radius (Rh in nm) of a molecule in a solution measured by assuming that it is a body moving through the solution and resisted by the solution's viscosity. In the embodiments of the invention, the hydrodynamic radius measurements of the XTEN fusion proteins correlate with the ‘apparent molecular weight factor’, which is a more intuitive measure. The “hydrodynamic radius” of a protein affects its rate of diffusion in aqueous solution as well as its ability to migrate in gels of macromolecules. The hydrodynamic radius of a protein is determined by its molecular weight as well as by its structure, including shape and compactness. Methods for determining the hydrodynamic radius are well known in the art, such as by the use of size exclusion chromatography (SEC), as described in U.S. Pat. Nos. 6,406,632 and 7,294,513. Most proteins have globular structure, which is the most compact three-dimensional structure a protein can have with the smallest hydrodynamic radius. Some proteins adopt a random and open, unstructured, or ‘linear’ conformation and as a result have a much larger hydrodynamic radius compared to typical globular proteins of similar molecular weight.

[0143] “Physiological conditions” refers to a set of conditions in a living host as well as in vitro conditions, including temperature, salt concentration, pH, that mimic those conditions of a living subject. A host of physiologically relevant conditions for use in in vitro assays have been established. Generally, a physiological buffer contains a physiological concentration of salt and is adjusted to a neutral pH ranging from about 6.5 to about 7.8, and preferably from about 7.0 to about 7.5. A variety of physiological buffers are listed in Sambrook et al. (2001). Physiologically relevant temperature ranges from about 25° C. to about 38° C., and preferably from about 35° C. to about 37° C.

[0144] A “reactive group” is a chemical structure that can be coupled to a second reactive group. Examples for reactive groups are amino groups, carboxyl groups, sulfhydryl groups, hydroxyl groups, aldehyde groups, azide groups. Some reactive groups can be activated to facilitate coupling with a second reactive group. Non-limiting examples for activation are the reaction of a carboxyl group with carbodiimide, the conversion of a carboxyl group into an activated ester, or the conversion of a carboxyl group into an azide function.

[0145] “Controlled release agent”, “slow release agent”, “depot formulation” and “sustained release agent” are used interchangeably to refer to an agent capable of extending the duration of release of a polypeptide of the invention relative to the duration of release when the polypeptide is administered in the absence of agent. Different embodiments of the present invention may have different release rates, resulting in different therapeutic amounts.

[0146] The terms “antigen”, “target antigen” and “immunogen” are used interchangeably herein to refer to the structure or binding determinant that an antibody fragment or an antibody fragment-based therapeutic binds to or has specificity against.

[0147] The term “payload” as used herein refers to a protein or peptide sequence that has biological or therapeutic activity; the counterpart to the pharmacophore of small molecules. Examples of payloads include, but are not limited to, coagulation factors, cytokines, enzymes, hormones, and blood and growth factors.

[0148] The term “antagonist”, as used herein, includes any molecule that partially or fully blocks, inhibits, or neutralizes a biological activity of a native polypeptide disclosed herein. Methods for identifying antagonists of a polypeptide may comprise contacting a native polypeptide with a candidate antagonist molecule and measuring a detectable change in one or more biological activities normally associated with the native polypeptide. In the context of the present invention, antagonists may include proteins, nucleic acids, carbohydrates, antibodies or any other molecules that decrease the effect of a biologically active protein.

[0149] The term “agonist” is used in the broadest sense and includes any molecule that mimics a biological activity of a native polypeptide disclosed herein. Suitable agonist molecules specifically include agonist antibodies or antibody fragments, fragments or amino acid sequence variants of native polypeptides, peptides, small organic molecules, etc. Methods for identifying agonists of a native polypeptide may comprise contacting a native polypeptide with a candidate agonist molecule and measuring a detectable change in one or more biological activities normally associated with the native polypeptide.

[0150] As used herein, “treat” or “treating,” or “palliating” or “ameliorating” are used interchangeably and mean administering a drug or a biologic to achieve a therapeutic benefit, to cure or reduce the severity of an existing condition, or to achieve a prophylactic benefit, prevent or reduce the likelihood of onset or severity the occurrence of a condition. By therapeutic benefit is meant eradication or amelioration of the underlying condition being treated or one or more of the physiological symptoms associated with the underlying condition such that an improvement is observed in the subject, notwithstanding that the subject may still be afflicted with the underlying condition.

[0151] A “therapeutic effect” or “therapeutic benefit,” as used herein, refers to a physiologic effect, including but not limited to the mitigation, amelioration, or prevention of disease in humans or other animals, or to otherwise enhance physical or mental wellbeing of humans or animals, resulting from administration of a fusion protein of the invention other than the ability to induce the production of an antibody against an antigenic epitope possessed by the biologically active protein. For prophylactic benefit, the compositions may be administered to a subject at risk of developing a particular disease, condition or symptom of the disease (e.g., a bleed in a diagnosed hemophilia A subject), or to a subject reporting one or more of the physiological symptoms of a disease, even though a diagnosis of this disease may not have been made.

[0152] The terms “therapeutically effective amount” and “therapeutically effective dose”, as used herein, refer to an amount of a drug or a biologically active protein, either alone or as a part of a fusion protein composition, that is capable of having any detectable, beneficial effect on any symptom, aspect, measured parameter or characteristics of a disease state or condition when administered in one or repeated doses to a subject. Such effect need not be absolute to be beneficial. Determination of a therapeutically effective amount is well within the capability of those skilled in the art, especially in light of the detailed disclosure provided herein.

[0153] The term “therapeutically effective dose regimen”, as used herein, refers to a schedule for consecutively administered multiple doses (i.e., at least two or more) of a biologically active protein, either alone or as a part of a fusion protein composition, wherein the doses are given in therapeutically effective amounts to result in sustained beneficial effect on any symptom, aspect, measured parameter or characteristics of a disease state or condition.

### I). General Techniques

[0154] The practice of the present invention employs, unless otherwise indicated, conventional techniques of immunology, biochemistry, chemistry, molecular biology, microbiology, cell biology, genomics and recombinant DNA, which are within the skill of the art. See Sambrook, J. et al., “Molecular Cloning: A Laboratory Manual,” 3^{rd} edition, Cold Spring Harbor Laboratory Press, 2001; “Current protocols in molecular biology”, F. M. Ausubel, et al. eds., 1987; the series “Methods in Enzymology,” Academic Press, San Diego, CA.; “PCR 2: a practical approach”, M. J. MacPherson, B. D. Hames and G. R. Taylor eds., Oxford University Press, 1995; “Antibodies, a laboratory manual” Harlow, E. and Lane, D. eds., Cold Spring Harbor Laboratory, 1988; “Goodman & Gilman's The Pharmacological Basis of Therapeutics,” 11^{th} Edition, McGraw-Hill, 2005; and Freshney, R. I., “Culture of Animal Cells: A Manual of Basic Technique,” 4^{th} edition, John Wiley & Sons, Somerset, NJ, 2000, the contents of which are incorporated in their entirety herein by reference.

### II). Coagulation Factor VIII

[0155] The present invention relates, in part, to compositions comprising factor VIII coagulation factor (CF) linked to one or more extended recombinant proteins (XTEN), resulting in a CFXTEN fusion protein composition. As used herein, “CF” refers to factor VIII (FVIII) or mimetics, sequence variants and truncated versions of FVIII, as described below.

[0156] “Factor VIII” or “FVIII” or “FVIII protein” means a blood coagulation factor protein and species (including human, porcine, canine, rat or murine FVIII proteins) and sequence variants thereof that includes, but is not limited to the 2351 amino acid single-chain precursor protein (with a 19-amino acid hydrophobic signal peptide), the mature 2332 amino acid factor VIII cofactor protein of approximately 270-330 kDa with the domain structure A1-A2-B-A3-C1-C2, as well as the nonenzymatic “active” or cofactor form of FVIII (FVIIIa) that is a circulating heterodimer of two chains that form as a result of proteolytic cleavage after R1648 of a heavy chain form composed of A1-A2-B (in the range of 90-220 kD) of amino acids 1-1648 (numbered relative to the mature FVIII form) and a light chain A3-C1-C2 of 80 kDa of amino acids 1649-2232, each of which is depicted schematically in FIG. 1. Further, and as used herein, each of A1, A2 and the A3 domain encompasses acidic spacer regions; a1, a2, and a3 acidic regions, respectively. Thus, it will be understood that CFXTEN constructs described as having A1, A2, A3, B, C1 and C2 domains include the a1, a2 and a3 acidic regions. As used herein, “Factor VIII” or “FVIII” or “FVIII polypeptide” also includes variant forms, including proteins with substitutions, additions and/or deletions so long as the variant retains a desired biological activity such as procoagulant activity. Myriad functional FVIII variants have been constructed and can be used as recombinant FVIII proteins as described herein. See PCT Publication Nos. WO 2011/069164 A2, WO 2012/006623 A2, WO 2012/006635 A2, or WO 2012/006633 A2, all of which are incorporated herein by reference in their entireties. A great many functional FVIII variants are known. In addition, hundreds of nonfunctional mutations in FVIII have been identified in hemophilia patients. See, e.g., Cutler et al., Hum. Mutat. 19:274-8 (2002), incorporated herein by reference in its entirety. In addition, comparisons between FVIII from humans and other species have identified conserved residues that are likely to be required for function. See, e.g., Cameron et al., Thromb. Haemost. 79:317-22 (1998) and U.S. Pat. No. 6,251,632, incorporated herein by reference in their entireties.

[0157] In one embodiment, the human factor VIII domains are defined by the following amino acid residues: A1, residues Ala1-Arg372; A2, residues Ser373-Arg740; B, residues Ser741-Arg1648; A3, residues Ser1649-Asn2019; C1, residues Lys2020-Asn2172; C2, residues Ser2173-Tyr2332. The A3-C1-C2 sequence includes residues Ser1649-Tyr2332. In another embodiment, residues Arg336-Arg372 is usually referred to as the a1 region, and the Arg372 is cleaved by thrombin. In certain embodiments, the a2 region is part of the A1 domain. In another embodiment, residues Glu1649-Arg1689, is referred to as the a3 acidic region. In certain embodiments, the a3 acidic region is a part of the A3 domain. In another embodiment, a native FVIII protein has the following formula: A1-a1-A2-a2-B-a3-A3-C1-C2, where A1, A2, and A3 are the structurally-related “A domains,” B is the “B domain,” C1 and C2 are the structurally-related “C domains,” and a1, a2 and a3 are acidic spacer regions. In the foregoing formula and referring to the primary amino acid sequence position in FIG. 30, the A1 domain of human FVIII extends from Ala1 to about Arg336, the a1 spacer region extends from about Met337 to about Arg372, the A2 domain extends from about Ser373 to about Tyr719, the a2 spacer region extends from about Glu720 to about Arg740, the B domain extends from about Ser741 to about Arg 1648, the a3 spacer region extends from about Glu1649 to about Arg1689, the A3 domain extends from about Ser1690 to about Asn2019, the C1 domain extends from about Lys2020 to about Asn2172, and the C2 domain extends from about Ser2173 to Tyr2332 (Saenko et al., 2005, J Thromb Hemostasis, 1, 922-930). Other than specific proteolytic cleavage sites, designation of the locations of the boundaries between the domains and regions of FVIII can vary in different literature references. The boundaries noted herein are therefore designated as approximate by use of the term “about.”

[0158] Such factor VIII include truncated sequences such as B-domain deleted “BDD” sequences in which a portion or the majority of the B domain sequence is deleted (such as BDD sequences disclosed or referenced in U.S. Pat. Nos. 6,818,439 and 7,632,921). An example of a BDD FVIII is REFACTO® or XYNTHA® (recombinant BDD FVIII), which comprises a first polypeptide corresponding to amino acids 1 to 743 of FIG. 30, fused to a second polypeptide corresponding to amino acids 1638 to 2332 of FIG. 30. Exemplary BDD FVIII constructs which can be used to produce recombinant proteins of the invention include, but are not limited to FVIII with a deletion of amino acids corresponding to amino acids 747-1638 of mature human FVIII (FIG. 30) (Hoeben R. C., et al. J. Biol. Chem. 265 (13): 7318-7323 (1990), incorporated herein by reference in its entirety), and FVIII with a deletion of amino acids corresponding to amino acids 771-1666 or amino acids 868-1562 of mature human FVIII (FIG. 30) (Meulien P., et al. Protein Eng. 2(4): 301-6 (1988), incorporated herein by reference in its entirety).

[0159] In addition, sequences that include heterologous amino acid insertions or substitutions (such as aspartic acid substituted for valine at position 75), or single chain FVIII (scFVIII) in which the heavy and light chains are covalently connected by a linker. As used herein, “FVIII” shall be any functional form of factor VIII molecule with the typical characteristics of blood coagulation factor VIII capable of correcting human factor VIII deficiencies when administered to such a subject, e.g., a subject with hemophilia A. FVIII or sequence variants have been isolated, characterized, and cloned, as described in U.S. Pat. Nos. 4,757,006; 4,965,199; 5,004,804; 5,198,349, 5,250,421; 5,919,766; 6,228,620; 6,818,439; 7,138,505; 7,632,921; and 20100081615.

[0160] Human factor VIII is encoded by a single-copy gene residing at the tip of the long arm of the X chromosome (q28). It comprises nearly 186,000 base pairs (bp) and constitutes approximately 0.1% of the X-chromosome (White, G. C. and Shoemaker, C. B., Blood (1989) 73:1-12). The human FVIII amino acid sequence was deduced from cDNA as shown in U.S. Pat. No. 4,965,199, which is incorporated herein by reference in its entirety. Native mature human FVIII derived from the cDNA sequence (i.e., without the secretory signal peptide but prior to other post-translational processing) is presented as FIG. 3.

[0161] The DNA encoding the mature factor VIII mRNA is found in 26 separate exons ranging in size from 69 to 3,106 bp. The 25 intervening intron regions that separate the exons range in size from 207 to 32,400 bp. The complete gene consists of approximately 9 kb of exon and 177 kb of intron. The three repeat A domains have approximately 30% sequence homology. The B domain contains 19 of the approximately 25 predicted glycosylation sites, and the A3 domain is believed to contain a binding site for the von Willebrand factor. The tandem C domains follow the A3 domain and have approximately 37% homology to each other (White, G. C. and Shoemaker, C. B., Blood (1989) 73:1-12).

[0162] The B domain separates the A2 and A3 domains of native factor FVIII in the newly synthesized precursor single-chain molecule. The precise boundaries of the B domain have been variously reported as extending from amino acids 712 to 1648 of the precursor sequence (Wood et al., Nature (1984) 312:330-337) or amino acids 741-1648 (Pipe, SW, Haemophilia (2009) 15:1187-1196 and U.S. Pat. No. 7,560,107) or amino acids 740-1689 (Toole, J J. Proc. Natl. Acad. Sci. USA (1986) 83:5939-5942). As used herein, “B domain” means amino acids 741-1648 of mature factor VIII. As used herein, “FVIII B domain deletion” or “FVIII BDD” means a FVIII sequence with any, a fragment of, or all of amino acids 741 to 1648 deleted. In one embodiment, FVIII BDD variants retain remnant amino acids of the B domain from the N-terminal end (“B1” as used herein) and C-terminal end (“B2” as used herein). In one FVIII BDD variant, the B domain remnant amino acids are SFSQNPPVLKRHQR (SEQ ID NO: 1614). In one FVIII BDD variant, the B1 remnant is SFS and the B2 remnant is QNPPVLKRHQR (SEQ ID NO: 1615). In another FVIII BDD variant, the B1 remnant is SFSQN (SEQ ID NO: 1616) and the B2 remnant is PPVLKRHQR (SEQ ID NO: 1617). A “B-domain-deleted factor VIII,” “FVIII BDD,” or “BDD FVIII” may have the full or partial deletions disclosed in U.S. Pat. Nos. 6,316,226, 6,346,513, 7,041,635, 5,789,203, 6,060,447, 5,595,886, 6,228,620, 5,972,885, 6,048,720, 5,543,502, 5,610,278, 5,171,844, 5,112,950, 4,868,112, and 6,458,563, each of which is incorporated herein by reference in its entirety. In some embodiments, a B-domain-deleted factor VIII sequence of the present invention comprises any one of the deletions disclosed at col. 4, line 4 to col. 5, line 28 and examples 1-5 of U.S. Pat. No. 6,316,226 (also in U.S. Pat. No. 6,346,513). In another embodiment, a B-domain deleted factor VIII is the S743/Q1638 B-domain deleted factor VIII (SQ version factor VIII) (e.g., factor VIII having a deletion from amino acid 744 to amino acid 1637, e.g., factor VIII having amino acids 1-743 and amino acids 1638-2332 of full-length factor VIII). In some embodiments, a B-domain-deleted factor VIII of the present invention has a deletion disclosed at col. 2, lines 26-51 and examples 5-8 of U.S. Pat. No. 5,789,203 (also U.S. Pat. Nos. 6,060,447, 5,595,886, and 6,228,620). In some embodiments, a B-domain-deleted factor VIII has a deletion described in col. 1, lines 25 to col. 2, line 40 of U.S. Pat. No. 5,972,885; col. 6, lines 1-22 and example 1 of U.S. Pat. No. 6,048,720; col. 2, lines 17-46 of U.S. Pat. No. 5,543,502; col. 4, line 22 to col. 5, line 36 of U.S. Pat. No. 5,171,844; col. 2, lines 55-68, FIG. 2, and example 1 of U.S. Pat. No. 5,112,950; col. 2, line 2 to col. 19, line 21 and table 2 of U.S. Pat. No. 4,868,112; col. 2, line 1 to col. 3, line 19, col. 3, line 40 to col. 4, line 67, col. 7, line 43 to col. 8, line 26, and col. 11, line 5 to col. 13, line 39 of U.S. Pat. No. 7,041,635; or col. 4, lines 25-53, of U.S. Pat. No. 6,458,563. In some embodiments, a B-domain-deleted factor VIII has a deletion of most of the B domain, but still contains amino-terminal sequences of the B domain that are essential for in vivo proteolytic processing of the primary translation product into two polypeptide chain, as disclosed in WO 91/09122, which is incorporated herein by reference in its entirety. In some embodiments, a B-domain-deleted factor VIII is constructed with a deletion of amino acids 747-1638, i.e., virtually a complete deletion of the B domain. Hoeben R. C., et al. J. Biol. Chem. 265 (13): 7318-7323 (1990), incorporated herein by reference in its entirety. A B-domain-deleted factor VIII may also contain a deletion of amino acids 771-1666 or amino acids 868-1562 of factor VIII. Meulien P., et al. Protein Eng. 2(4): 301-6 (1988), incorporated herein by reference in its entirety. Additional B domain deletions that are part of the invention include: deletion of amino acids 982 through 1562 or 760 through 1639 (Toole et al., Proc. Natl. Acad. Sci. U.S.A. (1986) 83, 5939-5942)), 797 through 1562 (Eaton, et al. Biochemistry (1986) 25:8343-8347)), 741 through 1646 (Kaufman (PCT published application No. WO 87/04187)), 747-1560 (Sarver, et al., DNA (1987) 6:553-564)), 741 though 1648 (Pasek (PCT application No. 88/00831)), or 816 through 1598 or 741 through 1648 (Lagner (Behring Inst. Mitt. (1988) No 82:16-25, EP 295597)), each of which is incorporated herein by reference in its entirety. Each of the foregoing deletions may be made in any factor VIII sequence utilized in the embodiments of the present invention.

[0163] Proteins involved in clotting include factor I, factor II, factor III, factor IV, factor V, factor VI, factor VII, factor VIII, factor IX, factor X, factor XI, factor XII, factor XIII, Protein C, and tissue factor (collectively or individually “clotting protein(s)”). The interaction of the major clotting proteins in the intrinsic and extrinsic clotting pathways is showed in FIG. 2. The majority of the clotting proteins are present in zymogen form, but when activated, exhibit a procoagulant protease activity in which they activate another of the clotting proteins, contributing to the intrinsic or extrinsic coagulation pathway and clot formation. In the intrinsic pathway of the coagulation cascade, FVIII associates with a complex of activated factor IX, factor X, calcium, and phospholipid. The factor VIII heterodimer has no enzymatic activity, but the heterodimer becomes active as a cofactor of the enzyme factor IXa after proteolytic activation by thrombin or factor Xa, with the activity of factor VIIIa characterized by its ability to form a membrane binding site for factors IXa and X in a conformation suitable for activation of the factor X by factor IXa. Upon cleavage by thrombin, activated FVIII (FVIIIa) dissociates from von Willebrand factor and binds to negatively charged phospholipid PL, and the resulting complex participates as a cofactor to factor IXa in the factor X activating (tenase) complex. Within the C2 domain and amino acid residues 1649 through 1689 in the A3 domain are von Willebrand factor (vWF) binding sites that act to complex with von Willebrand factor, the resulting circulating complex protects FVIII from rapid degradation in the blood (Weiss H J, et al. Stabilization of factor VIII in plasma by the von Willebrand factor. Studies on posttransfusion and dissociated factor VIII and in patients with von Willebrand's disease. J Clin Invest (1977) 60:390).

[0164] Activated factor VIII is a heterotrimer comprised of the A1 domain and the A2 domain and the light chain including domains A3-C1-C2. The activation of factor IX is achieved by a two-step removal of the activation peptide (Ala 146-Arg 180) from the molecule (Bajaj et al., Human factor IX and factor IXa, in METHODS IN ENZYMOLOGY. 1993). The first cleavage is made at the Arg 145-Ala 146 site by either factor XIa or factor VIIa/tissue factor. The second, and rate limiting cleavage is made at Arg 180-Val 181. The activation removes 35 residues. Activated human factor IX exists as a heterodimer of the C-terminal heavy chain (28 kDa) and an N-terminal light chain (18 kDa), which are held together by one disulfide bridge attaching the enzyme to the Gla domain. Factor IXa in turn activates factor X in concert with activated factor VIII. Alternatively, factors IX and X can both be activated by factor VIIa complexed with lipidated tissue factor, generated via the extrinsic pathway. Factor Xa then participates in the final common pathway whereby prothrombin is converted to thrombin, and thrombin, in turn converts fibrinogen to fibrin to form the clot.

[0165] Defects in the coagulation process can lead to bleeding disorders (coagulopathies) in which the time taken for clot formation is prolonged. Such defects can be congenital or acquired. For example, hemophilia A and B are inherited diseases characterized by deficiencies in FVIII and FIX, respectively. Stated differently, biologically active factor VIII corrects the coagulation defect in plasma derived from individuals afflicted with hemophilia A. Recombinant FVIII has been shown to be effective and has been approved for the treatment of hemophilia A in adult and pediatric patients, and also is used to stop bleeding episodes or prevent bleeding associated with trauma and/or surgery. Current therapeutic uses of factor VIII can be problematic in the treatment of individuals exhibiting a deficiency in factor VIII, as well as those individuals with Von Willebrand's disease. In addition, individuals receiving factor VIII in replacement therapy frequently develop antibodies to these proteins that often reduce or eliminate the procoagulant activity of the bound FVIII. Continuing treatment is exceedingly difficult because of the presence of these antibodies that reduce or negate the efficacy of the treatment.

[0166] In one aspect, the invention contemplates inclusion of FVIII sequences in the CFXTEN fusion protein compositions that are identical to human FVIII, sequences that have homology to FVIII sequences, sequences that are natural, such as from humans, non-human primates, mammals (including domestic animals), or truncated version of FVIII; all of which retain at least a portion of the procoagulant activity of native FVIII and that are useful for preventing, treating, mediating, or ameliorating hemophilia A or bleeding episodes related to trauma, surgery, or deficiency of coagulation factor VIII. Sequences with homology to FVIII may be found by standard homology searching techniques, such as NCBI BLAST, or in public databases such as Chemical Abstracts Services Databases (e.g., the CAS Registry), GenBank, The Universal Protein Resource (UniProt) and subscription provided databases such as GenSeq (e.g., Derwent).

[0167] In one embodiment, the FVIII incorporated into the subject CFXTEN compositions is a recombinant polypeptide with a sequence corresponding to a FVIII protein found in nature. In another embodiment, the FVIII is a non-natural FVIII sequence variant, fragment, homolog, or a mimetic of a natural sequence that retains at least a portion of the procoagulant activity of the corresponding native FVIII. In another embodiment, the FVIII is a truncated variant with all or a portion of the B domain deleted (“FVIII BDD”), which can be in either heterodimeric form or can remain as a single chain (“scFVIII”), the latter described in Meulien et al., Protein Eng. (1988) 2(4):301-306. Non-limiting examples of FVIII BDD are factor VIII sequences in which the amino acids are deleted between residue number 741 and residue number 1640 (numbered relative to native, mature FVIII), or between residue number 745 and residue number 1640, or between residue number 745 and residue number 1640, or between residue number 741 and residue number 1690, or between residue number 745 and residue number 1667, or between residue number 745 and residue number 1657, or between residue number 747 and residue number 1642, or between residue number 751 and residue number 1667.

[0168] In another embodiment, heterologous sequences are incorporated into the FVIII, which may include XTEN, as described more fully below. Table 1 provides a non-limiting list of amino acid sequences of FVIII that are encompassed by the CFXTEN fusion proteins of the invention. In some embodiments, FVIII incorporated into CFXTEN fusion proteins include proteins that have at least about 70% sequence identity, or alternatively 80%, 81%, 82%, 83%, 84%, 85%, 86%, 87%, 88%, 89%, 90%, 91%, 92%, 93%, 94%, 95%, 96%, 97%, 98%, 99%, or 100% sequence identity compared to an amino acid sequence of comparable length selected from Table 1.

TABLE 1
FVIII amino acid sequences

| | | SEQ |
|---|---|---|
| Name | | ID |
| (source) | Amino Acid Sequence | NO: |
| FVIII | MQIELSTCFFLCLLRFCFSATRRYYLGAVELSWDYMQSDLGELPVDARFPPRVPK | 1 |
| precursor | SFPFNTSVVYKKTLFVEFTDHLFNIAKPRPPWMGLLGPTIQAEVYDTVVITLKNM | |
| polypeptide | ASHPVSLHAVGVSYWKASEGAEYDDQTSQREKEDDKVFPGGSHTYVWQVLKEN | |
| (human) | GPMASDPLCLTYSYLSHVDLVKDLNSGLIGALLVCREGSLAKEKTQTLHKFILLF | |
| | AVFDEGKSWHSETKNSLMQDRDAASARAWPKMHTVNGYVNRSLPGLIGCHRKS | |
| | VYWHVIGMGTTPEVHSIFLEGHTFLVRNHRQASLEISPITFLTAQTLLMDLGQFLL | |
| | FCHISSHQHDGMEAYVKVDSCPEEPQLRMKNNEEAEDYDDDLTDSEMDVVRFD | |
| | DDNSPSFIQIRSVAKKHPKTWVHYIAAEEEDWDYAPLVLAPDDRSYKSQYLNNG | |
| | PQRIGRKYKKVRFMAYTDETFKTREAIQHESGILGPLLYGEVGDTLLIIFKNQASR | |
| | PYNIYPHGITDVRPLYSRRLPKGVKHLKDFPILPGEIFKYKWTVTVEDGPTKSDPR | |
| | CLTRYYSSFVNMERDLASGLIGPLLICYKESVDQRGNQIMSDKRNVILFSVFDENR | |
| | SWYLTENIQRFLPNPAGVQLEDPEFQASNIMHSINGYVFDSLQLSVCLHEVAYWY | |
| | ILSIGAQTDFLSVFFSGYTFKHKMVYEDTLTLFPFSGETVFMSMENPGLWILGCHN | |
| | SDFRNRGMTALLKVSSCDKNTGDYYEDSYEDISAYLLSKNNAIEPRSFSQNSRHPS | |
| | TRQKQFNATTIPENDIEKTDPWFAHRTPMPKIQNVSSSDLLMLLRQSPTPHGLSLS | |
| | DLQEAKYETFSDDPSPGAIDSNNSLSEMTHFRPQLHHSGDMVFTPESGLQLRLNE | |
| | KLGTTAATELKKLDFKVSSTSNNLISTIPSDNLAAGTDNTSSLGPPSMPVHYDSQL | |
| | DTTLFGKKSSPLTESGGPLSLSEENNDSKLLESGLMNSQESSWGKNVSSTESGRLF | |
| | KGKRAHGPALLTKDNALFKVSISLLKTNKTSNNSATNRKTHIDGPSLLIENSPSVW | |
| | QNILESDTEFKKVTPLIHDRMLMDKNATALRLNHMSNKTTSSKNMEMVQQKKE | |
| | GPIPPDAQNPDMSFFKMLFLPESARWIQRTHGKNSLNSGQGPSPKQLVSLGPEKSV | |
| | EGQNFLSEKNKVVVGKGEFTKDVGLKEMVFPSSRNLFLTNLDNLHENNTHNQEK | |
| | KIQEEIEKKETLIQENVVLPQIHTVTGTKNFMKNLFLLSTRQNVEGSYDGAYAPVL | |
| | QDFRSLNDSTNRTKKHTAHFSKKGEEENLEGLGNQTKQIVEKYACTTRISPNTSQ | |
| | QNFVTQRSKRALKQFRLPLEETELEKRIIVDDTSTQWSKNMKHLTPSTLTQIDYNE | |
| | KEKGAITQSPLSDCLTRSHSIPQANRSPLPIAKVSSFPSIRPIYLTRVLFQDNSSHLPA | |
| | ASYRKKDSGVQESSHFLQGAKKNNLSLAILTLEMTGDQREVGSLGTSATNSVTY | |
| | KKVENTVLPKPDLPKTSGKVELLPKVHIYQKDLFPTETSNGSPGHLDLVEGSLLQ | |
| | GTEGAIKWNEANRPGKVPFLRVATESSAKTPSKLLDPLAWDNHYGTQIPKEEWK | |
| | SQEKSPEKTAFKKKDTILSLNACESNHAIAAINEGQNKPEIEVTWAKQGRTERLCS | |
| | QNPPVLKRHQREITRTTLQSDQEEIDYDDTISVEMKKEDFDIYDEDENQSPRSFQK | |
| | KTRHYFIAAVERLWDYGMSSSPHVLRNRAQSGSVPQFKKVVFQEFTDGSFTQPL | |
| | YRGELNEHLGLLGPYIRAEVEDNIMVTFRNQASRPYSFYSSLISYEEDQRQGAEPR | |
| | KNFVKPNETKTYFWKVQHHMAPTKDEFDCKAWAYFSDVDLEKDVHSGLIGPLL | |
| | VCHTNTLNPAHGRQVTVQEFALFFTIFDETKSWYFTENMERNCRAPCNIQMEDPT | |
| | FKENYRFHAINGYIMDTLPGLVMAQDQRIRWYLLSMGSNENIHSIHFSGHVFTVR | |
| | KKEEYKMALYNLYPGVFETVEMLPSKAGIWRVECLIGEHLHAGMSTLFLVYSNK | |
| | CQTPLGMASGHIRDFQITASGQYGQWAPKLARLHYSGSINAWSTKEPFSWIKVDL | |
| | LAPMIIHGIKTQGARQKFSSLYISQFIIMYSLDGKKWQTYRGNSTGTLMVFFGNVD | |
| | SSGIKHNIFNPPIIARYIRLHPTHYSIRSTLRMELMGCDLNSCSMPLGMESKAISDA | |
| | QITASSYFTNMFATWSPSKARLHLQGRSNAWRPQVNNPKEWLQVDFQKTMKVT | |
| | GVTTQGVKSLLTSMYVKEFLISSSQDGHQWTLFFQNGKVKVFQGNQDSFTPVVN | |
| | SLDPPLLTRYLRIHPQSWVHQIALRMEVLGCEAQDLY | |
| FVIII | ATRRYYLGAVELSWDYMQSDLGELPVDARFPPRVPKSFPFNTSVVYKKTLFVEFT | 2 |
| mature | DHLFNIAKPRPPWMGLLGPTIQAEVYDTVVITLKNMASHPVSLHAVGVSYWKAS | |
| (human) | EGAEYDDQTSQREKEDDKVFPGGSHTYVWQVLKENGPMASDPLCLTYSYLSHV | |
| | DLVKDLNSGLIGALLVCREGSLAKEKTQTLHKFILLFAVFDEGKSWHSETKNSLM | |
| | QDRDAASARAWPKMHTVNGYVNRSLPGLIGCHRKSVYWHVIGMGTTPEVHSIFL | |
| | EGHTFLVRNHRQASLEISPITFLTAQTLLMDLGQFLLFCHISSHQHDGMEAYVKV | |
| | DSCPEEPQLRMKNNEEAEDYDDDLTDSEMDVVRFDDDNSPSFIQIRSVAKKHPKT | |
| | WVHYIAAEEEDWDYAPLVLAPDDRSYKSQYLNNGPQRIGRKYKKVRFMAYTDE | |
| | TFKTREAIQHESGILGPLLYGEVGDTLLIIFKNQASRPYNIYPHGITDVRPLYSRRLP | |
| | KGVKHLKDFPILPGEIFKYKWTVTVEDGPTKSDPRCLTRYYSSFVNMERDLASGL | |
| | IGPLLICYKESVDQRGNQIMSDKRNVILFSVFDENRSWYLTENIQRFLPNPAGVQL | |
| | EDPEFQASNIMHSINGYVFDSLQLSVCLHEVAYWYILSIGAQTDFLSVFFSGYTFK | |
| | HKMVYEDTLTLFPFSGETVFMSMENPGLWILGCHNSDFRNRGMTALLKVSSCDK | |
| | NTGDYYEDSYEDISAYLLSKNNAIEPRSFSQNSRHPSTRQKQFNATTIPENDIEKTD | |
| | PWFAHRTPMPKIQNVSSSDLLMLLRQSPTPHGLSLSDLQEAKYETFSDDPSPGAID | |
| | SNNSLSEMTHFRPQLHHSGDMVFTPESGLQLRLNEKLGTTAATELKKLDFKVSST | |
| | SNNLISTIPSDNLAAGTDNTSSLGPPSMPVHYDSQLDTTLFGKKSSPLTESGGPLSL | |
| | SEENNDSKLLESGLMNSQESSWGKNVSSTESGRLFKGKRAHGPALLTKDNALFK | |
| | VSISLLKTNKTSNNSATNRKTHIDGPSLLIENSPSVWQNILESDTEFKKVTPLIHDR | |
| | MLMDKNATALRLNHMSNKTTSSKNMEMVQQKKEGPIPPDAQNPDMSFFKMLFL | |
| | PESARWIQRTHGKNSLNSGQGPSPKQLVSLGPEKSVEGQNFLSEKNKVVVGKGEF | |
| | TKDVGLKEMVFPSSRNLFLTNLDNLHENNTHNQEKKIQEEIEKKETLIQENVVLP | |
| | QIHTVTGTKNFMKNLFLLSTRQNVEGSYDGAYAPVLQDFRSLNDSTNRIKKHTA | |
| | HFSKKGEEENLEGLGNQTKQIVEKYACTTRISPNTSQQNFVTQRSKRALKQFRLPL | |
| | EETELEKRIIVDDTSTQWSKNMKHLTPSTLTQIDYNEKEKGAITQSPLSDCLTRSHS | |
| | IPQANRSPLPIAKVSSFPSIRPIYLTRVLFQDNSSHLPAASYRKKDSGVQESSHFLQG | |
| | AKKNNLSLAILTLEMTGDQREVGSLGTSATNSVTYKKVENTVLPKPDLPKTSGKV | |
| | ELLPKVHIYQKDLFPTETSNGSPGHLDLVEGSLLQGTEGAIKWNEANRPGKVPFL | |
| | RVATESSAKTPSKLLDPLAWDNHYGTQIPKEEWKSQEKSPEKTAFKKKDTILSLN | |
| | ACESNHAIAAINEGQNKPEIEVTWAKQGRTERLCSQNPPVLKRHQREITRTTLQSD | |
| | QEEIDYDDTISVEMKKEDFDIYDEDENQSPRSFQKKTRHYFIAAVERLWDYGMSS | |
| | SPHVLRNRAQSGSVPQFKKVVFQEFTDGSFTQPLYRGELNEHLGLLGPYIRAEVE | |
| | DNIMVTFRNQASRPYSFYSSLISYEEDQRQGAEPRKNFVKPNETKTYFWKVQHH | |
| | MAPTKDEFDCKAWAYFSDVDLEKDVHSGLIGPLLVCHTNTLNPAHGRQVTVQEF | |
| | ALFFTIFDETKSWYFTENMERNCRAPCNIQMEDPTFKENYRFHAINGYIMDTLPGL | |
| | VMAQDQRIRWYLLSMGSNENIHSIHFSGHVFTVRKKEEYKMALYNLYPGVFETV | |
| | EMLPSKAGIWRVECLIGEHLHAGMSTLFLVYSNKCQTPLGMASGHIRDFQITASG | |
| | QYGQWAPKLARLHYSGSINAWSTKEPFSWIKVDLLAPMIIHGIKTQGARQKFSSL | |
| | YISQFIIMYSLDGKKWQTYRGNSTGTLMVFFGNVDSSGIKHNIFNPPIIARYIRLHP | |
| | THYSIRSTLRMELMGCDLNSCSMPLGMESKAISDAQITASSYFTNMFATWSPSKA | |
| | RLHLQGRSNAWRPQVNNPKEWLQVDFQKTMKVTGVTTQGVKSLLTSMYVKEF | |
| | LISSSQDGHQWTLFFQNGKVKVFQGNQDSFTPVVNSLDPPLLTRYLRIHPQSWVH | |
| | QIALRMEVLGCEAQDLY | |
| FVIII | MQVELYTCCFLCLLPFSLSATRKYYLGAVELSWDYMQSDLLSALHADTSFSSRVP | 3 |
| (Canine) | GSLPLTTSVTYRKTVFVEFTDDLFNIAKPRPPWMGLLGPTIQAEVYDTVVIVLKN | |
| | MASHPVSLHAVGVSYWKASEGAEYEDQTSQKEKEDDNVIPGESHTYVWQVLKE | |
| | NGPMASDPPCLTYSYFSHVDLVKDLNSGLIGALLVCKEGSLAKERTQTLQEFVLL | |
| | FAVFDEGKSWHSETNASLTQAEAQHELHTINGYVNRSLPGLTVCHKRSVYWHVI | |
| | GMGTTPEVHSIFLEGHTFLVRNHRQASLEISPITFLTAQTFLMDLGQFLLFCHIPSH | |
| | QHDGMEAYVKVDSCPEEPQLRMKNNEDKDYDDGLYDSDMDVVSFDDDSSSPFI | |
| | QIRSVAKKHPKTWVHYIAAEEEDWDYAPSGPTPNDRSHKNLYLNNGPQRIGKKY | |
| | KKVRFVAYTDETFKTREAIQYESGILGPLLYGEVGDTLLIIFKNQASRPYNIYPHGI | |
| | NYVTPLHTGRLPKGVKHLKDMPILPGEIFKYKWTVTVEDGPTKSDPRCLTRYYSS | |
| | FINLERDLASGLIGPLLICYKESVDQRGNQMMSDKRNVILFSVFDENRSWYLTEN | |
| | MQRFLPNADVVQPHDPEFQLSNIMHSINGYVFDNLQLSVCLHEVAYWYILSVGA | |
| | QTDFLSVFFSGYTFKHKMVYEDTLTLFPFSGETVFMSMENPGLWVLGCHNSDFR | |
| | NRGMTALLKVSSCNRNIDDYYEDTYEDIPTPLLNENNVIKPRSFSQNSRHPSTKEK | |
| | QLKATTTPENDIEKIDLQSGERTQLIKAQSVSSSDLLMLLGQNPTPRGLFLSDLREA | |
| | TDRADDHSRGAIERNKGPPEVASLRPELRHSEDREFTPEPELQLRLNENLGTNTTV | |
| | ELKKLDLKISSSSDSLMTSPTIPSDKLAAATEKTGSLGPPNMSVHFNSHLGTIVFGN | |
| | NSSHLIQSGVPLELSEEDNDSKLLEAPLMNIQESSLRENVLSMESNRLFKEERIRGP | |
| | ASLIKDNALFKVNISSVKTNRAPVNLTTNRKTRVAIPTLLIENSTSVWQDIMLERN | |
| | TEFKEVTSLIHNETFMDRNTTALGLNHVSNKTTLSKNVEMAHQKKEDPVPLRAE | |
| | NPDLSSSKIPFLPDWIKTHGKNSLSSEQRPSPKQLTSLGSEKSVKDQNFLSEEKVVV | |
| | GEDEFTKDTELQEIFPNNKSIFFANLANVQENDTYNQEKKSPEEIERKEKLTQENV | |
| | ALPQAHTMIGTKNFLKNLFLLSTKQNVAGLEEQPYTPILQDTRSLNDSPHSEGIHM | |
| | ANFSKIREEANLEGLGNQTNQMVERFPSTTRMSSNASQHVITQRGKRSLKQPRLS | |
| | QGEIKFERKVIANDTSTQWSKNMNYLAQGTLTQIEYNEKEKRAITQSPLSDCSMR | |
| | NHVTIQMNDSALPVAKESASPSVRHTDLTKIPSQHNSSHLPASACNYTFRERTSGV | |
| | QEGSHFLQEAKRNNLSLAFVTLGITEGQGKFSSLGKSATNQPMYKKLENTVLLQP | |
| | GLSETSDKVELLSQVHVDQEDSFPTKTSNDSPGHLDLMGKIFLQKTQGPVKMNK | |
| | TNSPGKVPFLKWATESSEKIPSKLLGVLAWDNHYDTQIPSEEWKSQKKSQTNTAF | |
| | KRKDTILPLGPCENNDSTAAINEGQDKPQREAMWAKQGEPGRLCSQNPPVSKHH | |
| | QREITVTTLQPEEDKFEYDDTFSIEMKREDFDIYGDYENQGLRSFQKKTRHYFIAA | |
| | VERLWDYGMSRSPHILRNRAQSGDVQQFKKVVFQEFTDGSFTQPLYRGELNEHL | |
| | GLLGPYIRAEVEDNIVVTFKNQASRPYSFYSSLISYDEDEGQGAEPRRKFVNPNET | |
| | KIYFWKVQHHMAPTKDEFDCKAWAYFSDVDLEKDVHSGLIGPLLICRSNTLNPA | |
| | HGRQVTVQEFALVFTIFDETKSWYFTENLERNCRAPCNVQKEDPTLKENFRFHAI | |
| | NGYVKDTLPGLVMAQDQKVRWYLLSMGSNENIHSIHFSGHVFTVRKKEEYKMA | |
| | VYNLYPGVFETVEMLPSQVGIWRIECLIGEHLQAGMSTLFLVYSKKCQTPLGMAS | |
| | GHIRDFQITASGQYGQWAPKLARLHYSGSINAWSTKDPFSWIKVDLLAPMIIHGI | |
| | MTQGARQKFSSLYVSQFIIMYSLDGNKWHSYRGNSTGTLMVFFGNVDSSGIKHNI | |
| | FNPPIIAQYIRLHPTHYSIRSTLRMELLGCDFNSCSMPLGMESKAISDAQITASSYLS | |
| | SMLATWSPSQARLHLQGRTNAWRPQANNPKEWLQVDFRKTMKVTGITTQGVKS | |
| | LLISMYVKEFLISSSQDGHNWTLFLQNGKVKVFQGNRDSSTPVRNRLEPPLVARY | |
| | VRLHPQSWAHHIALRLEVLGCDTQQPA | |
| FVIII (Pig) | ATRRYYLGAVELSWDYMQSDLGELPVDARFPPRVPKSFPFNTSVVYKKTLFVEFT | 4 |
| | DHLFNIAKPRPPWMGLLGPTIQAEVYDTVVITLKNMASHPVSLHAVGVSYWKAS | |
| | EGAEYDDQTSQREKEDDKVFPGGSHTYVWQVLKENGPMASDPLCLTYSYLSHV | |
| | DLVKDLNSGLIGALLVCREGSLAKEKTQTLHKFILLFAVFDEGKSWHSETKNSLM | |
| | QDRDAASARAWPKMHTVNGYVNRSLPGLIGCHRKSVYWHVIGMGTTPEVHSIFL | |
| | EGHTFLVRNHRQASLEISPITFLTAQTLLMDLGQFLLFCHISSHQHDGMEAYVKV | |
| | DSCPEEPQLRMKNNEEAEDYDDDLTDSEMDVVRFDDDNSPSFIQIRSVAKKHPKT | |
| | WVHYIAAEEEDWDYAPLVLAPDDRSYKSQYLNNGPQRIGRKYKKVRFMAYTDE | |
| | TFKTREAIQHESGILGPLLYGEVGDTLLIIFKNQASRPYNIYPHGITDVRPLYSRRLP | |
| | KGVKHLKDFPILPGEIFKYKWTVTVEDGPTKSDPRCLTRYYSSFVNMERDLASGL | |
| | IGPLLICYKESVDQRGNQIMSDKRNVILFSVFDENRSWYLTENIQRFLPNPAGVQL | |
| | EDPEFQASNIMHSINGYVFDSLQLSVCLHEVAYWYILSIGAQTDFLSVFFSGYTFK | |
| | HKMVYEDTLTLFPFSGETVFMSMENPGLWILGCHNSDFRNRGMTALLKVSSCDK | |
| | NTGDYYEDSYEDISAYLLSKNNAIEPRSFSQNSRHPSTRQKQFNATTIPENDIEKTD | |
| | PWFAHRTPMPKIQNVSSSDLLMLLRQSPTPHGLSLSDLQEAKYETFSDDPSPGAID | |
| | SNNSLSEMTHFRPQLHHSGDMVFTPESGLQLRLNEKLGTTAATELKKLDFKVSST | |
| | SNNLISTIPSDNLAAGTDNTSSLGPPSMPVHYDSQLDTTLFGKKSSPLTESGGPLSL | |
| | SEENNDSKLLESGLMNSQESSWGKNVSSTESGRLFKGKRAHGPALLTKDNALFK | |
| | VSISLLKTNKTSNNSATNRKTHIDGPSLLIENSPSVWQNILESDTEFKKVTPLIHDR | |
| | MLMDKNATALRLNHMSNKTTSSKNMEMVQQKKEGPIPPDAQNPDMSFFKMLFL | |
| | PESARWIQRTHGKNSLNSGQGPSPKQLVSLGPEKSVEGQNFLSEKNKVVVGKGEF | |
| | TKDVGLKEMVFPSSRNLFLTNLDNLHENNTHNQEKKIQEEIEKKETLIQENVVLP | |
| | QIHTVTGTKNFMKNLFLLSTRQNVEGSYDGAYAPVLQDFRSLNDSTNRTKKHTA | |
| | HFSKKGEEENLEGLGNQTKQIVEKYACTTRISPNTSQQNFVTQRSKRALKQFRLPL | |
| | EETELEKRIIVDDTSTQWSKNMKHLTPSTLTQIDYNEKEKGAITQSPLSDCLTRSHS | |
| | IPQANRSPLPIAKVSSFPSIRPIYLTRVLFQDNSSHLPAASYRKKDSGVQESSHFLQG | |
| | AKKNNLSLAILTLEMTGDQREVGSLGTSATNSVTYKKVENTVLPKPDLPKTSGKV | |
| | ELLPKVHIYQKDLFPTETSNGSPGHLDLVEGSLLQGTEGAIKWNEANRPGKVPFL | |
| | RVATESSAKTPSKLLDPLAWDNHYGTQIPKEEWKSQEKSPEKTAFKKKDTILSLN | |
| | ACESNHAIAAINEGQNKPEIEVTWAKQGRTERLCSQNPPVLKRHQREITRTTLQSD | |
| | QEEIDYDDTISVEMKKEDFDIYDEDENQSPRSFQKKTRHYFIAAVERLWDYGMSS | |
| | SPHVLRNRAQSGSVPQFKKVVFQEFTDGSFTQPLYRGELNEHLGLLGPYIRAEVE | |
| | DNIMVTFRNQASRPYSFYSSLISYEEDQRQGAEPRKNFVKPNETKTYFWKVQHH | |
| | MAPTKDEFDCKAWAYFSDVDLEKDVHSGLIGPLLVCHTNTLNPAHGRQVTVQEF | |
| | ALFFTIFDETKSWYFTENMERNCRAPCNIQMEDPTFKENYRFHAINGYIMDTLPGL | |
| | VMAQDQRIRWYLLSMGSNENIHSIHFSGHVFTVRKKEEYKMALYNLYPGVFETV | |
| | EMLPSKAGIWRVECLIGEHLHAGMSTLFLVYSNKCQTPLGMASGHIRDFQITASG | |
| | QYGQWAPKLARLHYSGSINAWSTKEPFSWIKVDLLAPMIIHGIKTQGARQKFSSL | |
| | YISQFIIMYSLDGKKWQTYRGNSTGTLMVFFGNVDSSGIKHNIFNPPIIARYIRLHP | |
| | THYSIRSTLRMELMGCDLNSCSMPLGMESKAISDAQITASSYFTNMFATWSPSKA | |
| | RLHLQGRSNAWRPQVNNPKEWLQVDFQKTMKVTGVTTQGVKSLLTSMYVKEF | |
| | LISSSQDGHQWTLFFQNGKVKVFQGNQDSFTPVVNSLDPPLLTRYLRIHPQSWVH | |
| | QIALRMEVLGCEAQDLY | |
| FVIII | AIRRYYLGAVELSWNYIQSDLLSVLHTDSRFLPRMSTSFPFNTSIMYKKTVFVEYK | 5 |
| (Mouse) | DQLFNIAKPRPPWMGLLGPTIWTEVHDTVVITLKNMASHPVSLHAVGVSYWKAS | |
| | EGDEYEDQTSQMEKEDDKVFPGESHTYVWQVLKENGPMASDPPCLTYSYMSHV | |
| | DLVKDLNSGLIGALLVCKEGSLSKERTQMLYQFVLLFAVFDEGKSWHSETNDSY | |
| | TQSMDSASARDWPKMHTVNGYVNRSLPGLIGCHRKSVYWHVIGMGTTPEIHSIF | |
| | LEGHTFFVRNHRQASLEISPITFLTAQTLLIDLGQFLLFCHISSHKHDGMEAYVKV | |
| | DSCPEESQWQKKNNNEEMEDYDDDLYSEMDMFTLDYDSSPFIQIRSVAKKYPKT | |
| | WIHYISAEEEDWDYAPSVPTSDNGSYKSQYLSNGPHRIGRKYKKVRFIAYTDETF | |
| | KTRETIQHESGLLGPLLYGEVGDTLLIIFKNQASRPYNIYPHGITDVSPLHARRLPR | |
| | GIKHVKDLPIHPGEIFKYKWTVTVEDGPTKSDPRCLTRYYSSFINPERDLASGLIGP | |
| | LLICYKESVDQRGNQMMSDKRNVILFSIFDENQSWYITENMQRFLPNAAKTQPQD | |
| | PGFQASNIMHSINGYVFDSLELTVCLHEVAYWHILSVGAQTDFLSIFFSGYTFKHK | |
| | MVYEDTLTLFPFSGETVFMSMENPGLWVLGCHNSDFRKRGMTALLKVSSCDKST | |
| | SDYYEEIYEDIPTQLVNENNVIDPRSFFQNTNHPNTRKKKFKDSTIPKNDMEKIEPQ | |
| | FEEIAEMLKVQSVSVSDMLMLLGQSHPTPHGLFLSDGQEAIYEAIHDDHSPNAIDS | |
| | NEGPSKVTQLRPESHHSEKIVFTPQPGLQLRSNKSLETTIEVKWKKLGLQVSSLPS | |
| | NLMTTTILSDNLKATFEKTDSSGFPDMPVHSSSKLSTTAFGKKAYSLVGSHVPLN | |
| | ASEENSDSNILDSTLMYSQESLPRDNILSIENDRLLREKRFHGIALLTKDNTLFKDN | |
| | VSLMKTNKTYNHSTTNEKLHTESPTSIENSTTDLQDAILKVNSEIQEVTALIHDGT | |
| | LLGKNSTYLRLNHMLNRTTSTKNKDIFHRKDEDPIPQDEENTIMPFSKMLFLSESS | |
| | NWFKKTNGNNSLNSEQEHSPKQLVYLMFKKYVKNQSFLSEKNKVTVEQDGFTK | |
| | NIGLKDMAFPHNMSIFLTTLSNVHENGRHNQEKNIQEEIEKEALIEEKVVLPQVHE | |
| | ATGSKNFLKDILILGTRQNISLYEVHVPVLQNITSINNSTNTVQIHMEHFFKRRKDK | |
| | ETNSEGLVNKTREMVKNYPSQKNITTQRSKRALGQFRLSTQWLKTINCSTQCIIKQ | |
| | IDHSKEMKKFITKSSLSDSSVIKSTTQTNSSDSHIVKTSAFPPIDLKRSPFQNKFSHV | |
| | QASSYIYDFKTKSSRIQESNNFLKETKINNPSLAILPWNMFIDQGKFTSPGKSNTNS | |
| | VTYKKRENIIFLKPTLPEESGKIELLPQVSIQEEEILPTETSHGSPGHLNLMKEVFLQ | |
| | KIQGPTKWNKAKRHGESIKGKTESSKNTRSKLLNHHAWDYHYAAQIPKDMWKS | |
| | KEKSPEIISIKQEDTILSLRPHGNSHSIGANEKQNWPQRETTWVKQGQTQRTCSQIP | |
| | PVLKRHQRELSAFQSEQEATDYDDAITIETIEDFDIYSEDIKQGPRSFQQKTRHYFI | |
| | AAVERLWDYGMSTSHVLRNRYQSDNVPQFKKVVFQEFTDGSFSQPLYRGELNEH | |
| | LGLLGPYIRAEVEDNIMVTFKNQASRPYSFYSSLISYKEDQRGEEPRRNFVKPNET | |
| | KIYFWKVQHHMAPTEDEFDCKAWAYFSDVDLERDMHSGLIGPLLICHANTLNPA | |
| | HGRQVSVQEFALLFTIFDETKSWYFTENVKRNCKTPCNFQMEDPTLKENYRFHAI | |
| | NGYVMDTLPGLVMAQDQRIRWYLLSMGNNENIQSIHFSGHVFTVRKKEEYKMA | |
| | VYNLYPGVFETLEMIPSRAGIWRVECLIGEHLQAGMSTLFLVYSKQCQIPLGMAS | |
| | GSIRDFQITASGHYGQWAPNLARLHYSGSINAWSTKEPFSWIKVDLLAPMIVHGIK | |
| | TQGARQKFSSLYISQFIIMYSLDGKKWLSYQGNSTGTLMVFFGNVDSSGIKHNSF | |
| | NPPIIARYIRLHPTHSSIRSTLRMELMGCDLNSCSIPLGMESKVISDTQITASSYFTN | |
| | MFATWSPSQARLHLQGRTNAWRPQVNDPKQWLQVDLQKTMKVTGIITQGVKSL | |
| | FTSMFVKEFLISSSQDGHHWTQILYNGKVKVFQGNQDSSTPMMNSLDPPLLTRYL | |
| | RIHPQIWEHQIALRLEILGCEAQQQY | |
| FVIII BDD | MQIELSTCFFLCLLRFCFSATRRYYLGAVELSWDYMQSDLGELPVDARFPPRVPK | 6 |
| variant | SFPFNTSVVYKKTLFVEFTVHLFNIAKPRPPWMGLLGPTIQAEVYDTVVITLKNM | |
| (U.S. Pat. | ASHPVSLHAVGVSYWKASEGAEYDDQTSQREKEDDKVFPGGSHTYVWQVLKEN | |
| No. | GPMASDPLCLTYSYLSHVDLVKDLNSGLIGALLVCREGSLAKEKTQTLHKFILLF | |
| 7,632,921, | AVFDEGKSWHSETKNSLMQDRDAASARAWPKMHTVNGYVNRSLPGLIGCHRKS | |
| SEQ ID | VYWHVIGMGTTPEVHSIFLEGHIFLVRNHRQASLEISPITFLTAQTLLMDLGQFLL | |
| NO: 3) | FCHISSHQHDGMEAYVKVDSCPEEPQLRMKNNEEAEDYDDDLTDSEMDVVRFD | |
| | DDNSPSFIQIRSVAKKHPKTWVHYIAAEEEDWDYAPLVLAPDDRSYKSQYLNNG | |
| | PQRIGRKYKKVRFMAYTDETFKTREAIQHESGILGPLLYGEVGDTLLIIFKNQASR | |
| | PYNIYPHGITDVRPLYSRRLPKGVKHLKDFPILPGEIFKYKWTVTVEDGPTKSDPR | |
| | CLTRYYSSFVNMERDLASGLIGPLLICYKESVDQRGNQIMSDKRNVILFSVFDENR | |
| | SWYLTENIQRFLPNPAGVQLEDPEFQASNIMHSINGYVFDSLQLSVCLHEVAYWY | |
| | ILSIGAQTDFLSVFFSGYTFKHKMVYEDTLTLFPFSGETVFMSMENPGLWILGCHN | |
| | SDFRNRGMTALLKVSSCDKNTGDYYEDSYEDISAYLLSKNNAIEPRSFSQNPPVL | |
| | KRHQREITRTTLQSDQEEIDYDDTISVEMKKEDFDIYDEDENQSPRSFQKKTRHYF | |
| | IAAVERLWDYGMSSSPHVLRNRAQSGSVPQFKKVVFQEFTDGSFTQPLYRGELNE | |
| | HLGLLGPYIRAEVEDNIMVTFRNQASRPYSFYSSLISYEEDQRQGAEPRKNFVKPN | |
| | ETKTYFWKVQHHMAPTKDEFDCKAWAYFSDVDLEKDVHSGLIGPLLVCHTNTL | |
| | NPAHGRQVTVQEFALFFTIFDETKSWYFTENMERNCRAPCNIQMEDPTFKENYRF | |
| | HAINGYIMDTLPGLVMAQDQRIRWYLLSMGSNENIHSIHFSGHVFTVRKKEEYK | |
| | MALYNLYPGVFETVEMLPSKAGIWRVECLIGEHLHAGMSTLFLVYSNKCQTPLG | |
| | MASGHIRDFQITASGQYGQWAPKLARLHYSGSINAWSTKEPFSWIKVDLLAPMII | |
| | HGIKTQGARQKFSSLYISQFIIMYSLDGKKWQTYRGNSTGTLMVFFGNVDSSGIK | |
| | HNIFNPPIIARYIRLHPTHYSIRSTLRMELMGCDLNSCSMPLGMESKAISDAQITASS | |
| | YFTNMFATWSPSKARLHLQGRSNAWRPQVNNPKEWLQVDFQKTMKVTGVTTQ | |
| | GVKSLLTSMYVKEFLISSSQDGHQWTLFFQNGKVKVFQGNQDSFTPVVNSLDPPL | |
| | LTRYLRIHPQSWVHQIALRMEVLGCEAQDLY | |
| FVIII | ATRRYYLGAVELSWDYMQSDLGELPVDARFPPRVPKSFPFNTSVVYKKTLFVEFT | 7 |
| BDD-2 | VHLFNIAKPRPPWMGLLGPTIQAEVYDTVVITLKNMASHPVSLHAVGVSYWKAS | |
| | EGAEYDDQTSQREKEDDKVFPGGSHTYVWQVLKENGPMASDPLCLTYSYLSHV | |
| | DLVKDLNSGLIGALLVCREGSLAKEKTQTLHKFILLFAVFDEGKSWHSETKNSLM | |
| | QDRDAASARAWPKMHTVNGYVNRSLPGLIGCHRKSVYWHVIGMGTTPEVHSIFL | |
| | EGHTFLVRNHRQASLEISPITFLTAQTLLMDLGQFLLFCHISSHQHDGMEAYVKV | |
| | DSCPEEPQLRMKNNEEAEDYDDDLTDSEMDVVRFDDDNSPSFIQIRSVAKKHPKT | |
| | WVHYIAAEEEDWDYAPLVLAPDDRSYKSQYLNNGPQRIGRKYKKVRFMAYTDE | |
| | TFKTREAIQHESGILGPLLYGEVGDTLLIIFKNQASRPYNIYPHGITDVRPLYSRRLP | |
| | KGVKHLKDFPILPGEIFKYKWTVTVEDGPTKSDPRCLTRYYSSFVNMERDLASGL | |
| | IGPLLICYKESVDQRGNQIMSDKRNVILFSVFDENRSWYLTENIQRFLPNPAGVQL | |
| | EDPEFQASNIMHSINGYVFDSLQLSVCLHEVAYWYILSIGAQTDFLSVFFSGYTFK | |
| | HKMVYEDTLTLFPFSGETVFMSMENPGLWILGCHNSDFRNRGMTALLKVSSCDK | |
| | NTGDYYEDSYEDISAYLLSKNNAIEPRSFSQNPPVLKRHQREITRTTLQSDQEEIDY | |
| | DDTISVEMKKEDFDIYDEDENQSPRSFQKKTRHYFIAAVERLWDYGMSSSPHVLR | |
| | NRAQSGSVPQFKKVVFQEFTDGSFTQPLYRGELNEHLGLLGPYIRAEVEDNIMVT | |
| | FRNQASRPYSFYSSLISYEEDQRQGAEPRKNFVKPNETKTYFWKVQHHMAPTKD | |
| | EFDCKAWAYFSDVDLEKDVHSGLIGPLLVCHTNTLNPAHGRQVTVQEFALFFTIF | |
| | DETKSWYFTENMERNCRAPCNIQMEDPTFKENYRFHAINGYIMDTLPGLVMAQD | |
| | QRIRWYLLSMGSNENIHSIHFSGHVFTVRKKEEYKMALYNLYPGVFETVEMLPSK | |
| | AGIWRVECLIGEHLHAGMSTLFLVYSNKCQTPLGMASGHIRDFQITASGQYGQW | |
| | APKLARLHYSGSINAWSTKEPFSWIKVDLLAPMIIHGIKTQGARQKFSSLYISQFII | |
| | MYSLDGKKWQTYRGNSTGTLMVFFGNVDSSGIKHNIFNPPIIARYIRLHPTHYSIR | |
| | STLRMELMGCDLNSCSMPLGMESKAISDAQITASSYFTNMFATWSPSKARLHLQ | |
| | GRSNAWRPQVNNPKEWLQVDFQKTMKVTGVTTQGVKSLLTSMYVKEFLISSSQ | |
| | DGHQWTLFFQNGKVKVFQGNQDSFTPVVNSLDPPLLTRYLRIHPQSWVHQIALR | |
| | MEVLGCEAQDLY | |
| FVIII | ATRRYYLGAVELSWDYMQSDLGELPVDARFPPRVPKSFPFNTSVVYKKTLFVEFT | 8 |
| BDD-3 | VHLFNIAKPRPPWMGLLGPTIQAEVYDTVVITLKNMASHPVSLHAVGVSYWKAS | |
| (G1648) | EGAEYDDQTSQREKEDDKVFPGGSHTYVWQVLKENGPMASDPLCLTYSYLSHV | |
| | DLVKDLNSGLIGALLVCREGSLAKEKTQTLHKFILLFAVFDEGKSWHSETKNSLM | |
| | QDRDAASARAWPKMHTVNGYVNRSLPGLIGCHRKSVYWHVIGMGTTPEVHSIFL | |
| | EGHTFLVRNHRQASLEISPITFLTAQTLLMDLGQFLLFCHISSHQHDGMEAYVKV | |
| | DSCPEEPQLRMKNNEEAEDYDDDLTDSEMDVVRFDDDNSPSFIQIRSVAKKHPKT | |
| | WVHYIAAEEEDWDYAPLVLAPDDRSYKSQYLNNGPQRIGRKYKKVRFMAYTDE | |
| | TFKTREAIQHESGILGPLLYGEVGDTLLIIFKNQASRPYNIYPHGITDVRPLYSRRLP | |
| | KGVKHLKDFPILPGEIFKYKWTVTVEDGPTKSDPRCLTRYYSSFVNMERDLASGL | |
| | IGPLLICYKESVDQRGNQIMSDKRNVILFSVFDENRSWYLTENIQRFLPNPAGVQL | |
| | EDPEFQASNIMHSINGYVFDSLQLSVCLHEVAYWYILSIGAQTDFLSVFFSGYTFK | |
| | HKMVYEDTLTLFPFSGETVFMSMENPGLWILGCHNSDFRNRGMTALLKVSSCDK | |
| | NTGDYYEDSYEDISAYLLSKNNAIEPRSFSQNPPVLKRHQGEITRTTLQSDQEEIDY | |
| | DDTISVEMKKEDFDIYDEDENQSPRSFQKKTRHYFIAAVERLWDYGMSSSPHVLR | |
| | NRAQSGSVPQFKKVVFQEFTDGSFTQPLYRGELNEHLGLLGPYIRAEVEDNIMVT | |
| | FRNQASRPYSFYSSLISYEEDQRQGAEPRKNFVKPNETKTYFWKVQHHMAPTKD | |
| | EFDCKAWAYFSDVDLEKDVHSGLIGPLLVCHTNTLNPAHGRQVTVQEFALFFTIF | |
| | DETKSWYFTENMERNCRAPCNIQMEDPTFKENYRFHAINGYIMDTLPGLVMAQD | |
| | QRIRWYLLSMGSNENIHSIHFSGHVFTVRKKEEYKMALYNLYPGVFETVEMLPSK | |
| | AGIWRVECLIGEHLHAGMSTLFLVYSNKCQTPLGMASGHIRDFQITASGQYGQW | |
| | APKLARLHYSGSINAWSTKEPFSWIKVDLLAPMIIHGIKTQGARQKFSSLYISQFII | |
| | MYSLDGKKWQTYRGNSTGTLMVFFGNVDSSGIKHNIFNPPIIARYIRLHPTHYSIR | |
| | STLRMELMGCDLNSCSMPLGMESKAISDAQITASSYFTNMFATWSPSKARLHLQ | |
| | GRSNAWRPQVNNPKEWLQVDFQKTMKVTGVTTQGVKSLLTSMYVKEFLISSSQ | |
| | DGHQWTLFFQNGKVKVFQGNQDSFTPVVNSLDPPLLTRYLRIHPQSWVHQIALR | |
| | MEVLGCEAQDLY | |
| FVIII | ATRRYYLGAVELSWDYMQSDLGELPVDARFPPRVPKSFPFNTSVVYKKTLFVEFT | 9 |
| BDD-4 | VHLFNIAKPRPPWMGLLGPTIQAEVYDTVVITLKNMASHPVSLHAVGVSYWKAS | |
| | EGAEYDDQTSQREKEDDKVFPGGSHTYVWQVLKENGPMASDPLCLTYSYLSHV | |
| | DLVKDLNSGLIGALLVCREGSLAKEKTQTLHKFILLFAVFDEGKSWHSETKNSLM | |
| | QDRDAASARAWPKMHTVNGYVNRSLPGLIGCHRKSVYWHVIGMGTTPEVHSIFL | |
| | EGHTFLVRNHRQASLEISPITFLTAQTLLMDLGQFLLFCHISSHQHDGMEAYVKV | |
| | DSCPEEPQLRMKNNEEAEDYDDDLTDSEMDVVRFDDDNSPSFIQIRSVAKKHPKT | |
| | WVHYIAAEEEDWDYAPLVLAPDDRSYKSQYLNNGPQRIGRKYKKVRFMAYTDE | |
| | TFKTREAIQHESGILGPLLYGEVGDTLLIIFKNQASRPYNIYPHGITDVRPLYSRRLP | |
| | KGVKHLKDFPILPGEIFKYKWTVTVEDGPTKSDPRCLTRYYSSFVNMERDLASGL | |
| | IGPLLICYKESVDQRGNQIMSDKRNVILFSVFDENRSWYLTENIQRFLPNPAGVQL | |
| | EDPEFQASNIMHSINGYVFDSLQLSVCLHEVAYWYILSIGAQTDFLSVFFSGYTFK | |
| | HKMVYEDTLTLFPFSGETVFMSMENPGLWILGCHNSDFRNRGMTALLKVSSCDK | |
| | NTGDYYEDSYEDISAYLLSKNNAIEPRSFSQQSPRSFQKKTRHYFIAAVERLWDY | |
| | GMSSSPHVLRNRAQSGSVPQFKKVVFQEFTDGSFTQPLYRGELNEHLGLLGPYIR | |
| | AEVEDNIMVTFRNQASRPYSFYSSLISYEEDQRQGAEPRKNFVKPNETKTYFWKV | |
| | QHHMAPTKDEFDCKAWAYFSDVDLEKDVHSGLIGPLLVCHTNTLNPAHGRQVT | |
| | VQEFALFFTIFDETKSWYFTENMERNCRAPCNIQMEDPTFKENYRFHAINGYIMD | |
| | TLPGLVMAQDQRIRWYLLSMGSNENIHSIHFSGHVFTVRKKEEYKMALYNLYPG | |
| | VFETVEMLPSKAGIWRVECLIGEHLHAGMSTLFLVYSNKCQTPLGMASGHIRDFQ | |
| | ITASGQYGQWAPKLARLHYSGSINAWSTKEPFSWIKVDLLAPMIIHGIKTQGARQ | |
| | KFSSLYISQFIIMYSLDGKKWQTYRGNSTGTLMVFFGNVDSSGIKHNIFNPPIIARYI | |
| | RLHPTHYSIRSTLRMELMGCDLNSCSMPLGMESKAISDAQITASSYFTNMFATWS | |
| | PSKARLHLQGRSNAWRPQVNNPKEWLQVDFQKTMKVTGVTTQGVKSLLTSMY | |
| | VKEFLISSSQDGHQWTLFFQNGKVKVFQGNQDSFTPVVNSLDPPLLTRYLRIHPQS | |
| | WVHQIALRMEVLGCEAQDLY | |
| FVIII | ATRRYYLGAVELSWDYMQSDLGELPVDARFPPRVPKSFPFNTSVVYKKTLFVEFT | 10 |
| BDD-5 | VHLFNIAKPRPPWMGLLGPTIQAEVYDTVVITLKNMASHPVSLHAVGVSYWKAS | |
| | EGAEYDDQTSQREKEDDKVFPGGSHTYVWQVLKENGPMASDPLCLTYSYLSHV | |
| | DLVKDLNSGLIGALLVCREGSLAKEKTQTLHKFILLFAVFDEGKSWHSETKNSLM | |
| | QDRDAASARAWPKMHTVNGYVNRSLPGLIGCHRKSVYWHVIGMGTTPEVHSIFL | |
| | EGHTFLVRNHRQASLEISPITFLTAQTLLMDLGQFLLFCHISSHQHDGMEAYVKV | |
| | DSCPEEPQLRMKNNEEAEDYDDDLTDSEMDVVRFDDDNSPSFIQIRSVAKKHPKT | |
| | WVHYIAAEEEDWDYAPLVLAPDDRSYKSQYLNNGPQRIGRKYKKVRFMAYTDE | |
| | TFKTREAIQHESGILGPLLYGEVGDTLLIIFKNQASRPYNIYPHGITDVRPLYSRRLP | |
| | KGVKHLKDFPILPGEIFKYKWTVTVEDGPTKSDPRCLTRYYSSFVNMERDLASGL | |
| | IGPLLICYKESVDQRGNQIMSDKRNVILFSVFDENRSWYLTENIQRFLPNPAGVQL | |
| | EDPEFQASNIMHSINGYVFDSLQLSVCLHEVAYWYILSIGAQTDFLSVFFSGYTFK | |
| | HKMVYEDTLTLFPFSGETVFMSMENPGLWILGCHNSDFRNRGMTALLKVSSCDK | |
| | QSPRSFQKKTRHYFIAAVERLWDYGMSSSPHVLRNRAQSGSVPQFKKVVFQEFT | |
| | DGSFTQPLYRGELNEHLGLLGPYIRAEVEDNIMVTFRNQASRPYSFYSSLISYEED | |
| | QRQGAEPRKNFVKPNETKTYFWKVQHHMAPTKDEFDCKAWAYFSDVDLEKDV | |
| | HSGLIGPLLVCHTNTLNPAHGRQVTVQEFALFFTIFDETKSWYFTENMERNCRAP | |
| | CNIQMEDPTFKENYRFHAINGYIMDTLPGLVMAQDQRIRWYLLSMGSNENIHSIH | |
| | FSGHVFTVRKKEEYKMALYNLYPGVFETVEMLPSKAGIWRVECLIGEHLHAGMS | |
| | TLFLVYSNKCQTPLGMASGHIRDFQITASGQYGQWAPKLARLHYSGSINAWSTKE | |
| | PFSWIKVDLLAPMIIHGIKTQGARQKFSSLYISQFIIMYSLDGKKWQTYRGNSTGT | |
| | LMVFFGNVDSSGIKHNIFNPPIIARYIRLHPTHYSIRSTLRMELMGCDLNSCSMPLG | |
| | MESKAISDAQITASSYFTNMFATWSPSKARLHLQGRSNAWRPQVNNPKEWLQVD | |
| | FQKTMKVTGVTTQGVKSLLTSMYVKEFLISSSQDGHQWTLFFQNGKVKVFQGN | |
| | QDSFTPVVNSLDPPLLTRYLRIHPQSWVHQIALRMEVLGCEAQDLY | |
| FVIII | ATRRYYLGAVELSWDYMQSDLGELPVDARFPPRVPKSFPFNTSVVYKKTLFVEFT | 11 |
| BDD-6 | DHLFNIAKPRPPWMGLLGPTIQAEVYDTVVITLKNMASHPVSLHAVGVSYWKAS | |
| | EGAEYDDQTSQREKEDDKVFPGGSHTYVWQVLKENGPMASDPLCLTYSYLSHV | |
| | DLVKDLNSGLIGALLVCREGSLAKEKTQTLHKFILLFAVFDEGKSWHSETKNSLM | |
| | QDRDAASARAWPKMHTVNGYVNRSLPGLIGCHRKSVYWHVIGMGTTPEVHSIFL | |
| | EGHTFLVRNHRQASLEISPITFLTAQTLLMDLGQFLLFCHISSHQHDGMEAYVKV | |
| | DSCPEEPQLRMKNNEEAEDYDDDLTDSEMDVVRFDDDNSPSFIQIRSVAKKHPKT | |
| | WVHYIAAEEEDWDYAPLVLAPDDRSYKSQYLNNGPQRIGRKYKKVRFMAYTDE | |
| | TFKTREAIQHESGILGPLLYGEVGDTLLIIFKNQASRPYNIYPHGITDVRPLYSRRLP | |
| | KGVKHLKDFPILPGEIFKYKWTVTVEDGPTKSDPRCLTRYYSSFVNMERDLASGL | |
| | IGPLLICYKESVDQRGNQIMSDKRNVILFSVFDENRSWYLTENIQRFLPNPAGVQL | |
| | EDPEFQASNIMHSINGYVFDSLQLSVCLHEVAYWYILSIGAQTDFLSVFFSGYTFK | |
| | HKMVYEDTLTLFPFSGETVFMSMENPGLWILGCHNSDFRNRGMTALLKVSSCDK | |
| | NTGDYYEDSYEDISAYLLSKNNAIEPRSFSQNSRHPSTRQKQFNATTIPENDIEKTD | |
| | TISVEMKKEDFDIYDEDENQSPRSFQKKTRHYFIAAVERLWDYGMSSSPHVLRNR | |
| | AQSGSVPQFKKVVFQEFTDGSFTQPLYRGELNEHLGLLGPYIRAEVEDNIMVTFR | |
| | NQASRPYSFYSSLISYEEDQRQGAEPRKNFVKPNETKTYFWKVQHHMAPTKDEF | |
| | DCKAWAYFSDVDLEKDVHSGLIGPLLVCHTNTLNPAHGRQVTVQEFALFFTIFDE | |
| | TKSWYFTENMERNCRAPCNIQMEDPTFKENYRFHAINGYIMDTLPGLVMAQDQR | |
| | IRWYLLSMGSNENIHSIHFSGHVFTVRKKEEYKMALYNLYPGVFETVEMLPSKAG | |
| | IWRVECLIGEHLHAGMSTLFLVYSNKCQTPLGMASGHIRDFQITASGQYGQWAP | |
| | KLARLHYSGSINAWSTKEPFSWIKVDLLAPMIIHGIKTQGARQKFSSLYISQFIIMY | |
| | SLDGKKWQTYRGNSTGTLMVFFGNVDSSGIKHNIFNPPIIARYIRLHPTHYSIRSTL | |
| | RMELMGCDLNSCSMPLGMESKAISDAQITASSYFTNMFATWSPSKARLHLQGRS | |
| | NAWRPQVNNPKEWLQVDFQKTMKVTGVTTQGVKSLLTSMYVKEFLISSSQDGH | |
| | QWTLFFQNGKVKVFQGNQDSFTPVVNSLDPPLLTRYLRIHPQSWVHQIALRMEV | |
| | LGCEAQDLY | |
| FVIII | ATRRYYLGAVELSWDYMQSDLGELPVDARFPPRVPKSFPFNTSVVYKKTLFVEFT | 12 |
| BDD-7 | VHLFNIAKPRPPWMGLLGPTIQAEVYDTVVITLKNMASHPVSLHAVGVSYWKAS | |
| | EGAEYDDQTSQREKEDDKVFPGGSHTYVWQVLKENGPMASDPLCLTYSYLSHV | |
| | DLVKDLNSGLIGALLVCREGSLAKEKTQTLHKFILLFAVFDEGKSWHSETKNSLM | |
| | QDRDAASARAWPKMHTVNGYVNRSLPGLIGCHRKSVYWHVIGMGTTPEVHSIFL | |
| | EGHTFLVRNHRQASLEISPITFLTAQTLLMDLGQFLLFCHISSHQHDGMEAYVKV | |
| | DSCPEEPQLRMKNNEEAEDYDDDLTDSEMDVVRFDDDNSPSFIQIRSVAKKHPKT | |
| | WVHYIAAEEEDWDYAPLVLAPDDRSYKSQYLNNGPQRIGRKYKKVRFMAYTDE | |
| | TFKTREAIQHESGILGPLLYGEVGDTLLIIFKNQASRPYNIYPHGITDVRPLYSRRLP | |
| | KGVKHLKDFPILPGEIFKYKWTVTVEDGPTKSDPRCLTRYYSSFVNMERDLASGL | |
| | IGPLLICYKESVDQRGNQIMSDKRNVILFSVFDENRSWYLTENIQRFLPNPAGVQL | |
| | EDPEFQASNIMHSINGYVFDSLQLSVCLHEVAYWYILSIGAQTDFLSVFFSGYTFK | |
| | HKMVYEDTLTLFPFSGETVFMSMENPGLWILGCHNSDFRNRGMTALLKVSSCDK | |
| | NTGDYYEDSYEDISAYLLSKNNAIEPRSFSQSPRSFQKKTRHYFIAAVERLWDYG | |
| | MSSSPHVLRNRAQSGSVPQFKKVVFQEFTDGSFTQPLYRGELNEHLGLLGPYIRA | |
| | EVEDNIMVTFRNQASRPYSFYSSLISYEEDQRQGAEPRKNFVKPNETKTYFWKVQ | |
| | HHMAPTKDEFDCKAWAYFSDVDLEKDVHSGLIGPLLVCHTNTLNPAHGRQVTV | |
| | QEFALFFTIFDETKSWYFTENMERNCRAPCNIQMEDPTFKENYRFHAINGYIMDTL | |
| | PGLVMAQDQRIRWYLLSMGSNENIHSIHFSGHVFTVRKKEEYKMALYNLYPGVF | |
| | ETVEMLPSKAGIWRVECLIGEHLHAGMSTLFLVYSNKCQTPLGMASGHIRDFQIT | |
| | ASGQYGQWAPKLARLHYSGSINAWSTKEPFSWIKVDLLAPMIIHGIKTQGARQKF | |
| | SSLYISQFIIMYSLDGKKWQTYRGNSTGTLMVFFGNVDSSGIKHNIFNPPIIARYIRL | |
| | HPTHYSIRSTLRMELMGCDLNSCSMPLGMESKAISDAQITASSYFTNMFATWSPS | |
| | KARLHLQGRSNAWRPQVNNPKEWLQVDFQKTMKVTGVTTQGVKSLLTSMYVK | |
| | EFLISSSQDGHQWTLFFQNGKVKVFQGNQDSFTPVVNSLDPPLLTRYLRIHPQSW | |
| | VHQIALRMEVLGCEAQDLY | |
| FVIII | MQIELSTCFFLCLLRFCFSATRRYYLGAVELSWDYMQSDLGELPVDARFPPRVPK | 13 |
| BDD-8 | SFPFNTSVVYKKTLFVEFTDHLFNIAKPRPPWMGLLGPTIQAEVYDTVVITLKNM | |
| precursor | ASHPVSLHAVGVSYWKASEGAEYDDQTSQREKEDDKVFPGGSHTYVWQVLKEN | |
| (U.S. Pat. | GPMASDPLCLTYSYLSHVDLVKDLNSGLIGALLVCREGSLAKEKTQTLHKFILLF | |
| No. | AVFDEGKSWHSETKNSLMQDRDAASARAWPKMHTVNGYVNRSLPGLIGCHRKS | |
| 6,818,439 | VYWHVIGMGTTPEVHSIFLEGHTFLVRNHRQASLEISPITFLTAQTLLMDLGQFLL | |
| SEQ ID | FCHISSHQHDGMEAYVKVDSCPEEPQLRMKNNEEAEDYDDDLTDSEMDVVRFD | |
| NO: 47) | DDNSPSFIQIRSVAKKHPKTWVHYIAAEEEDWDYAPLVLAPDDRSYKSQYLNNG | |
| | PQRIGRKYKKVRFMAYTDETFKTREAIQHESGILGPLLYGEVGDTLLIIFKNQASR | |
| | PYNIYPHGITDVRPLYSRRLPKGVKHLKDFPILPGEIFKYKWTVTVEDGPTKSDPR | |
| | CLTRYYSSFVNMERDLASGLIGPLLICYKESVDQRGNQIMSDKRNVILFSVFDENR | |
| | SWYLTENIQRFLPNPAGVQLEDPEFQASNIMHSINGYVFDSLQLSVCLHEVAYWY | |
| | ILSIGAQTDFLSVFFSGYTFKHKMVYEDTLTLFPFSGETVFMSMENPGLWILGCHN | |
| | SDFRNRGMTALLKVSSCDKNTGDYYEDSYEDISAYLLSKNNAIEPRSFSQNPPVL | |
| | KRHQREITRTTLQSDQEEIDYDDTISVEMKKEDFDIYDEDENQSPRSFQKKTRHYF | |
| | IAAVERLWDYGMSSSPHVLRNRAQSGSVPQFKKVVFQEFTDGSFTQPLYRGELNE | |
| | HLGLLGPYIRAEVEDNIMVTFRNQASRPYSFYSSLISYEEDQRQGAEPRKNFVKPN | |
| | ETKTYFWKVQHHMAPTKDEFDCKAWAYFSDVDLEKDVHSGLIGPLLVCHTNTL | |
| | NPAHGRQVTVQEFALFFTIFDETKSWYFTENMERNCRAPCNIQMEDPTFKENYRF | |
| | HAINGYIMDTLPGLVMAQDQRIRWYLLSMGSNENIHSIHFSGHVFTVRKKEEYK | |
| | MALYNLYPGVFETVEMLPSKAGIWRVECLIGEHLHAGMSTLFLVYSNKCQTPLG | |
| | MASGHIRDFQITASGQYGQWAPKLARLHYSGSINAWSTKEPFSWIKVDLLAPMII | |
| | HGIKTQGARQKFSSLYISQFIIMYSLDGKKWQTYRGNSTGTLMVFFGNVDSSGIK | |
| | HNIFNPPIIARYIRLHPTHYSIRSTLRMELMGCDLNSCSMPLGMESKAISDAQITASS | |
| | YFTNMFATWSPSKARLHLQGRSNAWRPQVNNPKEWLQVDFQKTMKVTGVTTQ | |
| | GVKSLLTSMYVKEFLISSSQDGHQWTLFFQNGKVKVFQGNQDSFTPVVNSLDPPL | |
| | LTRYLRIHPQSWVHQIALRMEVLGCEAQDLY | |
| FVIII | ATRRYYLGAVELSWDYMQSDLGELPVDARFPPRVPKSFPFNTSVVYKKTLFVEFT | 14 |
| BDD-9 | DHLFNIAKPRPPWMGLLGPTIQAEVYDTVVITLKNMASHPVSLHAVGVSYWKAS | |
| mature | EGAEYDDQTSQREKEDDKVFPGGSHTYVWQVLKENGPMASDPLCLTYSYLSHV | |
| (U.S. Pat. | DLVKDLNSGLIGALLVCREGSLAKEKTQTLHKFILLFAVFDEGKSWHSETKNSLM | |
| No. | QDRDAASARAWPKMHTVNGYVNRSLPGLIGCHRKSVYWHVIGMGTTPEVHSIFL | |
| 6,818,439) | EGHTFLVRNHRQASLEISPITFLTAQTLLMDLGQFLLFCHISSHQHDGMEAYVKV | |
| | DSCPEEPQLRMKNNEEAEDYDDDLTDSEMDVVRFDDDNSPSFIQIRSVAKKHPKT | |
| | WVHYIAAEEEDWDYAPLVLAPDDRSYKSQYLNNGPQRIGRKYKKVRFMAYTDE | |
| | TFKTREAIQHESGILGPLLYGEVGDTLLIIFKNQASRPYNIYPHGITDVRPLYSRRLP | |
| | KGVKHLKDFPILPGEIFKYKWTVTVEDGPTKSDPRCLTRYYSSFVNMERDLASGL | |
| | IGPLLICYKESVDQRGNQIMSDKRNVILFSVFDENRSWYLTENIQRFLPNPAGVQL | |
| | EDPEFQASNIMHSINGYVFDSLQLSVCLHEVAYWYILSIGAQTDFLSVFFSGYTFK | |
| | HKMVYEDTLTLFPFSGETVFMSMENPGLWILGCHNSDFRNRGMTALLKVSSCDK | |
| | NTGDYYEDSYEDISAYLLSKNNAIEPRSFSQNPPVLKRHQREITRTTLQSDQEEIDY | |
| | DDTISVEMKKEDFDIYDEDENQSPRSFQKKTRHYFIAAVERLWDYGMSSSPHVLR | |
| | NRAQSGSVPQFKKVVFQEFTDGSFTQPLYRGELNEHLGLLGPYIRAEVEDNIMVT | |
| | FRNQASRPYSFYSSLISYEEDQRQGAEPRKNFVKPNETKTYFWKVQHHMAPTKD | |
| | EFDCKAWAYFSDVDLEKDVHSGLIGPLLVCHTNTLNPAHGRQVTVQEFALFFTIF | |
| | DETKSWYFTENMERNCRAPCNIQMEDPTFKENYRFHAINGYIMDTLPGLVMAQD | |
| | QRIRWYLLSMGSNENIHSIHFSGHVFTVRKKEEYKMALYNLYPGVFETVEMLPSK | |
| | AGIWRVECLIGEHLHAGMSTLFLVYSNKCQTPLGMASGHIRDFQITASGQYGQW | |
| | APKLARLHYSGSINAWSTKEPFSWIKVDLLAPMIIHGIKTQGARQKFSSLYISQFII | |
| | MYSLDGKKWQTYRGNSTGTLMVFFGNVDSSGIKHNIFNPPIIARYIRLHPTHYSIR | |
| | STLRMELMGCDLNSCSMPLGMESKAISDAQITASSYFTNMFATWSPSKARLHLQ | |
| | GRSNAWRPQVNNPKEWLQVDFQKTMKVTGVTTQGVKSLLTSMYVKEFLISSSQ | |
| | DGHQWTLFFQNGKVKVFQGNQDSFTPVVNSLDPPLLTRYLRIHPQSWVHQIALR | |
| | MEVLGCEAQDLY | |
| FVIII | ATRRYYLGAVELSWDYMQSDLGELPVDARFPPRVPKSFPFNTSVVYKKTLFVEFT | 15 |
| BDD-10 | DHLFNIAKPRPPWMGLLGPTIQAEVYDTVVITLKNMASHPVSLHAVGVSYWKAS | |
| | EGAEYDDQTSQREKEDDKVFPGGSHTYVWQVLKENGPMASDPLCLTYSYLSHV | |
| | DLVKDLNSGLIGALLVCREGSLAKEKTQTLHKFILLFAVFDEGKSWHSETKNSLM | |
| | QDRDAASARAWPKMHTVNGYVNRSLPGLIGCHRKSVYWHVIGMGTTPEVHSIFL | |
| | EGHTFLVRNHRQASLEISPITFLTAQTLLMDLGQFLLFCHISSHQHDGMEAYVKV | |
| | DSCPEEPQLRMKNNEEAEDYDDDLTDSEMDVVRFDDDNSPSFIQIRSVAKKHPKT | |
| | WVHYIAAEEEDWDYAPLVLAPDDRSYKSQYLNNGPQRIGRKYKKVRFMAYTDE | |
| | TFKTREAIQHESGILGPLLYGEVGDTLLIIFKNQASRPYNIYPHGITDVRPLYSRRLP | |
| | KGVKHLKDFPILPGEIFKYKWTVTVEDGPTKSDPRCLTRYYSSFVNMERDLASGL | |
| | IGPLLICYKESVDQRGNQIMSDKRNVILFSVFDENRSWYLTENIQRFLPNPAGVQL | |
| | EDPEFQASNIMHSINGYVFDSLQLSVCLHEVAYWYILSIGAQTDFLSVFFSGYTFK | |
| | HKMVYEDTLTLFPFSGETVFMSMENPGLWILGCHNSDFRNRGMTALLKVSSCDK | |
| | NTGDYYEDSYEDISAYLLSKNNAIEPRSFSQNPPVLKRHQAEITRTTLQSDQEEIDY | |
| | DDTISVEMKKEDFDIYDEDENQSPRSFQKKTRHYFIAAVERLWDYGMSSSPHVLR | |
| | NRAQSGSVPQFKKVVFQEFTDGSFTQPLYRGELNEHLGLLGPYIRAEVEDNIMVT | |
| | FRNQASRPYSFYSSLISYEEDQRQGAEPRKNFVKPNETKTYFWKVQHHMAPTKD | |
| | EFDCKAWAYFSDVDLEKDVHSGLIGPLLVCHTNTLNPAHGRQVTVQEFALFFTIF | |
| | DETKSWYFTENMERNCRAPCNIQMEDPTFKENYRFHAINGYIMDTLPGLVMAQD | |
| | QRIRWYLLSMGSNENIHSIHFSGHVFTVRKKEEYKMALYNLYPGVFETVEMLPSK | |
| | AGIWRVECLIGEHLHAGMSTLFLVYSNKCQTPLGMASGHIRDFQITASGQYGQW | |
| | APKLARLHYSGSINAWSTKEPFSWIKVDLLAPMIIHGIKTQGARQKFSSLYISQFII | |
| | MYSLDGKKWQTYRGNSTGTLMVFFGNVDSSGIKHNIFNPPIIARYIRLHPTHYSIR | |
| | STLRMELMGCDLNSCSMPLGMESKAISDAQITASSYFTNMFATWSPSKARLHLQ | |
| | GRSNAWRPQVNNPKEWLQVDFQKTMKVTGVTTQGVKSLLTSMYVKEFLISSSQ | |
| | DGHQWTLFFQNGKVKVFQGNQDSFTPVVNSLDPPLLTRYLRIHPQSWVHQIALR | |
| | MEVLGCEAQDLY | |
| FVIII | ATRATRRYYLGAVELSWDYMQSDLGELPVDARFPPRVPKSFPFNTSVVYKKTLF | 16 |
| BDD-11 | VEFTDHLFNIAKPRPPWMGLLGPTIQAEVYDTVVITLKNMASHPVSLHAVGVSY | |
| | WKASEGAEYDDQTSQREKEDDKVFPGGSHTYVWQVLKENGPMASDPLCLTYSY | |
| | LSHVDLVKDLNSGLIGALLVCREGSLAKEKTQTLHKFILLFAVFDEGKSWHSETK | |
| | NSLMQDRDAASARAWPKMHTVNGYVNRSLPGLIGCHRKSVYWHVIGMGTTPEV | |
| | HSIFLEGHTFLVRNHRQASLEISPITFLTAQTLLMDLGQFLLFCHISSHQHDGMEAY | |
| | VKVDSCPEEPQLRMKNNEEAEDYDDDLTDSEMDVVRFDDDNSPSFIQIRSVAKK | |
| | HPKTWVHYIAAEEEDWDYAPLVLAPDDRSYKSQYLNNGPQRIGRKYKKVRFMA | |
| | YTDETFKTREAIQHESGILGPLLYGEVGDTLLIIFKNQASRPYNIYPHGITDVRPLYS | |
| | RRLPKGVKHLKDFPILPGEIFKYKWTVTVEDGPTKSDPRCLTRYYSSFVNMERDL | |
| | ASGLIGPLLICYKESVDQRGNQIMSDKRNVILFSVFDENRSWYLTENIQRFLPNPA | |
| | GVQLEDPEFQASNIMHSINGYVFDSLQLSVCLHEVAYWYILSIGAQTDFLSVFFSG | |
| | YTFKHKMVYEDTLTLFPFSGETVFMSMENPGLWILGCHNSDFRNRGMTALLKVS | |
| | SCDKNTGDYYEDSYEDISAYLLSKNNAIEPRSFSQNPPVLKRHQAEITRTTLQSDQ | |
| | EEIDYDDTISVEMKKEDFDIYDEDENQSPRSFQKKTRHYFIAAVERLWDYGMSSS | |
| | PHVLRNRAQSGSVPQFKKVVFQEFTDGSFTQPLYRGELNEHLGLLGPYIRAEVED | |
| | NIMVTFRNQASRPYSFYSSLISYEEDQRQGAEPRKNFVKPNETKTYFWKVQHHM | |
| | APTKDEFDCKAWAYFSDVDLEKDVHSGLIGPLLVCHTNTLNPAHGRQVTVQEFA | |
| | LFFTIFDETKSWYFTENMERNCRAPCNIQMEDPTFKENYRFHAINGYIMDTLPGLV | |
| | MAQDQRIRWYLLSMGSNENIHSIHFSGHVFTVRKKEEYKMALYNLYPGVFETVE | |
| | MLPSKAGIWRVECLIGEHLHAGMSTLFLVYSNKCQTPLGMASGHIRDFQITASGQ | |
| | YGQWAPKLARLHYSGSINAWSTKEPFSWIKVDLLAPMIIHGIKTQGARQKFSSLYI | |
| | SQFIIMYSLDGKKWQTYRGNSTGTLMVFFGNVDSSGIKHNIFNPPIIARYIRLHPTH | |
| | YSIRSTLRMELMGCDLNSCSMPLGMESKAISDAQITASSYFTNMFATWSPSKARL | |
| | HLQGRSNAWRPQVNNPKEWLQVDFQKTMKVTGVTTQGVKSLLTSMYVKEFLIS | |
| | SSQDGHQWTLFFQNGKVKVFQGNQDSFTPVVNSLDPPLLTRYLRIHPQSWVHQIA | |
| | LRMEVLGCEAQDLY | |
| FVIII | ATRRYYLGAVELSWDYMQSDLGELPVDARFPPRVPKSFPFNTSVVYKKTLFVEFT | 17 |
| BDD-12 | DHLFNIAKPRPPWMGLLGPTIQAEVYDTVVITLKNMASHPVSLHAVGVSYWKAS | |
| | EGAEYDDQTSQREKEDDKVFPGGSHTYVWQVLKENGPMASDPLCLTYSYLSHV | |
| | DLVKDLNSGLIGALLVCREGSLAKEKTQTLHKFILLFAVFDEGKSWHSETKNSLM | |
| | QDRDAASARAWPKMHTVNGYVNRSLPGLIGCHRKSVYWHVIGMGTTPEVHSIFL | |
| | EGHTFLVRNHRQASLEISPITFLTAQTLLMDLGQFLLFCHISSHQHDGMEAYVKV | |
| | DSCPEEPQLRMKNNEEAEDYDDDLTDSEMDVVRFDDDNSPSFIQIRSVAKKHPKT | |
| | WVHYIAAEEEDWDYAPLVLAPDDRSYKSQYLNNGPQRIGRKYKKVRFMAYTDE | |
| | TFKTREAIQHESGILGPLLYGEVGDTLLIIFKNQASRPYNIYPHGITDVRPLYSRRLP | |
| | KGVKHLKDFPILPGEIFKYKWTVTVEDGPTKSDPRCLTRYYSSFVNMERDLASGL | |
| | IGPLLICYKESVDQRGNQIMSDKRNVILFSVFDENRSWYLTENIQRFLPNPAGVQL | |
| | EDPEFQASNIMHSINGYVFDSLQLSVCLHEVAYWYILSIGAQTDFLSVFFSGYTFK | |
| | HKMVYEDTLTLFPFSGETVFMSMENPGLWILGCHNSDFRNRGMTALLKVSSCDK | |
| | NTGDYYEDSYEDISAYLLSKNNAIEPRSFSQNPPVLKRHQAEITRTTLQSDQEEIDY | |
| | DDTISVEMKKEDFDIFDEDENQSPRSFQKKTRHYFIAAVERLWDYGMSSSPHVLR | |
| | NRAQSGSVPQFKKVVFQEFTDGSFTQPLYRGELNEHLGLLGPYIRAEVEDNIMVT | |
| | FRNQASRPYSFYSSLISYEEDQRQGAEPRKNFVKPNETKTYFWKVQHHMAPTKD | |
| | EFDCKAWAYFSDVDLEKDVHSGLIGPLLVCHTNTLNPAHGRQVTVQEFALFFTIF | |
| | DETKSWYFTENMERNCRAPCNIQMEDPTFKENYRFHAINGYIMDTLPGLVMAQD | |
| | QRIRWYLLSMGSNENIHSIHFSGHVFTVRKKEEYKMALYNLYPGVFETVEMLPSK | |
| | AGIWRVECLIGEHLHAGMSTLFLVYSNKCQTPLGMASGHIRDFQITASGQYGQW | |
| | APKLARLHYSGSINAWSTKEPFSWIKVDLLAPMIIHGIKTQGARQKFSSLYISQFII | |
| | MYSLDGKKWQTYRGNSTGTLMVFFGNVDSSGIKHNIFNPPIIARYIRLHPTHYSIR | |
| | STLRMELMGCDLNSCSMPLGMESKAISDAQITASSYFTNMFATWSPSKARLHLQ | |
| | GRSNAWRPQVNNPKEWLQVDFQKTMKVTGVTTQGVKSLLTSMYVKEFLISSSQ | |
| | DGHQWTLFFQNGKVKVFQGNQDSFTPVVNSLDPPLLTRYLRIHPQSWVHQIALR | |
| | MEVLGCEAQDLY | |
| FVIII | ATRRYYLGAVELSWDYMQSDLGELPVDARFPPRVPKSFPFNTSVVYKKTLFVEFT | 18 |
| BDD-13 | DHLFNIAKPRPPWMGLLGPTIQAEVYDTVVITLKNMASHPVSLHAVGVSYWKAS | |
| | EGAEYDDQTSQREKEDDKVFPGGSHTYVWQVLKENGPMASDPLCLTYSYLSHV | |
| | DLVKDLNSGLIGALLVCREGSLAKEKTQTLHKFILLFAVFDEGKSWHSETKNSLM | |
| | QDRDAASARAWPKMHTVNGYVNRSLPGLIGCHRKSVYWHVIGMGTTPEVHSIFL | |
| | EGHTFLVRNHRQASLEISPITFLTAQTLLMDLGQFLLFCHISSHQHDGMEAYVKV | |
| | DSCPEEPQLRMKNNEEAEDYDDDLTDSEMDVVRFDDDNSPSFIQIRSVAKKHPKT | |
| | WVHYIAAEEEDWDYAPLVLAPDDRSYKSQYLNNGPQRIGRKYKKVRFMAYTDE | |
| | TFKTREAIQHESGILGPLLYGEVGDTLLIIFKNQASRPYNIYPHGITDVRPLYSRRLP | |
| | KGVKHLKDFPILPGEIFKYKWTVTVEDGPTKSDPRCLTRYYSSFVNMERDLASGL | |
| | IGPLLICYKESVDQRGNQIMSDKRNVILFSVFDENRSWYLTENIQRFLPNPAGVQL | |
| | EDPEFQASNIMHSINGYVFDSLQLSVCLHEVAYWYILSIGAQTDFLSVFFSGYTFK | |
| | HKMVYEDTLTLFPFSGETVFMSMENPGLWILGCHNSDFRNRGMTALLKVSSCDK | |
| | NTGDYYEDSYEDISAYLLSKNNAIEPRSFSQNPPVLKRHQREITRTTLQSDQEEIDY | |
| | DDTISVEMKKEDFDIFDEDENQSPRSFQKKTRHYFIAAVERLWDYGMSSSPHVLR | |
| | NRAQSGSVPQFKKVVFQEFTDGSFTQPLYRGELNEHLGLLGPYIRAEVEDNIMVT | |
| | FRNQASRPYSFYSSLISYEEDQRQGAEPRKNFVKPNETKTYFWKVQHHMAPTKD | |
| | EFDCKAWAYFSDVDLEKDVHSGLIGPLLVCHTNTLNPAHGRQVTVQEFALFFTIF | |
| | DETKSWYFTENMERNCRAPCNIQMEDPTFKENYRFHAINGYIMDTLPGLVMAQD | |
| | QRIRWYLLSMGSNENIHSIHFSGHVFTVRKKEEYKMALYNLYPGVFETVEMLPSK | |
| | AGIWRVECLIGEHLHAGMSTLFLVYSNKCQTPLGMASGHIRDFQITASGQYGQW | |
| | APKLARLHYSGSINAWSTKEPFSWIKVDLLAPMIIHGIKTQGARQKFSSLYISQFII | |
| | MYSLDGKKWQTYRGNSTGTLMVFFGNVDSSGIKHNIFNPPIIARYIRLHPTHYSIR | |
| | STLRMELMGCDLNSCSMPLGMESKAISDAQITASSYFTNMFATWSPSKARLHLQ | |
| | GRSNAWRPQVNNPKEWLQVDFQKTMKVTGVTTQGVKSLLTSMYVKEFLISSSQ | |
| | DGHQWTLFFQNGKVKVFQGNQDSFTPVVNSLDPPLLTRYLRIHPQSWVHQIALR | |
| | MEVLGCEAQDLY | |

[0169] The present invention also contemplates CFXTEN comprising FVIII with various amino acid deletions, insertions and substitutions made in the FVIII sequences of Table 1 that retain procoagulant activity. Examples of conservative substitutions for amino acids in polypeptide sequences are shown in Table 2. In embodiments of the CFXTEN in which the sequence identity of the FVIII is less than 100% compared to a specific sequence disclosed herein, the invention contemplates substitution of any of the other 19 natural L-amino acids for a given amino acid residue of the given FVIII, which may be at any position within the sequence of the FVIII, including adjacent amino acid residues. If any one substitution results in an undesirable change in procoagulant activity, then one of the alternative amino acids can be employed and the construct protein evaluated by the methods described herein (e.g., the assays of Table 49), or using any of the techniques and guidelines for conservative and non-conservative mutations set forth, for instance, in U.S. Pat. No. 5,364,934, the content of which is incorporated by reference in its entirety, or using methods generally known in the art. In a preferred substitution, the FVIII component of the CFXTEN embodiments is modified by replacing the R1648 residue (numbered relative to the native mature form of FVIII) with glycine or alanine to prevent proteolytic processing to the heterodimer form. In another substitution, the FVIII component of the CFXTEN embodiments is modified by replacing the Y1680 residue (numbered relative to the native mature form of FVIII) with phenylalanine. In another embodiment, the FVIII component of the CFXTEN embodiments is modified by replacing the Y1680 residue (numbered relative to the native mature form of FVIII) with phenylalanine and the R1648 residue (numbered relative to the native mature form of FVIII) with glycine or alanine.

[0170] In one embodiment, the FVIII of the fusion protein composition has one or more amino acid substitutions designed to reduce the binding of FVIII inhibitors at epitopes recognized by the antibodies of Table 9, including but not limited to substitutions at Lys(377), Lys(466), Lys(380), Ser(488), Arg(489), Arg(490), Leu(491), Lys(493), Lys(496), His(497), Lys(499), Lys(512), Lys(523), Lys(556), Met (2199), Phe(2200), Leu(2252), Val(2223), and Lys(2227). In addition, variants can include, for instance, polypeptides wherein one or more amino acid residues are added or deleted at or near the N- or C-terminus of the full-length native amino acid sequence or of a domain of a FVIII so long as the variant retains some if not all of the procoagulant activity of the native peptide. The resulting FVIII sequences that retain at least a portion (e.g., at least 10%, 20%, 30%, 40%, 50%, 60%, 70%, 80%, 90%, or at least 95% or more) of the procoagulant activity in comparison to native circulating FVIII are considered useful for the fusion protein compositions of this invention. Examples of FVIII variants are known in the art, including those described in U.S. Pat. Nos. 6,316,226; 6,818,439; 7,632,921; 20080227691, which are incorporated herein by reference. In one embodiment, a FVIII sequence variant has an aspartic acid substituted for valine at amino acid position 75 (numbered relative to the native mature form of FVIII).

TABLE 2
Exemplary conservative
amino acid substitutions

| Original | |
|---|---|
| Residue | Exemplary Substitutions |
| Ala (A) | val; leu; ile |
| Arg (R) | lys; gln; asn |
| Asn (N) | gin; his; lys; arg |
| Asp (D) | Glu |
| Cys (C) | Ser |
| Gln (Q) | Asn |
| Glu (E) | Asp |
| Gly (G) | Pro |
| His (H) | asn: gin: lys: arg |
| Ile (I) | leu; val; met; ala; phe: norleucine |
| Leu (L) | norleucine: ile: val; met; ala: phe |
| Lys (K) | arg: gin: asn |
| Met (M) | leu; phe; ile |
| Phe (F) | leu: val: ile; ala |
| Pro (P) | Gly |
| Ser (S) | Thr |
| Thr (T) | Ser |
| Trp (W) | Tyr |
| Tyr(Y) | Trp: phe: thr: ser |
| Val (V) | Ile; leu; met; phe; ala; norleucine |

### III). Extended Recombinant Polypeptides

[0171] In one aspect, the invention provides XTEN polypeptide compositions that are useful as fusion protein partner(s) to link to and/or incorporate within a FVIII polypeptide, resulting in a CFXTEN fusion protein. XTEN are generally polypeptides with non-naturally occurring, substantially non-repetitive sequences having a low degree of or no secondary or tertiary structure under physiologic conditions. XTEN typically have from about 36 to about 3000 amino acids of which the majority or the entirety are small hydrophilic amino acids. As used herein, “XTEN” specifically excludes whole antibodies or antibody fragments (e.g. single-chain antibodies and Fc fragments). XTEN polypeptides have utility as a fusion protein partners in that they serve various roles, conferring certain desirable pharmacokinetic, physicochemical, pharmacologic, and pharmaceutical properties when linked to a FVIII protein to a create a CFXTEN fusion protein. Such CFXTEN fusion protein compositions have enhanced properties compared to the corresponding FVIII not linked to XTEN, making them useful in the treatment of certain conditions related to FVIII deficiencies or bleeding disorders, as more fully described below.

[0172] The selection criteria for the XTEN to be fused to the FVIII proteins used to create the inventive fusion proteins compositions generally relate to attributes of physical/chemical properties and conformational structure of the XTEN that is, in turn, used to confer enhanced pharmaceutical, pharmacologic, and pharmacokinetic properties to the FVIII fusion proteins compositions. The unstructured characteristic and physical/chemical properties of the XTEN result, in part, from the overall amino acid composition disproportionately limited to 4-6 hydrophilic amino acids, the linking of the amino acids in a quantifiable non-repetitive design, and the length of the XTEN polypeptide. In an advantageous feature common to XTEN but uncommon to polypeptides, the properties of XTEN disclosed herein are not tied to absolute primary amino acid sequences, as evidenced by the diversity of the exemplary sequences of Table 4 that, within varying ranges of length, possess similar properties, many of which are documented in the Examples. The XTEN of the present invention may exhibit one or more, or all of the following advantageous properties: unstructured conformation, conformational flexibility, enhanced aqueous solubility, high degree of protease resistance, low immunogenicity, low binding to mammalian receptors, a defined degree of charge, and increased hydrodynamic (or Stokes) radii; properties that can make them particularly useful as fusion protein partners. Non-limiting examples of the enhanced properties that XTEN confer on the fusion proteins comprising FVIII fused to XTEN, compared to FVIII not linked to XTEN, include increases in the overall solubility and/or metabolic stability, reduced susceptibility to proteolysis, reduced immunogenicity, reduced rate of absorption when administered subcutaneously or intramuscularly, reduced binding to FVIII clearance receptors, reduced reactivity to anti-payload antibodies, enhanced interactions with substrate, and/or enhanced pharmacokinetic properties when administered to a subject. The enhanced pharmacokinetic properties of the CFXTEN compositions compared to FVIII not linked to XTEN include longer terminal half-life (e.g., two-fold, three-fold, four-fold or more), increased area under the curve (AUC) (e.g., 25%, 50%, 100% or more), lower volume of distribution, and enhanced absorption after subcutaneous or intramuscular injection (an advantage compared to commercially-available forms of FVIII that must be administered intravenously). In addition, it is believed that the CFXTEN compositions comprising cleavage sequences (described more fully, below) permit sustained release of biologically active FVIII, such that the administered CFXTEN acts as a depot. It is specifically contemplated that the inventive CFXTEN fusion proteins can exhibit one or more or any combination of the improved properties disclosed herein. As a result of these enhanced properties, it is believed that CFXTEN compositions permit less frequent dosing compared to FVIII not linked to XTEN when administered at comparable dosages. Such CFXTEN fusion protein compositions have utility to treat certain factor VIII-related conditions, as described herein.

[0173] A variety of methods and assays are known in the art for determining the physical/chemical properties of proteins such as the CFXTEN compositions comprising XTEN. Such properties include but are not limited to secondary or tertiary structure, solubility, protein aggregation, stability, absolute and apparent molecular weight, purity and uniformity, melting properties, contamination and water content. Methods to assay these properties include analytical centrifugation, EPR, HPLC-ion exchange, HPLC-size exclusion, HPLC-reverse phase, light scattering, capillary electrophoresis, circular dichroism, differential scanning calorimetry, fluorescence, HPLC-ion exchange, HPLC-size exclusion, IR, NMR, Raman spectroscopy, refractometry, and UV/Visible spectroscopy. Additional methods are disclosed in Arnau, et al., Prot Expr and Purif (2006) 48, 1-13.

[0174] The XTEN component(s) of the CFXTEN are designed to behave like denatured peptide sequences under physiological conditions, despite the extended length of the polymer. “Denatured” describes the state of a peptide in solution that is characterized by a large conformational freedom of the peptide backbone. Most peptides and proteins adopt a denatured conformation in the presence of high concentrations of denaturants or at elevated temperature. Peptides in denatured conformation have, for example, characteristic circular dichroism (CD) spectra and are characterized by a lack of long-range interactions as determined by NMR. “Denatured conformation” and “unstructured conformation” are used synonymously herein. In some embodiments, the invention provides XTEN sequences that, under physiologic conditions, are largely devoid of secondary structure. In other cases, the XTEN sequences are substantially devoid of secondary structure under physiologic conditions such that the XTEN can adopt random coil conformation. “Largely devoid,” as used in this context, means that at least 50% of the XTEN amino acid residues of the XTEN sequence do not contribute to secondary structure as measured or determined by the means described herein. “Substantially devoid,” as used in this context, means that at least about 60%, or about 70%, or about 80%, or about 90%, or about 95%, or at least about 99% of the XTEN amino acid residues of the XTEN sequence do not contribute to secondary structure, as measured or determined by the methods described herein.

[0175] A variety of methods have been established in the art to discern the presence or absence of secondary and tertiary structures in a given polypeptide. In particular, secondary structure can be measured spectrophotometrically, e.g., by circular dichroism spectroscopy in the “far-UV” spectral region (190-250 nm). Secondary structure elements, such as alpha-helix and beta-sheet, each give rise to a characteristic shape and magnitude of CD spectra, as does the lack of these structure elements. Secondary structure can also be predicted for a polypeptide sequence via certain computer programs or algorithms, such as the well-known Chou-Fasman algorithm (Chou, P. Y., et al. (1974) Biochemistry, 13: 222-45) and the Garnier-Osguthorpe-Robson (“GOR”) algorithm (Garnier J, Gibrat J F, Robson B. (1996), GOR method for predicting protein secondary structure from amino acid sequence. Methods Enzymol 266:540-553), as described in US Patent Application Publication No. 20030228309A1. For a given sequence, the algorithms can predict whether there exists some or no secondary structure at all, expressed as the total and/or percentage of residues of the sequence that form, for example, alpha-helices or beta-sheets or the percentage of residues of the sequence predicted to result in random coil formation (which lacks secondary structure).

[0176] In one embodiment, the XTEN sequences used in the subject fusion protein compositions have an alpha-helix percentage ranging from 0% to less than about 5% as determined by the Chou-Fasman algorithm. In another embodiment, the XTEN sequences of the fusion protein compositions have a beta-sheet percentage ranging from 0% to less than about 5% as determined by the Chou-Fasman algorithm. In some embodiments, the XTEN sequences of the fusion protein compositions have an alpha-helix percentage ranging from 0% to less than about 5% and a beta-sheet percentage ranging from 0% to less than about 5% as determined by the Chou-Fasman algorithm. In some embodiments, the XTEN sequences of the fusion protein compositions have an alpha-helix percentage less than about 2% and a beta-sheet percentage less than about 2%. The XTEN sequences of the fusion protein compositions have a high degree of random coil percentage, as determined by the GOR algorithm. In some embodiments, an XTEN sequence have at least about 80%, at least about 90%, at least about 91%, at least about 92%, at least about 93%, at least about 94%, at least about 95%, at least about 96%, at least about 97%, at least about 98%, and most preferably at least about 99% random coil, as determined by the GOR algorithm. In some embodiments, the XTEN sequences of the fusion protein compositions have an alpha-helix percentage ranging from 0% to less than about 5% and a beta-sheet percentage ranging from 0% to less than about 5% as determined by the Chou-Fasman algorithm and at least about 90% random coil, as determined by the GOR algorithm. In other embodiments, the XTEN sequences of the fusion protein compositions have an alpha-helix percentage less than about 2% and a beta-sheet percentage less than about 2% at least about 90% random coil, as determined by the GOR algorithm.

### 1. Non-repetitive Sequences

[0177] It is contemplated that the XTEN sequences of the CFXTEN embodiments are substantially non-repetitive. In general, repetitive amino acid sequences have a tendency to aggregate or form higher order structures, as exemplified by natural repetitive sequences such as collagens and leucine zippers. These repetitive amino acids may also tend to form contacts resulting in crystalline or pseudocrystaline structures. In contrast, the low tendency of non-repetitive sequences to aggregate enables the design of long-sequence XTENs with a relatively low frequency of charged amino acids that would otherwise be likely to aggregate if the sequences were repetitive. The non-repetitiveness of a subject XTEN can be observed by assessing one or more of the following features. In one embodiment, a “substantially non-repetitive” XTEN sequence has about 36, or at least 72, or at least 96, or at least 144, or at least 288, or at least 400, or at least 500, or at least 600, or at least 700, or at least 800, or at least 864, or at least 900, or at least 1000, or at least 2000, to about 3000 or more amino acid residues, or has a length ranging from about 36 to about 3000, about 100 to about 500, about 500 to about 1000, about 1000 to about 3000 amino acids and residues, in which no three contiguous amino acids in the sequence are identical amino acid types unless the amino acid is serine, in which case no more than three contiguous amino acids are serine residues. In another embodiment, as described more fully below, a “substantially non-repetitive” XTEN sequence comprises motifs of 9 to 14 amino acid residues wherein the motifs consist of 4 to 6 types of amino acids selected from glycine (G), alanine (A), serine (S), threonine (T), glutamate (E) and proline (P), and wherein the sequence of any two contiguous amino acid residues in any one motif is not repeated more than twice in the sequence motif.

[0178] The degree of repetitiveness of a polypeptide or a gene can be measured by computer programs or algorithms or by other means known in the art. According to the current invention, algorithms to be used in calculating the degree of repetitiveness of a particular polypeptide, such as an XTEN, are disclosed herein, and examples of sequences analyzed by algorithms are provided (see Examples, below). In one aspect, the repetitiveness of a polypeptide of a predetermined length can be calculated (hereinafter “subsequence score”) according to the formula given by Equation 1:

$$Subsequence score \frac{{\sum }_{i = 1}^{m} {Count}_{i}}{m} \qquad I$$

[0179] wherein: m=(amino acid length of polypeptide)−(amino acid length of subsequence)+1; and Countᵢ=cumulative number of occurrences of each unique subsequence within sequenceᵢ

[0180] An algorithm termed “SegScore” was developed to apply the foregoing equation to quantitate repetitiveness of polypeptides, such as an XTEN, providing the subsequence score wherein sequences of a predetermined amino acid length “n” are analyzed for repetitiveness by determining the number of times (a “count”) a unique subsequence of length “s” appears in the set length, divided by the absolute number of subsequences within the predetermined length of the sequence. FIG. 27 depicts a logic flowchart of the SegScore algorithm, while FIG. 28 portrays a schematic of how a subsequence score is derived for a fictitious XTEN with 11 amino acids and a subsequence length of 3 amino acid residues. For example, a predetermined polypeptide length of 200 amino acid residues has 192 overlapping 9-amino acid subsequences and 198 3-mer subsequences, but the subsequence score of any given polypeptide will depend on the absolute number of unique subsequences and how frequently each unique subsequence (meaning a different amino acid sequence) appears in the predetermined length of the sequence.

[0181] In the context of the present invention, “subsequence score” means the sum of occurrences of each unique 3-mer frame across 200 consecutive amino acids of the cumulative XTEN polypeptide divided by the absolute number of unique 3-mer subsequences within the 200 amino acid sequence. Examples of such subsequence scores derived from 200 consecutive amino acids of repetitive and non-repetitive polypeptides are presented in Example 45. In one embodiment, the invention provides a CFXTEN comprising one XTEN in which the XTEN has a subsequence score less than 12, more preferably less than 10, more preferably less than 9, more preferably less than 8, more preferably less than 7, more preferably less than 6, and most preferably less than 5. In another embodiment, the invention provides CFXTEN comprising at least two to about six XTEN in which 200 amino acids of the XTEN have a subsequence score of less than 10, more preferably less than 9, more preferably less than 8, more preferably less than 7, more preferably less than 6, and most preferably less than 5. In the embodiments of the CFXTEN fusion protein compositions described herein, an XTEN component of a fusion protein with a subsequence score of 10 or less (i.e., 9, 8, 7, etc.) is also substantially non-repetitive.

[0182] It is believed that the non-repetitive characteristic of XTEN of the present invention together with the particular types of amino acids that predominate in the XTEN, rather than the absolute primary sequence, confers many of the enhanced physicochemical and biological properties of the CFXTEN fusion proteins. These enhanced properties include a higher degree of expression of the fusion protein in the host cell, greater genetic stability of the gene encoding XTEN, a greater degree of solubility, less tendency to aggregate, and enhanced pharmacokinetics of the resulting CFXTEN compared to fusion proteins comprising polypeptides having repetitive sequences. These enhanced properties permit more efficient manufacturing, lower cost of goods, and facilitate the formulation of XTEN-comprising pharmaceutical preparations containing extremely high protein concentrations, in some cases exceeding 100 mg/ml. Furthermore, the XTEN polypeptide sequences of the embodiments are designed to have a low degree of internal repetitiveness in order to reduce or substantially eliminate immunogenicity when administered to a mammal. Polypeptide sequences composed of short, repeated motifs largely limited to only three amino acids, such as glycine, serine and glutamate, may result in relatively high antibody titers when administered to a mammal despite the absence of predicted T-cell epitopes in these sequences. This may be caused by the repetitive nature of polypeptides, as it has been shown that immunogens with repeated epitopes, including protein aggregates, cross-linked immunogens, and repetitive carbohydrates are highly immunogenic and can, for example, result in the cross-linking of B-cell receptors causing B-cell activation. (Johansson, J., et al. (2007) Vaccine, 25:1676-82; Yankai, Z., et al. (2006) Biochem Biophys Res Commun, 345:1365-71; Hsu, C. T., et al. (2000) Cancer Res, 60:3701-5); Bachmann M F, et al. Eur J Immunol. (1995) 25(12):3445-3451).

### 2. Exemplary Sequence Motifs

[0183] The present invention encompasses XTEN used as fusion partners that comprise multiple units of shorter sequences, or motifs, in which the amino acid sequences of the motifs are non-repetitive. The non-repetitive property is met despite the use of a “building block” approach using a library of sequence motifs that are multimerized to create the XTEN sequences. Thus, while an XTEN sequence may consist of multiple units of as few as four different types of sequence motifs, because the motifs themselves generally consist of non-repetitive amino acid sequences, the overall XTEN sequence is designed to render the sequence substantially non-repetitive.

[0184] In one embodiment, an XTEN has a substantially non-repetitive sequence of greater than about 36 to about 3000, or about 100 to about 2000, or about 144 to about 1000 amino acid residues, or even longer wherein at least about 80%, or at least about 85%, or at least about 90%, or at least about 95%, or at least about 97%, or about 100% of the XTEN sequence consists of non-overlapping sequence motifs, and wherein each of the motifs has about 9 to 36 amino acid residues. In other embodiments, at least about 80%, or at least about 85%, or at least about 90%, or at least about 95%, or at least about 97%, or about 100% of the XTEN sequence consists of non-overlapping sequence motifs wherein each of the motifs has 9 to 14 amino acid residues. In still other embodiments, at least about 80%, or at least about 85%, or at least about 90%, or at least about 95%, or at least about 97%, or about 100% of the XTEN sequence consists of non-overlapping sequence motifs wherein each of the motifs has 12 amino acid residues. In these embodiments, it is preferred that the sequence motifs are composed of substantially (e.g., 90% or more) or exclusively small hydrophilic amino acids, such that the overall sequence has an unstructured, flexible characteristic. Examples of amino acids that are included in XTEN are, e.g., arginine, lysine, threonine, alanine, asparagine, glutamine, aspartate, glutamate, serine, and glycine. As a result of testing variables such as codon optimization, assembly polynucleotides encoding sequence motifs, expression of protein, charge distribution and solubility of expressed protein, and secondary and tertiary structure, it was discovered that XTEN compositions with the enhanced characteristics disclosed herein mainly or exclusively include glycine (G), alanine (A), serine (S), threonine (T), glutamate (E) and proline (P) residues wherein the sequences are designed to be substantially non-repetitive. In one embodiment, XTEN sequences have predominately four to six types of amino acids selected from glycine (G), alanine (A), serine (S), threonine (T), glutamate (E) or proline (P) that are arranged in a substantially non-repetitive sequence that is greater than about 36 to about 3000, or about 100 to about 2000, or about 144 to about 1000 amino acid residues in length. In some embodiment, an XTEN sequence is made of 4, 5, or 6 types of amino acids selected from the group consisting of glycine (G), alanine (A), serine (S), threonine (T), glutamate (E) or proline (P). In some embodiments, XTEN have sequences of greater than about 36 to about 1000, or about 100 to about 2000, or about 400 to about 3000 amino acid residues wherein at least about 80% of the sequence consists of non-overlapping sequence motifs wherein each of the motifs has 9 to 36 amino acid residues and wherein at least 90%, or at least 91%, or at least 92%, or at least 93%, or at least 94%, or at least 95%, or at least 96%, or at least 97%, or 100% of each of the motifs consists of 4 to 6 types of amino acids selected from glycine (G), alanine (A), serine (S), threonine (T), glutamate (E) and proline (P), and wherein the content of any one amino acid type in the full-length XTEN does not exceed 30%. In other embodiments, at least about 90% of the XTEN sequence consists of non-overlapping sequence motifs wherein each of the motifs has 9 to 36 amino acid residues wherein the motifs consist of 4 to 6 types of amino acids selected from glycine (G), alanine (A), serine (S), threonine (T), glutamate (E) and proline (P), and wherein the content of any one amino acid type in the full-length XTEN does not exceed 40%, or about 30%, or 25%, or about 17%. In other embodiments, at least about 90% of the XTEN sequence consists of non-overlapping sequence motifs wherein each of the motifs has 12 amino acid residues consisting of 4 to 6 types of amino acids selected from glycine (G), alanine (A), serine (S), threonine (T), glutamate (E) and proline (P), and wherein the content of any one amino acid type in the full-length XTEN does not exceed 40%, or 30%, or about 25%. In yet other embodiments, at least about 90%, or about 91%, or about 92%, or about 93%, or about 94%, or about 95%, or about 96%, or about 97%, or about 98%, or about 99%, to about 100% of the XTEN sequence consists of non-overlapping sequence motifs wherein each of the motifs has 12 amino acid residues consisting of glycine (G), alanine (A), serine (S), threonine (T), glutamate (E) and proline (P).

[0185] In still other embodiments, XTENs comprise substantially non-repetitive sequences of greater than about 36 to about 3000 amino acid residues wherein at least about 80%, or at least about 90%, or about 91%, or about 92%, or about 93%, or about 94%, or about 95%, or about 96%, or about 97%, or about 98%, or about 99% of the sequence consists of non-overlapping sequence motifs of 9 to 14 amino acid residues wherein the motifs consist of 4 to 6 types of amino acids selected from glycine (G), alanine (A), serine (S), threonine (T), glutamate (E) and proline (P), and wherein the sequence of any two contiguous amino acid residues in any one motif is not repeated more than twice in the sequence motif. In other embodiments, at least about 90%, or about 91%, or about 92%, or about 93%, or about 94%, or about 95%, or about 96%, or about 97%, or about 98%, or about 99% of an XTEN sequence consists of non-overlapping sequence motifs of 12 amino acid residues wherein the motifs consist of four to six types of amino acids selected from glycine (G), alanine (A), serine (S), threonine (T), glutamate (E) and proline (P), and wherein the sequence of any two contiguous amino acid residues in any one sequence motif is not repeated more than twice in the sequence motif. In other embodiments, at least about 90%, or about 91%, or about 92%, or about 93%, or about 94%, or about 95%, or about 96%, or about 97%, or about 98%, or about 99% of an XTEN sequence consists of non-overlapping sequence motifs of 12 amino acid residues wherein the motifs consist of glycine (G), alanine (A), serine (S), threonine (T), glutamate (E) and proline (P), and wherein the sequence of any two contiguous amino acid residues in any one sequence motif is not repeated more than twice in the sequence motif. In yet other embodiments, XTENs consist of 12 amino acid sequence motifs wherein the amino acids are selected from glycine (G), alanine (A), serine (S), threonine (T), glutamate (E) and proline (P), and wherein the sequence of any two contiguous amino acid residues in any one sequence motif is not repeated more than twice in the sequence motif, and wherein the content of any one amino acid type in the full-length XTEN does not exceed 30%. The foregoing embodiments are examples of substantially non-repetitive XTEN sequences. Additional examples are detailed below.

[0186] In some embodiments, the invention provides CFXTEN compositions comprising one, or two, or three, or four, five, six or more non-repetitive XTEN sequence(s) of about 36 to about 1000 amino acid residues, or cumulatively about 100 to about 3000 amino acid residues wherein at least about 80%, or at least about 90%, or about 91%, or about 92%, or about 93%, or about 94%, or about 95%, or about 96%, or about 97%, or about 98%, or about 99% to about 100% of the sequence consists of multiple units of four or more non-overlapping sequence motifs selected from the amino acid sequences of Table 3, wherein the overall sequence remains substantially non-repetitive. In some embodiments, the XTEN comprises non-overlapping sequence motifs in which about 80%, or at least about 85%, or at least about 90%, or about 91%, or about 92%, or about 93%, or about 94%, or about 95%, or about 96%, or about 97%, or about 98%, or about 99% or about 100% of the sequence consists of multiple units of non-overlapping sequences selected from a single motif family selected from Table 3, resulting in a family sequence. As used herein, “family” means that the XTEN has motifs selected only from a single motif category from Table 3; i.e., AD, AE, AF, AG, AM, AQ, BC, or BD XTEN, and that any other amino acids in the XTEN not from a family motif are selected to achieve a needed property, such as to permit incorporation of a restriction site by the encoding nucleotides, incorporation of a cleavage sequence, or to achieve a better linkage to a FVIII coagulation factor component of the CFXTEN. In some embodiments of XTEN families, an XTEN sequence comprises multiple units of non-overlapping sequence motifs of the AD motif family, or of the AE motif family, or of the AF motif family, or of the AG motif family, or of the AM motif family, or of the AQ motif family, or of the BC family, or of the BD family, with the resulting XTEN exhibiting the range of homology described above. In other embodiments, the XTEN comprises multiple units of motif sequences from two or more of the motif families of Table 3. These sequences can be selected to achieve desired physical/chemical characteristics, including such properties as net charge, hydrophilicity, lack of secondary structure, or lack of repetitiveness that are conferred by the amino acid composition of the motifs, described more fully below. In the embodiments hereinabove described in this paragraph, the motifs incorporated into the XTEN can be selected and assembled using the methods described herein to achieve an XTEN of about 36 to about 3000 amino acid residues.

TABLE 3
XTEN Sequence Motifs of 12 Amino Acids and
Motif Families

| Motif Family | MOTIF SEQUENCE | SEQ ID NO: |
|---|---|---|
| AD | GESPGGSSGSES | 19 |
| AD | GSEGSSGPGESS | 20 |
| AD | GSSESGSSEGGP | 21 |
| AD | GSGGEPSESGSS | 22 |
| AE, AM | GSPAGSPTSTEE | 23 |
| AE, AM, AQ | GSEPATSGSETP | 24 |
| AE, AM, AQ | GTSESATPESGP | 25 |
| AE, AM, AQ | GTSTEPSEGSAP | 26 |
| AF, AM | GSTSESPSGTAP | 27 |
| AF, AM | GTSTPESGSASP | 28 |
| AF, AM | GTSPSGESSTAP | 29 |
| AF, AM | GSTSSTAESPGP | 30 |
| AG, AM | GTPGSGTASSSP | 31 |
| AG, AM | GSSTPSGATGSP | 32 |
| AG, AM | GSSPSASTGTGP | 33 |
| AG, AM | GASPGTSSTGSP | 34 |
| AQ | GEPAGSPTSTSE | 35 |
| AQ | GTGEPSSTPASE | 36 |
| AQ | GSGPSTESAPTE | 37 |
| AQ | GSETPSGPSETA | 38 |
| AQ | GPSETSTSEPGA | 39 |
| AQ | GSPSEPTEGTSA | 40 |
| BC | GSGASEPTSTEP | 41 |
| BC | GSEPATSGTEPS | 42 |
| BC | GTSEPSTSEPGA | 43 |
| BC | GTSTEPSEPGSA | 44 |
| BD | GSTAGSETSTEA | 45 |
| BD | GSETATSGSETA | 46 |
| BD | GTSESATSESGA | 47 |
| BD | GTSTEASEGSAS | 48 |

* Denotes individual motif sequences that, when used together in various permutations, results in a “family sequence”

[0187] In some embodiments of XTEN families, an XTEN sequence comprises multiple units of non-overlapping sequence motifs of the AD motif family, the AE motif family, or the AF motif family, or the AG motif family, or the AM motif family, or the AQ motif family, or the BC family, or the BD family, with the resulting XTEN exhibiting the range of homology described above. In other embodiments, the XTEN comprises multiple units of motif sequences from two or more of the motif families of Table 3, selected to achieve desired physicochemical characteristics, including such properties as net charge, lack of secondary structure, or lack of repetitiveness that may be conferred by the amino acid composition of the motifs, described more fully below. In the embodiments hereinabove described in this paragraph, the motifs or portions of the motifs incorporated into the XTEN can be selected and assembled using the methods described herein to achieve an XTEN of about 36, about 42, about 72, about 144, about 288, about 576, about 864, about 1000, about 2000 to about 3000 amino acid residues, or any intermediate length. Non-limiting examples of XTEN family sequences useful for incorporation into the subject CFXTEN are presented in Table 4. It is intended that a specified sequence mentioned relative to Table 4 has that sequence set forth in Table 4, while a generalized reference to an AE144 sequence, for example, is intended to encompass any AE sequence having 144 amino acid residues; e.g., AE144_1A, AE144_2A, etc., or a generalized reference to an AG144 sequence, for example, is intended to encompass any AG sequence having 144 amino acid residues, e.g., AG144_1, AG144_2, AG144_A, AG144_B, AG144_C, etc.

TABLE 4
XTEN Polypeptides

| | | SEQ |
|---|---|---|
| XTEN | | ID |
| Name | Amino Acid Sequence | NO: |
| AE42 | GAPGSPAGSPTSTEEGTSESATPESGPGSEPATSGSETPASS | 49 |
| AE42_1 | TEPSEGSAPGSPAGSPTSTEEGTSESATPESGPGSEPATSGS | 50 |
| AE42_2 | PAGSPTSTEEGTSTEPSEGSAPGTSESATPESGPGSEPATSG | 51 |
| AE42_3 | SEPATSGSETPGTSESATPESGPGTSTEPSEGSAPGSPAGSP | 52 |
| AG42_1 | GAPSPSASTGTGPGTPGSGTASSSPGSSTPSGATGSPGPSGP | 53 |
| AG42_2 | GPGTPGSGTASSSPGSSTPSGATGSPGSSPSASTGTGPGASP | 54 |
| AG42_3 | SPSASTGTGPGASPGTSSTGSPGTPGSGTASSSPGSSTPSGA | 55 |
| AG42_4 | SASTGTGPGASPGTSSTGSPGTPGSGTASSSPGSSTPSGATG | 56 |
| AE48 | MAEPAGSPTSTEEGTPGSGTASSSPGSSTPSGATGSPGASPGTSSTGS | 57 |
| AM48 | MAEPAGSPTSTEEGASPGTSSTGSPGSSTPSGATGSPGSSTPSGATGS | 58 |
| AE144 | GSEPATSGSETPGTSESATPESGPGSEPATSGSETPGSPAGSPTSTEEGTSTEPSEGSAPGS | 59 |
| | EPATSGSETPGSEPATSGSETPGSEPATSGSETPGTSTEPSEGSAPGTSESATPESGPGSEP | |
| | ATSGSETPGTSTEPSEGSAP | |
| AE144_1A | SPAGSPTSTEEGTSESATPESGPGTSTEPSEGSAPGSPAGSPTSTEEGTSTEPSEGSAPGTS | 60 |
| | TEPSEGSAPGTSESATPESGPGSEPATSGSETPGSEPATSGSETPGSPAGSPTSTEEGTSES | |
| | ATPESGPGTSTEPSEGSAPG | |
| AE144_2A | TSTEPSEGSAPGSPAGSPTSTEEGTSTEPSEGSAPGTSTEPSEGSAPGTSESATPESGPGTS | 61 |
| | TEPSEGSAPGTSESATPESGPGSEPATSGSETPGTSTEPSEGSAPGTSTEPSEGSAPGTSES | |
| | ATPESGPGTSESATPESGPG | |
| AE144_2B | TSTEPSEGSAPGSPAGSPTSTEEGTSTEPSEGSAPGTSTEPSEGSAPGTSESATPESGPGTS | 62 |
| | TEPSEGSAPGTSESATPESGPGSEPATSGSETPGTSTEPSEGSAPGTSTEPSEGSAPGTSES | |
| | ATPESGPGTSESATPESGPG | |
| AE144_3A | SPAGSPTSTEEGTSESATPESGPGSEPATSGSETPGTSESATPESGPGTSTEPSEGSAPGTS | 63 |
| | TEPSEGSAPGTSTEPSEGSAPGTSTEPSEGSAPGTSTEPSEGSAPGTSTEPSEGSAPGSPAG | |
| | SPTSTEEGTSTEPSEGSAPG | |
| AE144_3B | SPAGSPTSTEEGTSESATPESGPGSEPATSGSETPGTSESATPESGPGTSTEPSEGSAPGTS | 64 |
| | TEPSEGSAPGTSTEPSEGSAPGTSTEPSEGSAPGTSTEPSEGSAPGTSTEPSEGSAPGSPAG | |
| | SPTSTEEGTSTEPSEGSAPG | |
| AE144_4A | TSESATPESGPGSEPATSGSETPGTSESATPESGPGSEPATSGSETPGTSESATPESGPGTS | 65 |
| | TEPSEGSAPGTSESATPESGPGSPAGSPTSTEEGSPAGSPTSTEEGSPAGSPTSTEEGTSES | |
| | ATPESGPGTSTEPSEGSAPG | |
| AE144_4B | TSESATPESGPGSEPATSGSETPGTSESATPESGPGSEPATSGSETPGTSESATPESGPGTS | 66 |
| | TEPSEGSAPGTSESATPESGPGSPAGSPTSTEEGSPAGSPTSTEEGSPAGSPTSTEEGTSES | |
| | ATPESGPGTSTEPSEGSAPG | |
| AE144_5A | TSESATPESGPGSEPATSGSETPGTSESATPESGPGSEPATSGSETPGTSESATPESGPGTS | 67 |
| | TEPSEGSAPGSPAGSPTSTEEGTSESATPESGPGSEPATSGSETPGTSESATPESGPGSPAG | |
| | SPTSTEEGSPAGSPTSTEEG | |
| AE144_6B | TSTEPSEGSAPGTSESATPESGPGTSESATPESGPGTSESATPESGPGSEPATSGSETPGSE | 68 |
| | PATSGSETPGSPAGSPTSTEEGTSTEPSEGSAPGTSTEPSEGSAPGSEPATSGSETPGTSES | |
| | ATPESGPGTSTEPSEGSAPG | |
| AF144 | GTSTPESGSASPGTSPSGESSTAPGTSPSGESSTAPGSTSSTAESPGPGSTSESPSGTAPGS | 69 |
| | TSSTAESPGPGTSPSGESSTAPGTSTPESGSASPGSTSSTAESPGPGTSPSGESSTAPGTSPS | |
| | GESSTAPGTSPSGESSTAP | |
| AG144_1 | SGTASSSPGSSTPSGATGSPGTPGSGTASSSPGSSTPSGATGSPGSSTPSGATGSPGSSPSA | 70 |
| | STGTGPGSSPSASTGTGPGASPGTSSTGSPGTPGSGTASSSPGSSTPSGATGSPGSSPSAST | |
| | GTGPGSSPSASTGTGPGASP | |
| AG144_2 | PGSSPSASTGTGPGSSPSASTGTGPGTPGSGTASSSPGSSTPSGATGSPGSSPSASTGTGP | 71 |
| | GASPGTSSTGSPGTPGSGTASSSPGSSTPSGATGSPGTPGSGTASSSPGASPGTSSTGSPG | |
| | ASPGTSSTGSPGTPGSGTASSS | |
| AG144_A | GASPGTSSTGSPGSSPSASTGTGPGSSPSASTGTGPGTPGSGTASSSPGSSTPSGATGSPG | 72 |
| | SSPSASTGTGPGASPGTSSTGSPGTPGSGTASSSPGSSTPSGATGSPGTPGSGTASSSPGA | |
| | SPGTSSTGSPGASPGTSSTGSP | |
| AG144_B | GTPGSGTASSSPGSSTPSGATGSPGASPGTSSTGSPGTPGSGTASSSPGSSTPSGATGSPG | 73 |
| | SSPSASTGTGPGSSPSASTGTGPGSSTPSGATGSPGSSTPSGATGSPGASPGTSSTGSPGA | |
| | SPGTSSTGSPGASPGTSSTGSP | |
| AG144_C | GTPGSGTASSSPGASPGTSSTGSPGASPGTSSTGSPGASPGTSSTGSPGSSPSASTGTGPG | 74 |
| | TPGSGTASSSPGASPGTSSTGSPGASPGTSSTGSPGASPGTSSTGSPGSSTPSGATGSPGSS | |
| | TPSGATGSPGASPGTSSTGSP | |
| AG144_F | GSSPSASTGTGPGSSPSASTGTGPGASPGTSSTGSPGASPGTSSTGSPGSSTPSGATGSPG | 75 |
| | SSPSASTGTGPGASPGTSSTGSPGSSPSASTGTGPGTPGSGTASSSPGSSTPSGATGSPGSS | |
| | TPSGATGSPGASPGTSSTGSP | |
| AG144_3 | GTPGSGTASSSPGSSTPSGATGSPGSSTPSGATGSPGSSPSASTGTGPGSSPSASTGTGPG | 76 |
| | ASPGTSSTGSPGTPGSGTASSSPGSSTPSGATGSPGSSPSASTGTGPGSSPSASTGTGPGA | |
| | SPGTSSTGSPGASPGTSSTGSP | |
| AG144_4 | GTPGSGTASSSPGSSTPSGATGSPGSSPSASTGTGPGSSPSASTGTGPGASPGTSSTGSPG | 77 |
| | ASPGTSSTGSPGSSTPSGATGSPGSSPSASTGTGPGASPGTSSTGSPGSSPSASTGTGPGTP | |
| | GSGTASSSPGSSTPSGATGSP | |
| AE288_1 | GTSESATPESGPGSEPATSGSETPGTSESATPESGPGSEPATSGSETPGTSESATPESGPGT | 78 |
| | STEPSEGSAPGSPAGSPTSTEEGTSESATPESGPGSEPATSGSETPGTSESATPESGPGSPA | |
| | GSPTSTEEGSPAGSPTSTEEGTSTEPSEGSAPGTSESATPESGPGTSESATPESGPGTSESA | |
| | TPESGPGSEPATSGSETPGSEPATSGSETPGSPAGSPTSTEEGTSTEPSEGSAPGTSTEPSE | |
| | GSAPGSEPATSGSETPGTSESATPESGPGTSTEPSEGSAP | |
| AE288_2 | GSPAGSPTSTEEGTSESATPESGPGSEPATSGSETPGTSESATPESGPGTSTEPSEGSAPGT | 79 |
| | STEPSEGSAPGTSTEPSEGSAPGTSTEPSEGSAPGTSTEPSEGSAPGTSTEPSEGSAPGSPA | |
| | GSPTSTEEGTSTEPSEGSAPGTSESATPESGPGSEPATSGSETPGTSESATPESGPGSEPAT | |
| | SGSETPGTSESATPESGPGTSTEPSEGSAPGTSESATPESGPGSPAGSPTSTEEGSPAGSPT | |
| | STEEGSPAGSPTSTEEGTSESATPESGPGTSTEPSEGSAP | |
| AG288_1 | PGASPGTSSTGSPGASPGTSSTGSPGTPGSGTASSSPGSSTPSGATGSPGTPGSGTASSSP | 80 |
| | GSSTPSGATGSPGTPGSGTASSSPGSSTPSGATGSPGSSTPSGATGSPGSSPSASTGTGPG | |
| | SSPSASTGTGPGASPGTSSTGSPGTPGSGTASSSPGSSTPSGATGSPGSSPSASTGTGPGSS | |
| | PSASTGTGPGASPGTSSTGSPGASPGTSSTGSPGSSTPSGATGSPGSSPSASTGTGPGASP | |
| | GTSSTGSPGSSPSASTGTGPGTPGSGTASSSPGSSTPSGATGS | |
| AG288_2 | GSSPSASTGTGPGSSPSASTGTGPGTPGSGTASSSPGSSTPSGATGSPGSSPSASTGTGPG | 81 |
| | ASPGTSSTGSPGTPGSGTASSSPGSSTPSGATGSPGTPGSGTASSSPGASPGTSSTGSPGA | |
| | SPGTSSTGSPGTPGSGTASSSPGSSTPSGATGSPGASPGTSSTGSPGTPGSGTASSSPGSST | |
| | PSGATGSPGSSPSASTGTGPGSSPSASTGTGPGSSTPSGATGSPGSSTPSGATGSPGASPG | |
| | TSSTGSPGASPGTSSTGSPGASPGTSSTGSPGTPGSGTASSSP | |
| AF504 | GASPGTSSTGSPGSSPSASTGTGPGSSPSASTGTGPGTPGSGTASSSPGSSTPSGATGSPG | 82 |
| | SXPSASTGTGPGASPGTSSTGSPGTPGSGTASSSPGSSTPSGATGSPGTPGSGTASSSPGA | |
| | SPGTSSTGSPGASPGTSSTGSPGTPGSGTASSSPGSSTPSGATGSPGASPGTSSTGSPGTPG | |
| | SGTASSSPGSSTPSGATGSPGSXPSASTGTGPGSSPSASTGTGPGSSTPSGATGSPGSSTPS | |
| | GATGSPGASPGTSSTGSPGASPGTSSTGSPGASPGTSSTGSPGTPGSGTASSSPGASPGTS | |
| | STGSPGASPGTSSTGSPGASPGTSSTGSPGSSPSASTGTGPGTPGSGTASSSPGASPGTSST | |
| | GSPGASPGTSSTGSPGASPGTSSTGSPGSSTPSGATGSPGSSTPSGATGSPGASPGTSSTG | |
| | SPGTPGSGTASSSPGSSTPSGATGSPGSSTPSGATGSPGSSTPSGATGSPGSSPSASTGTGP | |
| | GASPGTSSTGSP | |
| AF540 | GSTSSTAESPGPGSTSSTAESPGPGSTSESPSGTAPGSTSSTAESPGPGSTSSTAESPGPGT | 83 |
| | STPESGSASPGSTSESPSGTAPGTSPSGESSTAPGSTSESPSGTAPGSTSESPSGTAPGTSPS | |
| | GESSTAPGSTSESPSGTAPGSTSESPSGTAPGTSPSGESSTAPGSTSESPSGTAPGSTSESPS | |
| | GTAPGSTSESPSGTAPGTSTPESGSASPGSTSESPSGTAPGTSTPESGSASPGSTSSTAESP | |
| | GPGSTSSTAESPGPGTSTPESGSASPGTSTPESGSASPGSTSESPSGTAPGTSTPESGSASP | |
| | GTSTPESGSASPGSTSESPSGTAPGSTSESPSGTAPGSTSESPSGTAPGSTSSTAESPGPGT | |
| | STPESGSASPGTSTPESGSASPGSTSESPSGTAPGSTSESPSGTAPGTSTPESGSASPGSTSE | |
| | SPSGTAPGSTSESPSGTAPGTSTPESGSASPGTSPSGESSTAPGSTSSTAESPGPGTSPSGE | |
| | SSTAPGSTSSTAESPGPGTSTPESGSASPGSTSESPSGTAP | |
| AD576 | GSSESGSSEGGPGSGGEPSESGSSGSSESGSSEGGPGSSESGSSEGGPGSSESGSSEGGPG | 84 |
| | SSESGSSEGGPGSSESGSSEGGPGESPGGSSGSESGSEGSSGPGESSGSSESGSSEGGPGSS | |
| | ESGSSEGGPGSSESGSSEGGPGSGGEPSESGSSGESPGGSSGSESGESPGGSSGSESGSGG | |
| | EPSESGSSGSSESGSSEGGPGSGGEPSESGSSGSGGEPSESGSSGSEGSSGPGESSGESPGG | |
| | SSGSESGSGGEPSESGSSGSGGEPSESGSSGSGGEPSESGSSGSSESGSSEGGPGESPGGSS | |
| | GSESGESPGGSSGSESGESPGGSSGSESGESPGGSSGSESGESPGGSSGSESGSSESGSSEG | |
| | GPGSGGEPSESGSSGSEGSSGPGESSGSSESGSSEGGPGSGGEPSESGSSGSSESGSSEGG | |
| | PGSGGEPSESGSSGESPGGSSGSESGESPGGSSGSESGSSESGSSEGGPGSGGEPSESGSS | |
| | GSSESGSSEGGPGSGGEPSESGSSGSGGEPSESGSSGESPGGSSGSESGSEGSSGPGESSG | |
| | SSESGSSEGGPGSEGSSGPGESS | |
| AE576 | GSPAGSPTSTEEGTSESATPESGPGTSTEPSEGSAPGSPAGSPTSTEEGTSTEPSEGSAPGT | 85 |
| | STEPSEGSAPGTSESATPESGPGSEPATSGSETPGSEPATSGSETPGSPAGSPTSTEEGTSE | |
| | SATPESGPGTSTEPSEGSAPGTSTEPSEGSAPGSPAGSPTSTEEGTSTEPSEGSAPGTSTEP | |
| | SEGSAPGTSESATPESGPGTSTEPSEGSAPGTSESATPESGPGSEPATSGSETPGTSTEPSE | |
| | GSAPGTSTEPSEGSAPGTSESATPESGPGTSESATPESGPGSPAGSPTSTEEGTSESATPES | |
| | GPGSEPATSGSETPGTSESATPESGPGTSTEPSEGSAPGTSTEPSEGSAPGTSTEPSEGSAP | |
| | GTSTEPSEGSAPGTSTEPSEGSAPGTSTEPSEGSAPGSPAGSPTSTEEGTSTEPSEGSAPGT | |
| | SESATPESGPGSEPATSGSETPGTSESATPESGPGSEPATSGSETPGTSESATPESGPGTST | |
| | EPSEGSAPGTSESATPESGPGSPAGSPTSTEEGSPAGSPTSTEEGSPAGSPTSTEEGTSESA | |
| | TPESGPGTSTEPSEGSAP | |
| AF576 | GSTSSTAESPGPGSTSSTAESPGPGSTSESPSGTAPGSTSSTAESPGPGSTSSTAESPGPGT | 86 |
| | STPESGSASPGSTSESPSGTAPGTSPSGESSTAPGSTSESPSGTAPGSTSESPSGTAPGTSPS | |
| | GESSTAPGSTSESPSGTAPGSTSESPSGTAPGTSPSGESSTAPGSTSESPSGTAPGSTSESPS | |
| | GTAPGSTSESPSGTAPGTSTPESGSASPGSTSESPSGTAPGTSTPESGSASPGSTSSTAESP | |
| | GPGSTSSTAESPGPGTSTPESGSASPGTSTPESGSASPGSTSESPSGTAPGTSTPESGSASP | |
| | GTSTPESGSASPGSTSESPSGTAPGSTSESPSGTAPGSTSESPSGTAPGSTSSTAESPGPGT | |
| | STPESGSASPGTSTPESGSASPGSTSESPSGTAPGSTSESPSGTAPGTSTPESGSASPGSTSE | |
| | SPSGTAPGSTSESPSGTAPGTSTPESGSASPGTSPSGESSTAPGSTSSTAESPGPGTSPSGE | |
| | SSTAPGSTSSTAESPGPGTSTPESGSASPGSTSESPSGTAPGSTSSTAESPGPGTSTPESGS | |
| | ASPGTSTPESGSASP | |
| AG576 | PGTPGSGTASSSPGSSTPSGATGSPGSSPSASTGTGPGSSPSASTGTGPGSSTPSGATGSP | 87 |
| | GSSTPSGATGSPGASPGTSSTGSPGASPGTSSTGSPGASPGTSSTGSPGTPGSGTASSSPG | |
| | ASPGTSSTGSPGASPGTSSTGSPGASPGTSSTGSPGSSPSASTGTGPGTPGSGTASSSPGA | |
| | SPGTSSTGSPGASPGTSSTGSPGASPGTSSTGSPGSSTPSGATGSPGSSTPSGATGSPGASP | |
| | GTSSTGSPGTPGSGTASSSPGSSTPSGATGSPGSSTPSGATGSPGSSTPSGATGSPGSSPSA | |
| | STGTGPGASPGTSSTGSPGASPGTSSTGSPGTPGSGTASSSPGASPGTSSTGSPGASPGTS | |
| | STGSPGASPGTSSTGSPGASPGTSSTGSPGTPGSGTASSSPGSSTPSGATGSPGTPGSGTA | |
| | SSSPGSSTPSGATGSPGTPGSGTASSSPGSSTPSGATGSPGSSTPSGATGSPGSSPSASTGT | |
| | GPGSSPSASTGTGPGASPGTSSTGSPGTPGSGTASSSPGSSTPSGATGSPGSSPSASTGTG | |
| | PGSSPSASTGTGPGASPGTSSTGS | |
| AE624 | MAEPAGSPTSTEEGTPGSGTASSSPGSSTPSGATGSPGASPGTSSTGSPGSPAGSPTSTEE | 88 |
| | GTSESATPESGPGTSTEPSEGSAPGSPAGSPTSTEEGTSTEPSEGSAPGTSTEPSEGSAPGT | |
| | SESATPESGPGSEPATSGSETPGSEPATSGSETPGSPAGSPTSTEEGTSESATPESGPGTST | |
| | EPSEGSAPGTSTEPSEGSAPGSPAGSPTSTEEGTSTEPSEGSAPGTSTEPSEGSAPGTSESA | |
| | TPESGPGTSTEPSEGSAPGTSESATPESGPGSEPATSGSETPGTSTEPSEGSAPGTSTEPSE | |
| | GSAPGTSESATPESGPGTSESATPESGPGSPAGSPTSTEEGTSESATPESGPGSEPATSGSE | |
| | TPGTSESATPESGPGTSTEPSEGSAPGTSTEPSEGSAPGTSTEPSEGSAPGTSTEPSEGSAP | |
| | GTSTEPSEGSAPGTSTEPSEGSAPGSPAGSPTSTEEGTSTEPSEGSAPGTSESATPESGPGS | |
| | EPATSGSETPGTSESATPESGPGSEPATSGSETPGTSESATPESGPGTSTEPSEGSAPGTSE | |
| | SATPESGPGSPAGSPTSTEEGSPAGSPTSTEEGSPAGSPTSTEEGTSESATPESGPGTSTEP | |
| | SEGSAP | |
| AD836 | GSSESGSSEGGPGSSESGSSEGGPGESPGGSSGSESGSGGEPSESGSSGESPGGSSGSESG | 89 |
| | ESPGGSSGSESGSSESGSSEGGPGSSESGSSEGGPGSSESGSSEGGPGESPGGSSGSESGES | |
| | PGGSSGSESGESPGGSSGSESGSSESGSSEGGPGSSESGSSEGGPGSSESGSSEGGPGSSES | |
| | GSSEGGPGSSESGSSEGGPGSSESGSSEGGPGSGGEPSESGSSGESPGGSSGSESGESPGG | |
| | SSGSESGSGGEPSESGSSGSEGSSGPGESSGSSESGSSEGGPGSGGEPSESGSSGSEGSSGP | |
| | GESSGSSESGSSEGGPGSGGEPSESGSSGESPGGSSGSESGSGGEPSESGSSGSGGEPSES | |
| | GSSGSSESGSSEGGPGSGGEPSESGSSGSGGEPSESGSSGSEGSSGPGESSGESPGGSSGS | |
| | ESGSEGSSGPGESSGSEGSSGPGESSGSGGEPSESGSSGSSESGSSEGGPGSSESGSSEGGP | |
| | GESPGGSSGSESGSGGEPSESGSSGSEGSSGPGESSGESPGGSSGSESGSEGSSGPGSSES | |
| | GSSEGGPGSGGEPSESGSSGSEGSSGPGESSGSEGSSGPGESSGSEGSSGPGESSGSGGEP | |
| | SESGSSGSGGEPSESGSSGESPGGSSGSESGESPGGSSGSESGSGGEPSESGSSGSEGSSGP | |
| | GESSGESPGGSSGSESGSSESGSSEGGPGSSESGSSEGGPGSSESGSSEGGPGSGGEPSES | |
| | GSSGSSESGSSEGGPGESPGGSSGSESGSGGEPSESGSSGSSESGSSEGGPGESPGGSSGS | |
| | ESGSGGEPSESGSSGESPGGSSGSESGSGGEPSESGSS | |
| AE864 | GSPAGSPTSTEEGTSESATPESGPGTSTEPSEGSAPGSPAGSPTSTEEGTSTEPSEGSAPGT | 90 |
| | STEPSEGSAPGTSESATPESGPGSEPATSGSETPGSEPATSGSETPGSPAGSPTSTEEGTSE | |
| | SATPESGPGTSTEPSEGSAPGTSTEPSEGSAPGSPAGSPTSTEEGTSTEPSEGSAPGTSTEP | |
| | SEGSAPGTSESATPESGPGTSTEPSEGSAPGTSESATPESGPGSEPATSGSETPGTSTEPSE | |
| | GSAPGTSTEPSEGSAPGTSESATPESGPGTSESATPESGPGSPAGSPTSTEEGTSESATPES | |
| | GPGSEPATSGSETPGTSESATPESGPGTSTEPSEGSAPGTSTEPSEGSAPGTSTEPSEGSAP | |
| | GTSTEPSEGSAPGTSTEPSEGSAPGTSTEPSEGSAPGSPAGSPTSTEEGTSTEPSEGSAPGT | |
| | SESATPESGPGSEPATSGSETPGTSESATPESGPGSEPATSGSETPGTSESATPESGPGTST | |
| | EPSEGSAPGTSESATPESGPGSPAGSPTSTEEGSPAGSPTSTEEGSPAGSPTSTEEGTSESA | |
| | TPESGPGTSTEPSEGSAPGTSESATPESGPGSEPATSGSETPGTSESATPESGPGSEPATSG | |
| | SETPGTSESATPESGPGTSTEPSEGSAPGSPAGSPTSTEEGTSESATPESGPGSEPATSGSE | |
| | TPGTSESATPESGPGSPAGSPTSTEEGSPAGSPTSTEEGTSTEPSEGSAPGTSESATPESGP | |
| | GTSESATPESGPGTSESATPESGPGSEPATSGSETPGSEPATSGSETPGSPAGSPTSTEEGT | |
| | STEPSEGSAPGTSTEPSEGSAPGSEPATSGSETPGTSESATPESGPGTSTEPSEGSAP | |
| AF864 | GSTSESPSGTAPGTSPSGESSTAPGSTSESPSGTAPGSTSESPSGTAPGTSTPESGSASPGT | 91 |
| | STPESGSASPGSTSESPSGTAPGSTSESPSGTAPGTSPSGESSTAPGSTSESPSGTAPGTSPS | |
| | GESSTAPGTSPSGESSTAPGSTSSTAESPGPGTSPSGESSTAPGTSPSGESSTAPGSTSSTA | |
| | ESPGPGTSTPESGSASPGTSTPESGSASPGSTSESPSGTAPGSTSESPSGTAPGTSTPESGS | |
| | ASPGSTSSTAESPGPGTSTPESGSASPGSTSESPSGTAPGTSPSGESSTAPGSTSSTAESPG | |
| | PGTSPSGESSTAPGTSTPESGSASPGSTSSTAESPGPGSTSSTAESPGPGSTSSTAESPGPG | |
| | STSSTAESPGPGTSPSGESSTAPGSTSESPSGTAPGSTSESPSGTAPGTSTPESGPXXXGAS | |
| | ASGAPSTXXXXSESPSGTAPGSTSESPSGTAPGSTSESPSGTAPGSTSESPSGTAPGSTSES | |
| | PSGTAPGSTSESPSGTAPGTSTPESGSASPGTSPSGESSTAPGTSPSGESSTAPGSTSSTAE | |
| | SPGPGTSPSGESSTAPGTSTPESGSASPGSTSESPSGTAPGSTSESPSGTAPGTSPSGESST | |
| | APGSTSESPSGTAPGTSTPESGSASPGTSTPESGSASPGSTSESPSGTAPGTSTPESGSASP | |
| | GSTSSTAESPGPGSTSESPSGTAPGSTSESPSGTAPGTSPSGESSTAPGSTSSTAESPGPGT | |
| | SPSGESSTAPGTSTPESGSASPGTSPSGESSTAPGTSPSGESSTAPGTSPSGESSTAPGSTSS | |
| | TAESPGPGSTSSTAESPGPGTSPSGESSTAPGSSPSASTGTGPGSSTPSGATGSPGSSTPSG | |
| | ATGSP | |
| AG864_2 | GASPGTSSTGSPGSSPSASTGTGPGSSPSASTGTGPGTPGSGTASSSPGSSTPSGATGSPG | 92 |
| | SSPSASTGTGPGASPGTSSTGSPGTPGSGTASSSPGSSTPSGATGSPGTPGSGTASSSPGA | |
| | SPGTSSTGSPGASPGTSSTGSPGTPGSGTASSSPGSSTPSGATGSPGASPGTSSTGSPGTPG | |
| | SGTASSSPGSSTPSGATGSPGSSPSASTGTGPGSSPSASTGTGPGSSTPSGATGSPGSSTPS | |
| | GATGSPGASPGTSSTGSPGASPGTSSTGSPGASPGTSSTGSPGTPGSGTASSSPGASPGTS | |
| | STGSPGASPGTSSTGSPGASPGTSSTGSPGSSPSASTGTGPGTPGSGTASSSPGASPGTSST | |
| | GSPGASPGTSSTGSPGASPGTSSTGSPGSSTPSGATGSPGSSTPSGATGSPGASPGTSSTG | |
| | SPGTPGSGTASSSPGSSTPSGATGSPGSSTPSGATGSPGSSTPSGATGSPGSSPSASTGTGP | |
| | GASPGTSSTGSPGASPGTSSTGSPGTPGSGTASSSPGASPGTSSTGSPGASPGTSSTGSPG | |
| | ASPGTSSTGSPGASPGTSSTGSPGTPGSGTASSSPGSSTPSGATGSPGTPGSGTASSSPGSS | |
| | TPSGATGSPGTPGSGTASSSPGSSTPSGATGSPGSSTPSGATGSPGSSPSASTGTGPGSSPS | |
| | ASTGTGPGASPGTSSTGSPGTPGSGTASSSPGSSTPSGATGSPGSSPSASTGTGPGSSPSA | |
| | STGTGPGASPGTSSTGSPGASPGTSSTGSPGSSTPSGATGSPGSSPSASTGTGPGASPGTS | |
| | STGSPGSSPSASTGTGPGTPGSGTASSSPGSSTPSGATGSPGSSTPSGATGSPGASPGTSST | |
| | GSP | |
| AM875 | GTSTEPSEGSAPGSEPATSGSETPGSPAGSPTSTEEGSTSSTAESPGPGTSTPESGSASPGS | 93 |
| | TSESPSGTAPGSTSESPSGTAPGTSTPESGSASPGTSTPESGSASPGSEPATSGSETPGTSE | |
| | SATPESGPGSPAGSPTSTEEGTSTEPSEGSAPGTSESATPESGPGTSTEPSEGSAPGTSTEP | |
| | SEGSAPGSPAGSPTSTEEGTSTEPSEGSAPGTSTEPSEGSAPGTSESATPESGPGTSESATP | |
| | ESGPGTSTEPSEGSAPGTSTEPSEGSAPGTSESATPESGPGTSTEPSEGSAPGSEPATSGSE | |
| | TPGSPAGSPTSTEEGSSTPSGATGSPGTPGSGTASSSPGSSTPSGATGSPGTSTEPSEGSAP | |
| | GTSTEPSEGSAPGSEPATSGSETPGSPAGSPTSTEEGSPAGSPTSTEEGTSTEPSEGSAPGA | |
| | SASGAPSTGGTSESATPESGPGSPAGSPTSTEEGSPAGSPTSTEEGSTSSTAESPGPGSTSE | |
| | SPSGTAPGTSPSGESSTAPGTPGSGTASSSPGSSTPSGATGSPGSSPSASTGTGPGSEPATS | |
| | GSETPGTSESATPESGPGSEPATSGSETPGSTSSTAESPGPGSTSSTAESPGPGTSPSGESS | |
| | TAPGSEPATSGSETPGSEPATSGSETPGTSTEPSEGSAPGSTSSTAESPGPGTSTPESGSAS | |
| | PGSTSESPSGTAPGTSTEPSEGSAPGTSTEPSEGSAPGTSTEPSEGSAPGSSTPSGATGSPG | |
| | SSPSASTGTGPGASPGTSSTGSPGSEPATSGSETPGTSESATPESGPGSPAGSPTSTEEGSS | |
| | TPSGATGSPGSSPSASTGTGPGASPGTSSTGSPGTSESATPESGPGTSTEPSEGSAPGTSTE | |
| | PSEGSAP | |
| AE912 | MAEPAGSPTSTEEGTPGSGTASSSPGSSTPSGATGSPGASPGTSSTGSPGSPAGSPTSTEE | 94 |
| | GTSESATPESGPGTSTEPSEGSAPGSPAGSPTSTEEGTSTEPSEGSAPGTSTEPSEGSAPGT | |
| | SESATPESGPGSEPATSGSETPGSEPATSGSETPGSPAGSPTSTEEGTSESATPESGPGTST | |
| | EPSEGSAPGTSTEPSEGSAPGSPAGSPTSTEEGTSTEPSEGSAPGTSTEPSEGSAPGTSESA | |
| | TPESGPGTSTEPSEGSAPGTSESATPESGPGSEPATSGSETPGTSTEPSEGSAPGTSTEPSE | |
| | GSAPGTSESATPESGPGTSESATPESGPGSPAGSPTSTEEGTSESATPESGPGSEPATSGSE | |
| | TPGTSESATPESGPGTSTEPSEGSAPGTSTEPSEGSAPGTSTEPSEGSAPGTSTEPSEGSAP | |
| | GTSTEPSEGSAPGTSTEPSEGSAPGSPAGSPTSTEEGTSTEPSEGSAPGTSESATPESGPGS | |
| | EPATSGSETPGTSESATPESGPGSEPATSGSETPGTSESATPESGPGTSTEPSEGSAPGTSE | |
| | SATPESGPGSPAGSPTSTEEGSPAGSPTSTEEGSPAGSPTSTEEGTSESATPESGPGTSTEP | |
| | SEGSAPGTSESATPESGPGSEPATSGSETPGTSESATPESGPGSEPATSGSETPGTSESATP | |
| | ESGPGTSTEPSEGSAPGSPAGSPTSTEEGTSESATPESGPGSEPATSGSETPGTSESATPES | |
| | GPGSPAGSPTSTEEGSPAGSPTSTEEGTSTEPSEGSAPGTSESATPESGPGTSESATPESGP | |
| | GTSESATPESGPGSEPATSGSETPGSEPATSGSETPGSPAGSPTSTEEGTSTEPSEGSAPGT | |
| | STEPSEGSAPGSEPATSGSETPGTSESATPESGPGTSTEPSEGSAP | |
| AM923 | MAEPAGSPTSTEEGASPGTSSTGSPGSSTPSGATGSPGSSTPSGATGSPGTSTEPSEGSAP | 95 |
| | GSEPATSGSETPGSPAGSPTSTEEGSTSSTAESPGPGTSTPESGSASPGSTSESPSGTAPGS | |
| | TSESPSGTAPGTSTPESGSASPGTSTPESGSASPGSEPATSGSETPGTSESATPESGPGSPA | |
| | GSPTSTEEGTSTEPSEGSAPGTSESATPESGPGTSTEPSEGSAPGTSTEPSEGSAPGSPAGS | |
| | PTSTEEGTSTEPSEGSAPGTSTEPSEGSAPGTSESATPESGPGTSESATPESGPGTSTEPSE | |
| | GSAPGTSTEPSEGSAPGTSESATPESGPGTSTEPSEGSAPGSEPATSGSETPGSPAGSPTST | |
| | EEGSSTPSGATGSPGTPGSGTASSSPGSSTPSGATGSPGTSTEPSEGSAPGTSTEPSEGSAP | |
| | GSEPATSGSETPGSPAGSPTSTEEGSPAGSPTSTEEGTSTEPSEGSAPGASASGAPSTGGT | |
| | SESATPESGPGSPAGSPTSTEEGSPAGSPTSTEEGSTSSTAESPGPGSTSESPSGTAPGTSP | |
| | SGESSTAPGTPGSGTASSSPGSSTPSGATGSPGSSPSASTGTGPGSEPATSGSETPGTSESA | |
| | TPESGPGSEPATSGSETPGSTSSTAESPGPGSTSSTAESPGPGTSPSGESSTAPGSEPATSG | |
| | SETPGSEPATSGSETPGTSTEPSEGSAPGSTSSTAESPGPGTSTPESGSASPGSTSESPSGT | |
| | APGTSTEPSEGSAPGTSTEPSEGSAPGTSTEPSEGSAPGSSTPSGATGSPGSSPSASTGTGP | |
| | GASPGTSSTGSPGSEPATSGSETPGTSESATPESGPGSPAGSPTSTEEGSSTPSGATGSPGS | |
| | SPSASTGTGPGASPGTSSTGSPGTSESATPESGPGTSTEPSEGSAPGTSTEPSEGSAP | |
| AM1318 | GTSTEPSEGSAPGSEPATSGSETPGSPAGSPTSTEEGSTSSTAESPGPGTSTPESGSASPGS | 96 |
| | TSESPSGTAPGSTSESPSGTAPGTSTPESGSASPGTSTPESGSASPGSEPATSGSETPGTSE | |
| | SATPESGPGSPAGSPTSTEEGTSTEPSEGSAPGTSESATPESGPGTSTEPSEGSAPGTSTEP | |
| | SEGSAPGSPAGSPTSTEEGTSTEPSEGSAPGTSTEPSEGSAPGTSESATPESGPGTSESATP | |
| | ESGPGTSTEPSEGSAPGTSTEPSEGSAPGTSESATPESGPGTSTEPSEGSAPGSEPATSGSE | |
| | TPGSPAGSPTSTEEGSSTPSGATGSPGTPGSGTASSSPGSSTPSGATGSPGTSTEPSEGSAP | |
| | GTSTEPSEGSAPGSEPATSGSETPGSPAGSPTSTEEGSPAGSPTSTEEGTSTEPSEGSAPGP | |
| | EPTGPAPSGGSEPATSGSETPGTSESATPESGPGSPAGSPTSTEEGTSESATPESGPGSPA | |
| | GSPTSTEEGSPAGSPTSTEEGTSESATPESGPGSPAGSPTSTEEGSPAGSPTSTEEGSTSST | |
| | AESPGPGSTSESPSGTAPGTSPSGESSTAPGSTSESPSGTAPGSTSESPSGTAPGTSPSGES | |
| | STAPGTSTEPSEGSAPGTSESATPESGPGTSESATPESGPGSEPATSGSETPGTSESATPES | |
| | GPGTSESATPESGPGTSTEPSEGSAPGTSESATPESGPGTSTEPSEGSAPGTSPSGESSTAP | |
| | GTSPSGESSTAPGTSPSGESSTAPGTSTEPSEGSAPGSPAGSPTSTEEGTSTEPSEGSAPGS | |
| | SPSASTGTGPGSSTPSGATGSPGSSTPSGATGSPGSSTPSGATGSPGSSTPSGATGSPGAS | |
| | PGTSSTGSPGASASGAPSTGGTSPSGESSTAPGSTSSTAESPGPGTSPSGESSTAPGTSESA | |
| | TPESGPGTSTEPSEGSAPGTSTEPSEGSAPGSSPSASTGTGPGSSTPSGATGSPGASPGTSS | |
| | TGSPGTSTPESGSASPGTSPSGESSTAPGTSPSGESSTAPGTSESATPESGPGSEPATSGSE | |
| | TPGTSTEPSEGSAPGSTSESPSGTAPGSTSESPSGTAPGTSTPESGSASPGSPAGSPTSTEE | |
| | GTSESATPESGPGTSTEPSEGSAPGSPAGSPTSTEEGTSESATPESGPGSEPATSGSETPGS | |
| | STPSGATGSPGASPGTSSTGSPGSSTPSGATGSPGSTSESPSGTAPGTSPSGESSTAPGSTS | |
| | STAESPGPGSSTPSGATGSPGASPGTSSTGSPGTPGSGTASSSPGSPAGSPTSTEEGSPAG | |
| | SPTSTEEGTSTEPSEGSAP | |
| BC 864 | GTSTEPSEPGSAGTSTEPSEPGSAGSEPATSGTEPSGSGASEPTSTEPGSEPATSGTEPSGS | 97 |
| | EPATSGTEPSGSEPATSGTEPSGSGASEPTSTEPGTSTEPSEPGSAGSEPATSGTEPSGTST | |
| | EPSEPGSAGSEPATSGTEPSGSEPATSGTEPSGTSTEPSEPGSAGTSTEPSEPGSAGSEPAT | |
| | SGTEPSGSEPATSGTEPSGTSEPSTSEPGAGSGASEPTSTEPGTSEPSTSEPGAGSEPATSG | |
| | TEPSGSEPATSGTEPSGTSTEPSEPGSAGTSTEPSEPGSAGSGASEPTSTEPGSEPATSGTE | |
| | PSGSEPATSGTEPSGSEPATSGTEPSGSEPATSGTEPSGTSTEPSEPGSAGSEPATSGTEPS | |
| | GSGASEPTSTEPGTSTEPSEPGSAGSEPATSGTEPSGSGASEPTSTEPGTSTEPSEPGSAGS | |
| | GASEPTSTEPGSEPATSGTEPSGSGASEPTSTEPGSEPATSGTEPSGSGASEPTSTEPGTST | |
| | EPSEPGSAGSEPATSGTEPSGSGASEPTSTEPGTSTEPSEPGSAGSEPATSGTEPSGTSTEP | |
| | SEPGSAGSEPATSGTEPSGTSTEPSEPGSAGTSTEPSEPGSAGTSTEPSEPGSAGTSTEPSE | |
| | PGSAGTSTEPSEPGSAGTSTEPSEPGSAGTSEPSTSEPGAGSGASEPTSTEPGTSTEPSEPG | |
| | SAGTSTEPSEPGSAGTSTEPSEPGSAGSEPATSGTEPSGSGASEPTSTEPGSEPATSGTEPS | |
| | GSEPATSGTEPSGSEPATSGTEPSGSEPATSGTEPSGTSEPSTSEPGAGSEPATSGTEPSGS | |
| | GASEPTSTEPGTSTEPSEPGSAGSEPATSGTEPSGSGASEPTSTEPGTSTEPSEPGSA | |
| BD864 | GSETATSGSETAGTSESATSESGAGSTAGSETSTEAGTSESATSESGAGSETATSGSETA | 98 |
| | GSETATSGSETAGTSTEASEGSASGTSTEASEGSASGTSESATSESGAGSETATSGSETA | |
| | GTSTEASEGSASGSTAGSETSTEAGTSESATSESGAGTSESATSESGAGSETATSGSETA | |
| | GTSESATSESGAGTSTEASEGSASGSETATSGSETAGSETATSGSETAGTSTEASEGSAS | |
| | GSTAGSETSTEAGTSESATSESGAGTSTEASEGSASGSETATSGSETAGSTAGSETSTEA | |
| | GSTAGSETSTEAGSETATSGSETAGTSESATSESGAGTSESATSESGAGSETATSGSETA | |
| | GTSESATSESGAGTSESATSESGAGSETATSGSETAGSETATSGSETAGTSTEASEGSAS | |
| | GSTAGSETSTEAGSETATSGSETAGTSESATSESGAGSTAGSETSTEAGSTAGSETSTEA | |
| | GSTAGSETSTEAGTSTEASEGSASGSTAGSETSTEAGSTAGSETSTEAGTSTEASEGSAS | |
| | GSTAGSETSTEAGSETATSGSETAGTSTEASEGSASGTSESATSESGAGSETATSGSETA | |
| | GTSESATSESGAGTSESATSESGAGSETATSGSETAGTSESATSESGAGSETATSGSETA | |
| | GTSTEASEGSASGTSTEASEGSASGSTAGSETSTEAGSTAGSETSTEAGSETATSGSETA | |
| | GTSESATSESGAGTSESATSESGAGSETATSGSETAGSETATSGSETAGSETATSGSETA | |
| | GTSTEASEGSASGTSESATSESGAGSETATSGSETAGSETATSGSETAGTSESATSESGA | |
| | GTSESATSESGAGSETATSGSETA | |
| AE948 | GTSTEPSEGSAPGTSESATPESGPGSEPATSGSETPGTSESATPESGPGTSTEPSEGSAPGS | 99 |
| | PAGSPTSTEEGTSTEPSEGSAPGSEPATSGSETPGTSESATPESGPGTSESATPESGPGSEP | |
| | ATSGSETPGTSTEPSEGSAPGTSESATPESGPGTSTEPSEGSAPGTSTEPSEGSAPGSEPAT | |
| | SGSETPGTSTEPSEGSAPGSEPATSGSETPGSEPATSGSETPGTSTEPSEGSAPGSEPATSG | |
| | SETPGSEPATSGSETPGTSTEPSEGSAPGSEPATSGSETPGSPAGSPTSTEEGTSESATPES | |
| | GPGTSTEPSEGSAPGSEPATSGSETPGTSESATPESGPGSEPATSGSETPGSEPATSGSETP | |
| | GTSESATPESGPGSPAGSPTSTEEGTSESATPESGPGSPAGSPTSTEEGTSTEPSEGSAPGT | |
| | SESATPESGPGTSTEPSEGSAPGTSTEPSEGSAPGSPAGSPTSTEEGTSTEPSEGSAPGTSE | |
| | SATPESGPGSPAGSPTSTEEGSPAGSPTSTEEGTSESATPESGPGTSESATPESGPGTSTEP | |
| | SEGSAPGSPAGSPTSTEEGTSESATPESGPGTSTEPSEGSAPGSEPATSGSETPGSPAGSPT | |
| | STEEGTSESATPESGPGTSTEPSEGSAPGSEPATSGSETPGSEPATSGSETPGSEPATSGSE | |
| | TPGSPAGSPTSTEEGTSESATPESGPGSEPATSGSETPGSEPATSGSETPGSPAGSPTSTEE | |
| | GSPAGSPTSTEEGSPAGSPTSTEEGTSESATPESGPGSEPATSGSETPGTSTEPSEGSAPGT | |
| | STEPSEGSAPGSPAGSPTSTEEGSPAGSPTSTEEGSPAGSPTSTEEGTSTEPSEGSAPGTSE | |
| | SATPESGPGTSESATPESGPGTSTEPSEGSAPGTSTEPSEGSAPGTSTEPSEGSAPGTSESA | |
| | TPESGPGTSESATPESGP | |
| AE1044 | GSEPATSGSETPGSEPATSGSETPGTSTEPSEGSAPGTSESATPESGPGSPAGSPTSTEEGT | 100 |
| | STEPSEGSAPGTSESATPESGPGTSESATPESGPGSEPATSGSETPGSEPATSGSETPGTSE | |
| | SATPESGPGTSESATPESGPGSPAGSPTSTEEGTSTEPSEGSAPGSEPATSGSETPGTSTEP | |
| | SEGSAPGSPAGSPTSTEEGSPAGSPTSTEEGSPAGSPTSTEEGTSTEPSEGSAPGTSESATP | |
| | ESGPGSEPATSGSETPGTSESATPESGPGTSESATPESGPGSPAGSPTSTEEGTSTEPSEGS | |
| | APGSEPATSGSETPGTSTEPSEGSAPGTSESATPESGPGSPAGSPTSTEEGTSTEPSEGSAP | |
| | GTSTEPSEGSAPGSPAGSPTSTEEGTSTEPSEGSAPGTSESATPESGPGSPAGSPTSTEEGT | |
| | SESATPESGPGSEPATSGSETPGTSTEPSEGSAPGSEPATSGSETPGTSESATPESGPGTST | |
| | EPSEGSAPGTSESATPESGPGTSTEPSEGSAPGTSTEPSEGSAPGSEPATSGSETPGSPAGS | |
| | PTSTEEGTSESATPESGPGTSTEPSEGSAPGSPAGSPTSTEEGTSTEPSEGSAPGTSESATP | |
| | ESGPGTSTEPSEGSAPGSEPATSGSETPGSEPATSGSETPGTSESATPESGPGTSESATPES | |
| | GPGTSESATPESGPGTSTEPSEGSAPGTSTEPSEGSAPGSPAGSPTSTEEGSPAGSPTSTEE | |
| | GTSESATPESGPGSPAGSPTSTEEGSPAGSPTSTEEGTSESATPESGPGSEPATSGSETPGT | |
| | STEPSEGSAPGSEPATSGSETPGSPAGSPTSTEEGTSESATPESGPGTSESATPESGPGSEP | |
| | ATSGSETPGTSTEPSEGSAPGTSTEPSEGSAPGSPAGSPTSTEEGTSTEPSEGSAPGTSTEP | |
| | SEGSAPGSEPATSGSETPGSPAGSPTSTEEGTSESATPESGPGTSTEPSEGSAPGSPAGSPT | |
| | STEEGTSESATPESGPGTSESATPESGPGTST | |
| AE1140 | GSEPATSGSETPGSEPATSGSETPGTSTEPSEGSAPGSEPATSGSETPGTSESATPESGPGS | 101 |
| | EPATSGSETPGSPAGSPTSTEEGTSESATPESGPGSEPATSGSETPGTSTEPSEGSAPGTSE | |
| | SATPESGPGTSESATPESGPGTSTEPSEGSAPGTSTEPSEGSAPGSEPATSGSETPGSPAGS | |
| | PTSTEEGTSTEPSEGSAPGSEPATSGSETPGSPAGSPTSTEEGTSTEPSEGSAPGTSESATP | |
| | ESGPGSPAGSPTSTEEGTSTEPSEGSAPGTSESATPESGPGSEPATSGSETPGTSESATPES | |
| | GPGSEPATSGSETPGTSTEPSEGSAPGTSTEPSEGSAPGTSTEPSEGSAPGSPAGSPTSTEE | |
| | GSPAGSPTSTEEGTSESATPESGPGTSTEPSEGSAPGTSTEPSEGSAPGSPAGSPTSTEEGS | |
| | PAGSPTSTEEGSPAGSPTSTEEGTSESATPESGPGSEPATSGSETPGTSESATPESGPGSPA | |
| | GSPTSTEEGTSTEPSEGSAPGTSESATPESGPGSEPATSGSETPGSPAGSPTSTEEGTSTEP | |
| | SEGSAPGTSESATPESGPGTSESATPESGPGSPAGSPTSTEEGTSTEPSEGSAPGSPAGSPT | |
| | STEEGSPAGSPTSTEEGTSESATPESGPGSEPATSGSETPGTSTEPSEGSAPGSEPATSGSE | |
| | TPGTSESATPESGPGTSTEPSEGSAPGTSESATPESGPGTSESATPESGPGTSTEPSEGSAP | |
| | GTSTEPSEGSAPGSEPATSGSETPGTSESATPESGPGTSTEPSEGSAPGSEPATSGSETPGS | |
| | PAGSPTSTEEGTSESATPESGPGSPAGSPTSTEEGTSTEPSEGSAPGSEPATSGSETPGSEP | |
| | ATSGSETPGSEPATSGSETPGTSESATPESGPGTSESATPESGPGTSTEPSEGSAPGTSTEP | |
| | SEGSAPGSEPATSGSETPGTSTEPSEGSAPGTSESATPESGPGSPAGSPTSTEEGSPAGSPT | |
| | STEEGTSTEPSEGSAPGSPAGSPTSTEEGSPA | |
| AE1236 | GSPAGSPTSTEEGTSTEPSEGSAPGSPAGSPTSTEEGTSESATPESGPGSEPATSGSETPGT | 102 |
| | STEPSEGSAPGTSTEPSEGSAPGTSESATPESGPGTSTEPSEGSAPGTSTEPSEGSAPGSEP | |
| | ATSGSETPGSPAGSPTSTEEGTSESATPESGPGSPAGSPTSTEEGTSTEPSEGSAPGSPAGS | |
| | PTSTEEGTSTEPSEGSAPGSPAGSPTSTEEGTSTEPSEGSAPGSPAGSPTSTEEGSPAGSPT | |
| | STEEGTSTEPSEGSAPGSEPATSGSETPGSPAGSPTSTEEGTSESATPESGPGSEPATSGSE | |
| | TPGSEPATSGSETPGTSESATPESGPGSPAGSPTSTEEGTSESATPESGPGSEPATSGSETP | |
| | GSEPATSGSETPGTSESATPESGPGTSESATPESGPGTSTEPSEGSAPGTSTEPSEGSAPGT | |
| | SESATPESGPGSPAGSPTSTEEGTSTEPSEGSAPGSEPATSGSETPGSPAGSPTSTEEGTST | |
| | EPSEGSAPGTSTEPSEGSAPGSPAGSPTSTEEGSPAGSPTSTEEGSPAGSPTSTEEGTSESA | |
| | TPESGPGSEPATSGSETPGTSESATPESGPGTSESATPESGPGTSTEPSEGSAPGTSESATP | |
| | ESGPGSPAGSPTSTEEGTSESATPESGPGTSESATPESGPGTSTEPSEGSAPGSEPATSGSE | |
| | TPGTSTEPSEGSAPGSPAGSPTSTEEGTSESATPESGPGTSTEPSEGSAPGTSTEPSEGSAP | |
| | GSEPATSGSETPGSEPATSGSETPGTSESATPESGPGSEPATSGSETPGSPAGSPTSTEEGT | |
| | SESATPESGPGSEPATSGSETPGTSTEPSEGSAPGTSESATPESGPGTSESATPESGPGTST | |
| | EPSEGSAPGSEPATSGSETPGTSTEPSEGSAPGSPAGSPTSTEEGSPAGSPTSTEEGTSESA | |
| | TPESGPGSEPATSGSETPGSPAGSPTSTEEGSPAGSPTSTEEGTSESATPESGPGSEPATSG | |
| | SETPGTSTEPSEGSAPGTSTEPSEGSAPGSEP | |
| AE1332 | GSPAGSPTSTEEGTSTEPSEGSAPGTSESATPESGPGTSESATPESGPGSEPATSGSETPGT | 103 |
| | STEPSEGSAPGTSESATPESGPGSPAGSPTSTEEGTSTEPSEGSAPGTSESATPESGPGSPA | |
| | GSPTSTEEGTSTEPSEGSAPGTSESATPESGPGTSTEPSEGSAPGSEPATSGSETPGSEPAT | |
| | SGSETPGSEPATSGSETPGTSESATPESGPGSPAGSPTSTEEGTSESATPESGPGSEPATSG | |
| | SETPGTSESATPESGPGTSESATPESGPGSPAGSPTSTEEGTSTEPSEGSAPGTSESATPES | |
| | GPGTSTEPSEGSAPGTSTEPSEGSAPGTSTEPSEGSAPGSEPATSGSETPGTSTEPSEGSAP | |
| | GTSESATPESGPGTSESATPESGPGTSTEPSEGSAPGTSESATPESGPGTSESATPESGPGS | |
| | EPATSGSETPGTSTEPSEGSAPGTSESATPESGPGSPAGSPTSTEEGSPAGSPTSTEEGTST | |
| | EPSEGSAPGSEPATSGSETPGSEPATSGSETPGTSTEPSEGSAPGSEPATSGSETPGSPAGS | |
| | PTSTEEGTSESATPESGPGSEPATSGSETPGSEPATSGSETPGTSESATPESGPGTSESATP | |
| | ESGPGTSTEPSEGSAPGSPAGSPTSTEEGTSESATPESGPGTSTEPSEGSAPGSEPATSGSE | |
| | TPGSPAGSPTSTEEGTSTEPSEGSAPGTSTEPSEGSAPGSEPATSGSETPGTSESATPESGP | |
| | GTSTEPSEGSAPGSPAGSPTSTEEGTSESATPESGPGTSESATPESGPGTSTEPSEGSAPGS | |
| | EPATSGSETPGSEPATSGSETPGTSTEPSEGSAPGTSESATPESGPGSPAGSPTSTEEGTST | |
| | EPSEGSAPGTSTEPSEGSAPGSPAGSPTSTEEGSPAGSPTSTEEGTSTEPSEGSAPGSEPAT | |
| | SGSETPGSPAGSPTSTEEGTSESATPESGPGSEPATSGSETPGSEPATSGSETPGTSESATP | |
| | ESGPGTSESATPESGPGTSTEPSEGSAPGTST | |
| AE1428 | GSEPATSGSETPGSPAGSPTSTEEGTSTEPSEGSAPGSEPATSGSETPGTSESATPESGPGT | 104 |
| | STEPSEGSAPGTSESATPESGPGSPAGSPTSTEEGTSTEPSEGSAPGTSTEPSEGSAPGSPA | |
| | GSPTSTEEGTSTEPSEGSAPGTSESATPESGPGSEPATSGSETPGTSESATPESGPGSEPAT | |
| | SGSETPGTSTEPSEGSAPGTSTEPSEGSAPGSEPATSGSETPGTSTEPSEGSAPGTSTEPSE | |
| | GSAPGSPAGSPTSTEEGTSTEPSEGSAPGTSESATPESGPGTSESATPESGPGTSTEPSEGS | |
| | APGTSTEPSEGSAPGSPAGSPTSTEEGSPAGSPTSTEEGTSTEPSEGSAPGSEPATSGSETP | |
| | GSPAGSPTSTEEGTSTEPSEGSAPGSPAGSPTSTEEGSPAGSPTSTEEGTSESATPESGPGS | |
| | EPATSGSETPGSEPATSGSETPGTSTEPSEGSAPGSPAGSPTSTEEGSPAGSPTSTEEGTSE | |
| | SATPESGPGSEPATSGSETPGSEPATSGSETPGTSESATPESGPGSEPATSGSETPGSEPAT | |
| | SGSETPGTSESATPESGPGTSESATPESGPGTSESATPESGPGTSESATPESGPGSPAGSPT | |
| | STEEGTSTEPSEGSAPGTSESATPESGPGTSTEPSEGSAPGTSTEPSEGSAPGTSESATPES | |
| | GPGTSTEPSEGSAPGTSESATPESGPGSPAGSPTSTEEGTSTEPSEGSAPGSEPATSGSETP | |
| | GTSTEPSEGSAPGSEPATSGSETPGTSTEPSEGSAPGTSTEPSEGSAPGSPAGSPTSTEEGT | |
| | SESATPESGPGTSTEPSEGSAPGSEPATSGSETPGTSESATPESGPGTSESATPESGPGTSE | |
| | SATPESGPGTSTEPSEGSAPGSEPATSGSETPGSPAGSPTSTEEGTSESATPESGPGTSTEP | |
| | SEGSAPGTSTEPSEGSAPGSPAGSPTSTEEGTSESATPESGPGTSTEPSEGSAPGTSTEPSE | |
| | GSAPGSPAGSPTSTEEGTSESATPESGPGSPA | |
| AE1524 | GTSTEPSEGSAPGTSTEPSEGSAPGTSTEPSEGSAPGTSTEPSEGSAPGSPAGSPTSTEEGS | 105 |
| | PAGSPTSTEEGTSESATPESGPGSEPATSGSETPGTSTEPSEGSAPGTSESATPESGPGTST | |
| | EPSEGSAPGTSESATPESGPGTSESATPESGPGSPAGSPTSTEEGTSTEPSEGSAPGSEPAT | |
| | SGSETPGTSTEPSEGSAPGSPAGSPTSTEEGTSTEPSEGSAPGSPAGSPTSTEEGSPAGSPT | |
| | STEEGSPAGSPTSTEEGTSESATPESGPGSEPATSGSETPGTSESATPESGPGTSESATPES | |
| | GPGSPAGSPTSTEEGTSTEPSEGSAPGSEPATSGSETPGTSTEPSEGSAPGSPAGSPTSTEE | |
| | GSPAGSPTSTEEGTSTEPSEGSAPGSEPATSGSETPGSPAGSPTSTEEGTSESATPESGPGS | |
| | EPATSGSETPGSPAGSPTSTEEGTSESATPESGPGTSESATPESGPGTSTEPSEGSAPGSEP | |
| | ATSGSETPGSEPATSGSETPGTSESATPESGPGSEPATSGSETPGTSTEPSEGSAPGSPAGS | |
| | PTSTEEGTSTEPSEGSAPGSEPATSGSETPGSEPATSGSETPGSPAGSPTSTEEGTSESATP | |
| | ESGPGTSTEPSEGSAPGSPAGSPTSTEEGSPAGSPTSTEEGTSESATPESGPGSPAGSPTST | |
| | EEGTSTEPSEGSAPGSEPATSGSETPGSEPATSGSETPGSEPATSGSETPGTSESATPESGP | |
| | GTSESATPESGPGTSTEPSEGSAPGTSTEPSEGSAPGSEPATSGSETPGTSTEPSEGSAPGT | |
| | SESATPESGPGSPAGSPTSTEEGSPAGSPTSTEEGTSTEPSEGSAPGTSESATPESGPGSPA | |
| | GSPTSTEEGTSTEPSEGSAPGSEPATSGSETPGTSESATPESGPGSEPATSGSETPGTSESA | |
| | TPESGPGSEPATSGSETPGSEPATSGSETPGTSTEPSEGSAPGTSESATPESGPGTSTEPSE | |
| | GSAPGTSTEPSEGSAPGTSESATPESGPGSPA | |
| AE1620 | GSEPATSGSETPGTSTEPSEGSAPGSEPATSGSETPGTSTEPSEGSAPGTSESATPESGPGT | 106 |
| | SESATPESGPGSEPATSGSETPGTSTEPSEGSAPGTSTEPSEGSAPGTSESATPESGPGTST | |
| | EPSEGSAPGTSTEPSEGSAPGSEPATSGSETPGSPAGSPTSTEEGTSESATPESGPGTSESA | |
| | TPESGPGTSTEPSEGSAPGTSESATPESGPGSEPATSGSETPGTSESATPESGPGTSESATP | |
| | ESGPGTSTEPSEGSAPGTSTEPSEGSAPGSEPATSGSETPGSPAGSPTSTEEGTSESATPES | |
| | GPGSEPATSGSETPGSEPATSGSETPGTSESATPESGPGTSESATPESGPGSPAGSPTSTEE | |
| | GTSTEPSEGSAPGTSESATPESGPGTSTEPSEGSAPGTSTEPSEGSAPGTSESATPESGPGT | |
| | STEPSEGSAPGSPAGSPTSTEEGSPAGSPTSTEEGTSESATPESGPGSEPATSGSETPGSEP | |
| | ATSGSETPGTSTEPSEGSAPGTSESATPESGPGSPAGSPTSTEEGSPAGSPTSTEEGTSTEP | |
| | SEGSAPGSPAGSPTSTEEGSPAGSPTSTEEGTSESATPESGPGSEPATSGSETPGTSTEPSE | |
| | GSAPGTSTEPSEGSAPGSEPATSGSETPGSPAGSPTSTEEGTSESATPESGPGSPAGSPTST | |
| | EEGTSTEPSEGSAPGTSESATPESGPGSEPATSGSETPGTSESATPESGPGTSESATPESGP | |
| | GSPAGSPTSTEEGTSTEPSEGSAPGSEPATSGSETPGSPAGSPTSTEEGTSTEPSEGSAPGS | |
| | EPATSGSETPGSEPATSGSETPGTSESATPESGPGTSESATPESGPGTSTEPSEGSAPGTSE | |
| | SATPESGPGSEPATSGSETPGTSESATPESGPGTSESATPESGPGTSTEPSEGSAPGTSESA | |
| | TPESGPGSEPATSGSETPGTSTEPSEGSAPGSPAGSPTSTEEGTSESATPESGPGTSTEPSE | |
| | GSAPGTSTEPSEGSAPGSPAGSPTSTEEGTST | |
| AE1716 | GTSESATPESGPGTSTEPSEGSAPGTSESATPESGPGTSTEPSEGSAPGSEPATSGSETPGS | 107 |
| | PAGSPTSTEEGTSESATPESGPGSEPATSGSETPGSEPATSGSETPGTSESATPESGPGTSE | |
| | SATPESGPGTSTEPSEGSAPGSEPATSGSETPGSEPATSGSETPGTSESATPESGPGTSESA | |
| | TPESGPGSEPATSGSETPGTSESATPESGPGSPAGSPTSTEEGSPAGSPTSTEEGTSTEPSE | |
| | GSAPGSEPATSGSETPGSPAGSPTSTEEGTSESATPESGPGSPAGSPTSTEEGTSTEPSEGS | |
| | APGSEPATSGSETPGSPAGSPTSTEEGTSESATPESGPGSPAGSPTSTEEGSPAGSPTSTEE | |
| | GTSTEPSEGSAPGSEPATSGSETPGSPAGSPTSTEEGTSESATPESGPGTSTEPSEGSAPGS | |
| | PAGSPTSTEEGTSESATPESGPGSEPATSGSETPGTSTEPSEGSAPGSPAGSPTSTEEGTST | |
| | EPSEGSAPGTSESATPESGPGTSESATPESGPGTSTEPSEGSAPGTSTEPSEGSAPGSEPAT | |
| | SGSETPGTSESATPESGPGTSESATPESGPGTSTEPSEGSAPGTSTEPSEGSAPGSPAGSPT | |
| | STEEGSPAGSPTSTEEGTSTEPSEGSAPGSEPATSGSETPGSEPATSGSETPGTSESATPES | |
| | GPGSPAGSPTSTEEGTSESATPESGPGTSTEPSEGSAPGTSTEPSEGSAPGSPAGSPTSTEE | |
| | GSPAGSPTSTEEGTSESATPESGPGSPAGSPTSTEEGTSTEPSEGSAPGSEPATSGSETPGS | |
| | PAGSPTSTEEGSPAGSPTSTEEGTSTEPSEGSAPGTSESATPESGPGTSESATPESGPGSPA | |
| | GSPTSTEEGTSTEPSEGSAPGSPAGSPTSTEEGTSTEPSEGSAPGSPAGSPTSTEEGTSTEP | |
| | SEGSAPGTSTEPSEGSAPGSEPATSGSETPGSPAGSPTSTEEGTSESATPESGPGSEPATSG | |
| | SETPGSPAGSPTSTEEGTSESATPESGPGTSE | |
| AE1812 | GTSESATPESGPGSPAGSPTSTEEGSPAGSPTSTEEGTSESATPESGPGSEPATSGSETPGT | 108 |
| | STEPSEGSAPGTSTEPSEGSAPGTSTEPSEGSAPGSPAGSPTSTEEGTSTEPSEGSAPGTSE | |
| | SATPESGPGTSESATPESGPGSPAGSPTSTEEGSPAGSPTSTEEGSPAGSPTSTEEGTSESA | |
| | TPESGPGSEPATSGSETPGTSESATPESGPGTSTEPSEGSAPGTSESATPESGPGTSTEPSE | |
| | GSAPGTSTEPSEGSAPGTSESATPESGPGSPAGSPTSTEEGTSESATPESGPGTSTEPSEGS | |
| | APGSPAGSPTSTEEGTSESATPESGPGSEPATSGSETPGTSTEPSEGSAPGSEPATSGSETP | |
| | GSEPATSGSETPGTSESATPESGPGTSESATPESGPGTSTEPSEGSAPGTSESATPESGPGS | |
| | PAGSPTSTEEGTSTEPSEGSAPGSEPATSGSETPGTSESATPESGPGSEPATSGSETPGTST | |
| | EPSEGSAPGTSESATPESGPGSPAGSPTSTEEGSPAGSPTSTEEGSPAGSPTSTEEGTSESA | |
| | TPESGPGSEPATSGSETPGTSESATPESGPGTSESATPESGPGSEPATSGSETPGTSTEPSE | |
| | GSAPGTSTEPSEGSAPGTSTEPSEGSAPGTSESATPESGPGSEPATSGSETPGTSESATPES | |
| | GPGSEPATSGSETPGTSTEPSEGSAPGSEPATSGSETPGSPAGSPTSTEEGTSESATPESGP | |
| | GTSESATPESGPGTSESATPESGPGSPAGSPTSTEEGTSTEPSEGSAPGTSESATPESGPGT | |
| | SESATPESGPGTSTEPSEGSAPGTSTEPSEGSAPGSPAGSPTSTEEGTSESATPESGPGSEP | |
| | ATSGSETPGTSESATPESGPGTSESATPESGPGTSTEPSEGSAPGSEPATSGSETPGTSESA | |
| | TPESGPGSPAGSPTSTEEGTSTEPSEGSAPGSEPATSGSETPGSPAGSPTSTEEGTSESATP | |
| | ESGPGSPAGSPTSTEEGTSTEPSEGSAPGSEP | |
| AE1908 | GSEPATSGSETPGTSTEPSEGSAPGTSESATPESGPGSEPATSGSETPGTSTEPSEGSAPGS | 109 |
| | PAGSPTSTEEGTSESATPESGPGSPAGSPTSTEEGTSTEPSEGSAPGSEPATSGSETPGTST | |
| | EPSEGSAPGTSESATPESGPGSEPATSGSETPGSEPATSGSETPGTSESATPESGPGTSTEP | |
| | SEGSAPGTSESATPESGPGTSESATPESGPGSPAGSPTSTEEGSPAGSPTSTEEGTSESATP | |
| | ESGPGTSESATPESGPGTSTEPSEGSAPGTSTEPSEGSAPGSPAGSPTSTEEGTSTEPSEGS | |
| | APGSEPATSGSETPGSEPATSGSETPGSEPATSGSETPGSEPATSGSETPGTSESATPESGP | |
| | GTSESATPESGPGTSESATPESGPGTSTEPSEGSAPGTSESATPESGPGTSESATPESGPGT | |
| | STEPSEGSAPGSPAGSPTSTEEGTSTEPSEGSAPGSEPATSGSETPGSPAGSPTSTEEGTSE | |
| | SATPESGPGTSTEPSEGSAPGSEPATSGSETPGTSESATPESGPGTSESATPESGPGTSTEP | |
| | SEGSAPGSEPATSGSETPGSPAGSPTSTEEGTSESATPESGPGTSESATPESGPGTSTEPSE | |
| | GSAPGSEPATSGSETPGSPAGSPTSTEEGTSESATPESGPGSEPATSGSETPGTSTEPSEGS | |
| | APGSEPATSGSETPGSPAGSPTSTEEGTSESATPESGPGTSTEPSEGSAPGSEPATSGSETP | |
| | GTSESATPESGPGTSESATPESGPGSPAGSPTSTEEGTSTEPSEGSAPGSPAGSPTSTEEGS | |
| | PAGSPTSTEEGSPAGSPTSTEEGTSESATPESGPGSEPATSGSETPGTSTEPSEGSAPGTST | |
| | EPSEGSAPGTSESATPESGPGTSTEPSEGSAPGTSESATPESGPGSEPATSGSETPGTSTEP | |
| | SEGSAPGTSESATPESGPGSPAGSPTSTEEGSPAGSPTSTEEGSPAGSPTSTEEGTSESATP | |
| | ESGPGSPAGSPTSTEEGTSESATPESGPGSEP | |
| AE2004A | GTSTEPSEGSAPGSEPATSGSETPGTSTEPSEGSAPGTSTEPSEGSAPGSEPATSGSETPGS | 110 |
| | PAGSPTSTEEGSPAGSPTSTEEGTSESATPESGPGSEPATSGSETPGTSTEPSEGSAPGTST | |
| | EPSEGSAPGSPAGSPTSTEEGTSESATPESGPGTSESATPESGPGSPAGSPTSTEEGTSTEP | |
| | SEGSAPGTSESATPESGPGTSTEPSEGSAPGSEPATSGSETPGTSESATPESGPGSEPATSG | |
| | SETPGTSTEPSEGSAPGTSTEPSEGSAPGSPAGSPTSTEEGSPAGSPTSTEEGTSESATPES | |
| | GPGSPAGSPTSTEEGTSTEPSEGSAPGSEPATSGSETPGSEPATSGSETPGSPAGSPTSTEE | |
| | GTSESATPESGPGTSTEPSEGSAPGSEPATSGSETPGTSESATPESGPGSEPATSGSETPGS | |
| | PAGSPTSTEEGTSESATPESGPGTSESATPESGPGSEPATSGSETPGTSESATPESGPGTSE | |
| | SATPESGPGTSESATPESGPGTSTEPSEGSAPGTSESATPESGPGSEPATSGSETPGTSTEP | |
| | SEGSAPGSPAGSPTSTEEGTSTEPSEGSAPGSEPATSGSETPGSPAGSPTSTEEGTSESATP | |
| | ESGPGTSESATPESGPGTSTEPSEGSAPGTSESATPESGPGTSTEPSEGSAPGTSESATPES | |
| | GPGSEPATSGSETPGTSTEPSEGSAPGTSTEPSEGSAPGSPAGSPTSTEEGSPAGSPTSTEE | |
| | GTSESATPESGPGTSTEPSEGSAPGTSESATPESGPGSPAGSPTSTEEGSPAGSPTSTEEGS | |
| | PAGSPTSTEEGTSTEPSEGSAPGSPAGSPTSTEEGSPAGSPTSTEEGTSESATPESGPGSEP | |
| | ATSGSETPGSEPATSGSETPGTSESATPESGPGSEPATSGSETPGTSESATPESGPGTSTEP | |
| | SEGSAPGTSTEPSEGSAPGSPAGSPTSTEEGSPAGSPTSTEEGTSESATPESGPGSPAGSPT | |
| | STEEGTSTEPSEGSAPGTSESATPESGPGTSE | |
| AG948 | GSSTPSGATGSPGTPGSGTASSSPGASPGTSSTGSPGSSPSASTGTGPGTPGSGTASSSPG | 111 |
| | TPGSGTASSSPGTPGSGTASSSPGSSPSASTGTGPGTPGSGTASSSPGSSPSASTGTGPGSS | |
| | TPSGATGSPGSSTPSGATGSPGSSPSASTGTGPGSSTPSGATGSPGASPGTSSTGSPGASP | |
| | GTSSTGSPGSSPSASTGTGPGSSPSASTGTGPGASPGTSSTGSPGSSPSASTGTGPGASPG | |
| | TSSTGSPGSSPSASTGTGPGASPGTSSTGSPGTPGSGTASSSPGTPGSGTASSSPGSSTPSG | |
| | ATGSPGSSTPSGATGSPGSSTPSGATGSPGASPGTSSTGSPGSSPSASTGTGPGASPGTSS | |
| | TGSPGASPGTSSTGSPGSSTPSGATGSPGSSPSASTGTGPGSSPSASTGTGPGTPGSGTAS | |
| | SSPGASPGTSSTGSPGTPGSGTASSSPGSSTPSGATGSPGSSTPSGATGSPGSSPSASTGTG | |
| | PGSSPSASTGTGPGSSTPSGATGSPGASPGTSSTGSPGTPGSGTASSSPGSSPSASTGTGP | |
| | GSSTPSGATGSPGASPGTSSTGSPGSSTPSGATGSPGTPGSGTASSSPGSSPSASTGTGPG | |
| | SSTPSGATGSPGASPGTSSTGSPGASPGTSSTGSPGTPGSGTASSSPGTPGSGTASSSPGSS | |
| | PSASTGTGPGASPGTSSTGSPGASPGTSSTGSPGTPGSGTASSSPGTPGSGTASSSPGSSTP | |
| | SGATGSPGSSPSASTGTGPGSSTPSGATGSPGSSPSASTGTGPGSSPSASTGTGPGTPGSG | |
| | TASSSPGSSTPSGATGSPGASPGTSSTGSPGTPGSGTASSSPGTPGSGTASSSPGSSTPSGA | |
| | TGSPGTPGSGTASSSPGASPGTSSTGSPGSSTPSGATGSPGSSTPSGATGSPGTPGSGTAS | |
| | SSPGSSTPSGATGSPGSSTPSGATGSP | |
| AG1044 | GTPGSGTASSSPGTPGSGTASSSPGSSPSASTGTGPGTPGSGTASSSPGASPGTSSTGSPG | 112 |
| | TPGSGTASSSPGSSPSASTGTGPGSSTPSGATGSPGASPGTSSTGSPGASPGTSSTGSPGSS | |
| | PSASTGTGPGSSTPSGATGSPGSSPSASTGTGPGSSPSASTGTGPGTPGSGTASSSPGTPG | |
| | SGTASSSPGASPGTSSTGSPGSSTPSGATGSPGSSPSASTGTGPGTPGSGTASSSPGASPG | |
| | TSSTGSPGTPGSGTASSSPGSSPSASTGTGPGSSPSASTGTGPGASPGTSSTGSPGASPGTS | |
| | STGSPGSSTPSGATGSPGSSTPSGATGSPGTPGSGTASSSPGSSPSASTGTGPGSSTPSGAT | |
| | GSPGASPGTSSTGSPGSSTPSGATGSPGSSTPSGATGSPGSSPSASTGTGPGASPGTSSTG | |
| | SPGTPGSGTASSSPGASPGTSSTGSPGSSPSASTGTGPGTPGSGTASSSPGASPGTSSTGSP | |
| | GASPGTSSTGSPGSSTPSGATGSPGTPGSGTASSSPGSSTPSGATGSPGASPGTSSTGSPG | |
| | TPGSGTASSSPGTPGSGTASSSPGSSTPSGATGSPGSSTPSGATGSPGTPGSGTASSSPGSS | |
| | TPSGATGSPGSSTPSGATGSPGASPGTSSTGSPGSSPSASTGTGPGSSPSASTGTGPGASP | |
| | GTSSTGSPGASPGTSSTGSPGTPGSGTASSSPGSSPSASTGTGPGTPGSGTASSSPGSSTPS | |
| | GATGSPGSSTPSGATGSPGASPGTSSTGSPGSSPSASTGTGPGASPGTSSTGSPGSSPSAS | |
| | TGTGPGSSPSASTGTGPGASPGTSSTGSPGASPGTSSTGSPGSSTPSGATGSPGASPGTSS | |
| | TGSPGASPGTSSTGSPGTPGSGTASSSPGTPGSGTASSSPGTPGSGTASSSPGSSTPSGAT | |
| | GSPGSSTPSGATGSPGSSPSASTGTGPGSSPSASTGTGPGTPGSGTASSSPGSSPSASTGT | |
| | GPGASPGTSSTGSPGSSTPSGATGSPGTPGSGTASSSPGSST | |
| AG1140 | GASPGTSSTGSPGSSPSASTGTGPGSSTPSGATGSPGASPGTSSTGSPGASPGTSSTGSPG | 113 |
| | SSTPSGATGSPGTPGSGTASSSPGASPGTSSTGSPGTPGSGTASSSPGTPGSGTASSSPGSS | |
| | TPSGATGSPGSSTPSGATGSPGTPGSGTASSSPGSSTPSGATGSPGSSTPSGATGSPGSSPS | |
| | ASTGTGPGSSPSASTGTGPGASPGTSSTGSPGTPGSGTASSSPGASPGTSSTGSPGSSTPS | |
| | GATGSPGTPGSGTASSSPGSSPSASTGTGPGSSTPSGATGSPGSSPSASTGTGPGSSTPSG | |
| | ATGSPGASPGTSSTGSPGSSPSASTGTGPGTPGSGTASSSPGASPGTSSTGSPGSSTPSGA | |
| | TGSPGASPGTSSTGSPGSSPSASTGTGPGTPGSGTASSSPGTPGSGTASSSPGASPGTSST | |
| | GSPGTPGSGTASSSPGTPGSGTASSSPGSSPSASTGTGPGASPGTSSTGSPGSSTPSGATG | |
| | SPGASPGTSSTGSPGSSPSASTGTGPGTPGSGTASSSPGSSPSASTGTGPGSSPSASTGTGP | |
| | GASPGTSSTGSPGASPGTSSTGSPGTPGSGTASSSPGASPGTSSTGSPGASPGTSSTGSPG | |
| | TPGSGTASSSPGTPGSGTASSSPGSSTPSGATGSPGSSTPSGATGSPGTPGSGTASSSPGSS | |
| | PSASTGTGPGTPGSGTASSSPGSSTPSGATGSPGSSTPSGATGSPGASPGTSSTGSPGTPG | |
| | SGTASSSPGASPGTSSTGSPGSSTPSGATGSPGSSTPSGATGSPGTPGSGTASSSPGSSTPS | |
| | GATGSPGSSTPSGATGSPGASPGTSSTGSPGSSPSASTGTGPGSSTPSGATGSPGSSTPSG | |
| | ATGSPGSSPSASTGTGPGSSPSASTGTGPGSSTPSGATGSPGASPGTSSTGSPGSSPSAST | |
| | GTGPGTPGSGTASSSPGASPGTSSTGSPGSSPSASTGTGPGASPGTSSTGSPGSSTPSGAT | |
| | GSPGSSPSASTGTGPGSSPSASTGTGPGASPGTSSTGSPGSST | |
| AG1236 | GSSPSASTGTGPGTPGSGTASSSPGSSPSASTGTGPGSSPSASTGTGPGTPGSGTASSSPG | 114 |
| | ASPGTSSTGSPGSSTPSGATGSPGTPGSGTASSSPGASPGTSSTGSPGTPGSGTASSSPGTP | |
| | GSGTASSSPGSSPSASTGTGPGSSPSASTGTGPGSSTPSGATGSPGASPGTSSTGSPGSSPS | |
| | ASTGTGPGTPGSGTASSSPGTPGSGTASSSPGSSTPSGATGSPGASPGTSSTGSPGSSPSA | |
| | STGTGPGTPGSGTASSSPGTPGSGTASSSPGASPGTSSTGSPGSSTPSGATGSPGSSTPSG | |
| | ATGSPGSSPSASTGTGPGSSPSASTGTGPGASPGTSSTGSPGSSPSASTGTGPGSSTPSGA | |
| | TGSPGASPGTSSTGSPGASPGTSSTGSPGSSTPSGATGSPGSSPSASTGTGPGASPGTSST | |
| | GSPGASPGTSSTGSPGTPGSGTASSSPGSSTPSGATGSPGASPGTSSTGSPGSSTPSGATG | |
| | SPGTPGSGTASSSPGSSPSASTGTGPGSSTPSGATGSPGTPGSGTASSSPGSSTPSGATGSP | |
| | GSSTPSGATGSPGASPGTSSTGSPGSSPSASTGTGPGSSPSASTGTGPGASPGTSSTGSPG | |
| | SSPSASTGTGPGTPGSGTASSSPGTPGSGTASSSPGASPGTSSTGSPGTPGSGTASSSPGA | |
| | SPGTSSTGSPGTPGSGTASSSPGASPGTSSTGSPGSSTPSGATGSPGASPGTSSTGSPGSSP | |
| | SASTGTGPGTPGSGTASSSPGTPGSGTASSSPGSSPSASTGTGPGTPGSGTASSSPGASPG | |
| | TSSTGSPGSSTPSGATGSPGTPGSGTASSSPGASPGTSSTGSPGTPGSGTASSSPGTPGSG | |
| | TASSSPGSSTPSGATGSPGTPGSGTASSSPGSSPSASTGTGPGSSTPSGATGSPGTPGSGT | |
| | ASSSPGSSTPSGATGSPGSSTPSGATGSPGSSPSASTGTGPGASPGTSSTGSPGTPGSGTA | |
| | SSSPGSSPSASTGTGPGSSPSASTGTGPGASPGTSSTGSPGASP | |
| AG1332 | GSSTPSGATGSPGSSPSASTGTGPGTPGSGTASSSPGSSPSASTGTGPGASPGTSSTGSPG | 115 |
| | SSPSASTGTGPGTPGSGTASSSPGASPGTSSTGSPGSSTPSGATGSPGSSPSASTGTGPGSS | |
| | TPSGATGSPGASPGTSSTGSPGTPGSGTASSSPGASPGTSSTGSPGSSTPSGATGSPGSSTP | |
| | SGATGSPGSSPSASTGTGPGTPGSGTASSSPGSSTPSGATGSPGSSTPSGATGSPGSSPSA | |
| | STGTGPGTPGSGTASSSPGASPGTSSTGSPGTPGSGTASSSPGASPGTSSTGSPGASPGTS | |
| | STGSPGTPGSGTASSSPGTPGSGTASSSPGSSTPSGATGSPGSSTPSGATGSPGSSTPSGAT | |
| | GSPGASPGTSSTGSPGSSPSASTGTGPGSSTPSGATGSPGSSPSASTGTGPGSSTPSGATG | |
| | SPGTPGSGTASSSPGSSPSASTGTGPGSSTPSGATGSPGASPGTSSTGSPGASPGTSSTGSP | |
| | GSSPSASTGTGPGASPGTSSTGSPGSSTPSGATGSPGASPGTSSTGSPGTPGSGTASSSPG | |
| | TPGSGTASSSPGSSPSASTGTGPGTPGSGTASSSPGSSTPSGATGSPGSSPSASTGTGPGSS | |
| | TPSGATGSPGTPGSGTASSSPGTPGSGTASSSPGSSPSASTGTGPGSSTPSGATGSPGSSTP | |
| | SGATGSPGSSPSASTGTGPGSSPSASTGTGPGASPGTSSTGSPGASPGTSSTGSPGSSTPS | |
| | GATGSPGASPGTSSTGSPGSSPSASTGTGPGTPGSGTASSSPGASPGTSSTGSPGASPGTS | |
| | STGSPGTPGSGTASSSPGTPGSGTASSSPGSSPSASTGTGPGTPGSGTASSSPGASPGTSST | |
| | GSPGSSTPSGATGSPGTPGSGTASSSPGTPGSGTASSSPGSSTPSGATGSPGSSTPSGATG | |
| | SPGTPGSGTASSSPGSSPSASTGTGPGSSPSASTGTGPGASPGTSSTGSPGSSPSASTGTGP | |
| | GSSPSASTGTGPGASPGTSSTGSPGASPGTSSTGSPGTPG | |
| AG1428 | GTPGSGTASSSPGSSTPSGATGSPGASPGTSSTGSPGSSTPSGATGSPGTPGSGTASSSPG | 116 |
| | TPGSGTASSSPGSSTPSGATGSPGSSTPSGATGSPGASPGTSSTGSPGSSPSASTGTGPGSS | |
| | TPSGATGSPGASPGTSSTGSPGSSPSASTGTGPGTPGSGTASSSPGASPGTSSTGSPGASP | |
| | GTSSTGSPGTPGSGTASSSPGTPGSGTASSSPGASPGTSSTGSPGASPGTSSTGSPGTPGS | |
| | GTASSSPGTPGSGTASSSPGSSPSASTGTGPGSSPSASTGTGPGASPGTSSTGSPGSSPSAS | |
| | TGTGPGSSPSASTGTGPGASPGTSSTGSPGASPGTSSTGSPGTPGSGTASSSPGTPGSGTA | |
| | SSSPGSSPSASTGTGPGASPGTSSTGSPGSSTPSGATGSPGASPGTSSTGSPGSSPSASTGT | |
| | GPGSSTPSGATGSPGSSPSASTGTGPGSSPSASTGTGPGASPGTSSTGSPGSSPSASTGTG | |
| | PGSSPSASTGTGPGASPGTSSTGSPGASPGTSSTGSPGSSPSASTGTGPGTPGSGTASSSP | |
| | GASPGTSSTGSPGSSTPSGATGSPGTPGSGTASSSPGTPGSGTASSSPGSSPSASTGTGPG | |
| | SSTPSGATGSPGASPGTSSTGSPGASPGTSSTGSPGSSTPSGATGSPGSSPSASTGTGPGA | |
| | SPGTSSTGSPGSSTPSGATGSPGTPGSGTASSSPGASPGTSSTGSPGTPGSGTASSSPGASP | |
| | GTSSTGSPGSSTPSGATGSPGSSTPSGATGSPGASPGTSSTGSPGSSPSASTGTGPGTPGS | |
| | GTASSSPGTPGSGTASSSPGSSTPSGATGSPGTPGSGTASSSPGASPGTSSTGSPGSSTPSG | |
| | ATGSPGTPGSGTASSSPGSSPSASTGTGPGSSTPSGATGSPGSSTPSGATGSPGSSPSAST | |
| | GTGPGSSTPSGATGSPGTPGSGTASSSPGSSPSASTGTGPGTPGSGTASSSPGSSTPSGAT | |
| | GSPGSSPSASTGTGPGSSPSASTGTGPGTPGSGTASSSPGASP | |
| AG1524 | GSSTPSGATGSPGTPGSGTASSSPGTPGSGTASSSPGASPGTSSTGSPGSSTPSGATGSPG | 117 |
| | TPGSGTASSSPGSSTPSGATGSPGSSPSASTGTGPGSSTPSGATGSPGTPGSGTASSSPGTP | |
| | GSGTASSSPGSSPSASTGTGPGSSTPSGATGSPGSSPSASTGTGPGTPGSGTASSSPGASP | |
| | GTSSTGSPGSSTPSGATGSPGASPGTSSTGSPGTPGSGTASSSPGSSTPSGATGSPGTPGS | |
| | GTASSSPGSSPSASTGTGPGASPGTSSTGSPGASPGTSSTGSPGTPGSGTASSSPGSSTPSG | |
| | ATGSPGSSTPSGATGSPGSSPSASTGTGPGSSPSASTGTGPGASPGTSSTGSPGTPGSGTA | |
| | SSSPGTPGSGTASSSPGSSPSASTGTGPGASPGTSSTGSPGASPGTSSTGSPGTPGSGTASS | |
| | SPGSSPSASTGTGPGASPGTSSTGSPGASPGTSSTGSPGSSTPSGATGSPGSSPSASTGTGP | |
| | GSSPSASTGTGPGTPGSGTASSSPGTPGSGTASSSPGASPGTSSTGSPGSSTPSGATGSPG | |
| | TPGSGTASSSPGASPGTSSTGSPGTPGSGTASSSPGTPGSGTASSSPGSSTPSGATGSPGSS | |
| | TPSGATGSPGTPGSGTASSSPGSSPSASTGTGPGSSTPSGATGSPGSSTPSGATGSPGSSPS | |
| | ASTGTGPGTPGSGTASSSPGSSPSASTGTGPGASPGTSSTGSPGSSPSASTGTGPGTPGSG | |
| | TASSSPGASPGTSSTGSPGASPGTSSTGSPGTPGSGTASSSPGTPGSGTASSSPGSSTPSGA | |
| | TGSPGTPGSGTASSSPGASPGTSSTGSPGSSTPSGATGSPGSSTPSGATGSPGSSTPSGAT | |
| | GSPGTPGSGTASSSPGSSPSASTGTGPGSSPSASTGTGPGSSPSASTGTGPGASPGTSSTG | |
| | SPGASPGTSSTGSPGSSPSASTGTGPGTPGSGTASSSPGASPGTSSTGSPGSSTPSGATGSP | |
| | GASPGTSSTGSPGASPGTSSTGSPGSSTPSGATGSPGTPG | |
| AG1620 | GSSTPSGATGSPGSSTPSGATGSPGTPGSGTASSSPGSSPSASTGTGPGTPGSGTASSSPG | 118 |
| | ASPGTSSTGSPGSSTPSGATGSPGASPGTSSTGSPGTPGSGTASSSPGASPGTSSTGSPGSS | |
| | PSASTGTGPGTPGSGTASSSPGASPGTSSTGSPGSSTPSGATGSPGSSPSASTGTGPGSSTP | |
| | SGATGSPGASPGTSSTGSPGASPGTSSTGSPGASPGTSSTGSPGSSTPSGATGSPGASPGT | |
| | SSTGSPGTPGSGTASSSPGSSTPSGATGSPGSSTPSGATGSPGSSPSASTGTGPGSSPSAST | |
| | GTGPGSSTPSGATGSPGSSPSASTGTGPGSSPSASTGTGPGASPGTSSTGSPGASPGTSST | |
| | GSPGTPGSGTASSSPGSSPSASTGTGPGSSPSASTGTGPGASPGTSSTGSPGSSPSASTGT | |
| | GPGTPGSGTASSSPGSSPSASTGTGPGSSTPSGATGSPGASPGTSSTGSPGSSTPSGATGS | |
| | PGTPGSGTASSSPGSSPSASTGTGPGASPGTSSTGSPGSSTPSGATGSPGASPGTSSTGSP | |
| | GASPGTSSTGSPGTPGSGTASSSPGASPGTSSTGSPGASPGTSSTGSPGSSTPSGATGSPG | |
| | TPGSGTASSSPGSSPSASTGTGPGSSTPSGATGSPGTPGSGTASSSPGSSTPSGATGSPGSS | |
| | TPSGATGSPGSSPSASTGTGPGSSPSASTGTGPGSSTPSGATGSPGASPGTSSTGSPGSSPS | |
| | ASTGTGPGTPGSGTASSSPGASPGTSSTGSPGSSPSASTGTGPGSSTPSGATGSPGSSPSA | |
| | STGTGPGSSTPSGATGSPGSSPSASTGTGPGTPGSGTASSSPGTPGSGTASSSPGSSTPSG | |
| | ATGSPGSSTPSGATGSPGTPGSGTASSSPGSSPSASTGTGPGSSTPSGATGSPGSSPSAST | |
| | GTGPGSSPSASTGTGPGSSTPSGATGSPGASPGTSSTGSPGASPGTSSTGSPGTPGSGTAS | |
| | SSPGTPGSGTASSSPGTPGSGTASSSPGSSTPSGATGSPGSST | |
| AG1716 | GASPGTSSTGSPGSSPSASTGTGPGSSTPSGATGSPGSSPSASTGTGPGTPGSGTASSSPG | 119 |
| | SSTPSGATGSPGSSTPSGATGSPGSSPSASTGTGPGSSTPSGATGSPGTPGSGTASSSPGSS | |
| | PSASTGTGPGSSTPSGATGSPGASPGTSSTGSPGSSPSASTGTGPGSSPSASTGTGPGTPG | |
| | SGTASSSPGASPGTSSTGSPGSSTPSGATGSPGSSPSASTGTGPGASPGTSSTGSPGSSTPS | |
| | GATGSPGTPGSGTASSSPGSSPSASTGTGPGSSPSASTGTGPGSSPSASTGTGPGTPGSGT | |
| | ASSSPGTPGSGTASSSPGSSTPSGATGSPGTPGSGTASSSPGSSPSASTGTGPGASPGTSST | |
| | GSPGASPGTSSTGSPGTPGSGTASSSPGSSPSASTGTGPGASPGTSSTGSPGTPGSGTASS | |
| | SPGSSTPSGATGSPGSSTPSGATGSPGASPGTSSTGSPGTPGSGTASSSPGSSPSASTGTGP | |
| | GTPGSGTASSSPGASPGTSSTGSPGSSTPSGATGSPGASPGTSSTGSPGASPGTSSTGSPG | |
| | TPGSGTASSSPGTPGSGTASSSPGSSPSASTGTGPGSSPSASTGTGPGSSPSASTGTGPGTP | |
| | GSGTASSSPGASPGTSSTGSPGSSTPSGATGSPGASPGTSSTGSPGSSPSASTGTGPGASP | |
| | GTSSTGSPGSSPSASTGTGPGASPGTSSTGSPGSSPSASTGTGPGSSPSASTGTGPGTPGS | |
| | GTASSSPGASPGTSSTGSPGTPGSGTASSSPGTPGSGTASSSPGASPGTSSTGSPGSSTPSG | |
| | ATGSPGSSTPSGATGSPGSSPSASTGTGPGSSTPSGATGSPGTPGSGTASSSPGSSPSAST | |
| | GTGPGSSTPSGATGSPGSSTPSGATGSPGSSPSASTGTGPGSSPSASTGTGPGASPGTSST | |
| | GSPGTPGSGTASSSPGSSPSASTGTGPGSSTPSGATGSPGASPGTSSTGSPGASPGTSSTG | |
| | SPGSSPSASTGTGPGASPGTSSTGSPGASPGTSSTGSPGTPG | |
| AG1812 | GSSTPSGATGSPGSSPSASTGTGPGASPGTSSTGSPGASPGTSSTGSPGTPGSGTASSSPG | 120 |
| | SSPSASTGTGPGASPGTSSTGSPGSSTPSGATGSPGSSTPSGATGSPGASPGTSSTGSPGSS | |
| | PSASTGTGPGTPGSGTASSSPGTPGSGTASSSPGASPGTSSTGSPGSSTPSGATGSPGSSTP | |
| | SGATGSPGSSPSASTGTGPGTPGSGTASSSPGASPGTSSTGSPGSSTPSGATGSPGTPGSG | |
| | TASSSPGSSPSASTGTGPGSSTPSGATGSPGTPGSGTASSSPGSSPSASTGTGPGTPGSGT | |
| | ASSSPGASPGTSSTGSPGSSTPSGATGSPGSSTPSGATGSPGTPGSGTASSSPGSSTPSGAT | |
| | GSPGSSTPSGATGSPGASPGTSSTGSPGASPGTSSTGSPGASPGTSSTGSPGSSTPSGATG | |
| | SPGTPGSGTASSSPGSSPSASTGTGPGTPGSGTASSSPGASPGTSSTGSPGTPGSGTASSSP | |
| | GASPGTSSTGSPGSSTPSGATGSPGSSPSASTGTGPGSSPSASTGTGPGTPGSGTASSSPG | |
| | ASPGTSSTGSPGASPGTSSTGSPGTPGSGTASSSPGASPGTSSTGSPGSSTPSGATGSPGSS | |
| | TPSGATGSPGSSPSASTGTGPGASPGTSSTGSPGASPGTSSTGSPGTPGSGTASSSPGTPG | |
| | SGTASSSPGSSTPSGATGSPGSSPSASTGTGPGSSPSASTGTGPGASPGTSSTGSPGASPG | |
| | TSSTGSPGSSTPSGATGSPGSSPSASTGTGPGASPGTSSTGSPGSSTPSGATGSPGTPGSG | |
| | TASSSPGSSPSASTGTGPGASPGTSSTGSPGSSTPSGATGSPGTPGSGTASSSPGSSTPSGA | |
| | TGSPGSSTPSGATGSPGSSTPSGATGSPGSSPSASTGTGPGSSPSASTGTGPGSSTPSGAT | |
| | GSPGSSPSASTGTGPGSSPSASTGTGPGSSTPSGATGSPGASPGTSSTGSPGASPGTSSTG | |
| | SPGTPGSGTASSSPGASPGTSSTGSPGSSTPSGATGSPGASP | |
| AG1908 | GSSPSASTGTGPGSSPSASTGTGPGSSPSASTGTGPGTPGSGTASSSPGSSPSASTGTGPG | 121 |
| | SSPSASTGTGPGASPGTSSTGSPGSSPSASTGTGPGTPGSGTASSSPGTPGSGTASSSPGA | |
| | SPGTSSTGSPGTPGSGTASSSPGTPGSGTASSSPGSSPSASTGTGPGSSTPSGATGSPGSSP | |
| | SASTGTGPGASPGTSSTGSPGSSPSASTGTGPGASPGTSSTGSPGASPGTSSTGSPGTPGS | |
| | GTASSSPGTPGSGTASSSPGASPGTSSTGSPGTPGSGTASSSPGTPGSGTASSSPGSSPSAS | |
| | TGTGPGSSTPSGATGSPGASPGTSSTGSPGSSTPSGATGSPGSSPSASTGTGPGSSPSAST | |
| | GTGPGSSTPSGATGSPGASPGTSSTGSPGSSPSASTGTGPGTPGSGTASSSPGASPGTSST | |
| | GSPGASPGTSSTGSPGTPGSGTASSSPGTPGSGTASSSPGSSTPSGATGSPGTPGSGTASS | |
| | SPGASPGTSSTGSPGSSTPSGATGSPGTPGSGTASSSPGSSPSASTGTGPGSSPSASTGTGP | |
| | GSSTPSGATGSPGASPGTSSTGSPGASPGTSSTGSPGTPGSGTASSSPGTPGSGTASSSPG | |
| | SSTPSGATGSPGSSPSASTGTGPGSSPSASTGTGPGASPGTSSTGSPGASPGTSSTGSPGSS | |
| | TPSGATGSPGASPGTSSTGSPGASPGTSSTGSPGTPGSGTASSSPGTPGSGTASSSPGTPG | |
| | SGTASSSPGSSTPSGATGSPGSSTPSGATGSPGSSPSASTGTGPGSSPSASTGTGPGSSTPS | |
| | GATGSPGTPGSGTASSSPGSSPSASTGTGPGASPGTSSTGSPGSSTPSGATGSPGSSPSAS | |
| | TGTGPGSSTPSGATGSPGASPGTSSTGSPGSSPSASTGTGPGTPGSGTASSSPGSSPSAST | |
| | GTGPGSSTPSGATGSPGASPGTSSTGSPGSSPSASTGTGPGTPGSGTASSSPGSSTPSGAT | |
| | GSPGSSTPSGATGSPGASPGTSSTGSPGSSPSASTGTGPGSSP | |
| AG2004A | GSSPSASTGTGPGTPGSGTASSSPGSSTPSGATGSPGTPGSGTASSSPGSSTPSGATGSPG | 122 |
| | SSTPSGATGSPGSSPSASTGTGPGSSPSASTGTGPGSSPSASTGTGPGTPGSGTASSSPGA | |
| | SPGTSSTGSPGSSTPSGATGSPGTPGSGTASSSPGTPGSGTASSSPGSSTPSGATGSPGSST | |
| | PSGATGSPGSSPSASTGTGPGASPGTSSTGSPGASPGTSSTGSPGASPGTSSTGSPGASPG | |
| | TSSTGSPGTPGSGTASSSPGTPGSGTASSSPGSSPSASTGTGPGSSTPSGATGSPGASPGTS | |
| | STGSPGSSTPSGATGSPGSSTPSGATGSPGSSPSASTGTGPGASPGTSSTGSPGTPGSGTA | |
| | SSSPGSSPSASTGTGPGSSPSASTGTGPGASPGTSSTGSPGASPGTSSTGSPGTPGSGTASS | |
| | SPGASPGTSSTGSPGTPGSGTASSSPGTPGSGTASSSPGSSTPSGATGSPGTPGSGTASSSP | |
| | GASPGTSSTGSPGSSTPSGATGSPGSSTPSGATGSPGSSPSASTGTGPGSSTPSGATGSPG | |
| | SSTPSGATGSPGASPGTSSTGSPGSSPSASTGTGPGTPGSGTASSSPGASPGTSSTGSPGSS | |
| | PSASTGTGPGTPGSGTASSSPGSSPSASTGTGPGTPGSGTASSSPGASPGTSSTGSPGASP | |
| | GTSSTGSPGTPGSGTASSSPGTPGSGTASSSPGSSTPSGATGSPGSSTPSGATGSPGTPGS | |
| | GTASSSPGSSTPSGATGSPGSSTPSGATGSPGASPGTSSTGSPGSSPSASTGTGPGSSTPSG | |
| | ATGSPGSSPSASTGTGPGSSPSASTGTGPGASPGTSSTGSPGSSTPSGATGSPGASPGTSS | |
| | TGSPGTPGSGTASSSPGTPGSGTASSSPGSSPSASTGTGPGASPGTSSTGSPGSSTPSGAT | |
| | GSPGSSPSASTGTGPGSSPSASTGTGPGASPGTSSTGSPGTPGSGTASSSPGSSTPSGATG | |
| | SPGTPGSGTASSSPGSSPSASTGTGPGSSPSASTGTGPGASP | |
| AE72B | SPAGSPTSTEEGSPAGSPTSTEEGTSESATPESGPGTSTEPSEGSAPGTSESATPESGPGSE | 123 |
| | PATSGSETPG | |
| AE72C | TSESATPESGPGTSESATPESGPGSEPATSGSETPGSEPATSGSETPGSPAGSPTSTEEGTS | 124 |
| | TEPSEGSAPG | |
| AE108A | TEEGTSESATPESGPGTSTEPSEGSAPGSPAGSPTSTEEGTSTEPSEGSAPGTSTEPSEGSA | 125 |
| | PGTSESATPESGPGSEPATSGSETPGSEPATSGSETPGSPAGSPTS | |
| AE108B | GSPAGSPTSTEEGTSTEPSEGSAPGTSESATPESGPGTSESATPESGPGTSESATPESGPGS | 126 |
| | EPATSGSETPGSEPATSGSETPGSPAGSPTSTEEGTSTEPSEGSAP | |
| AE144A | STEPSEGSAPGSPAGSPTSTEEGTSTEPSEGSAPGTSESATPESGPGSEPATSGSETPGTSE | 127 |
| | SATPESGPGSEPATSGSETPGTSESATPESGPGTSTEPSEGSAPGTSESATPESGPGSPAGS | |
| | PTSTEEGSPAGSPTSTEEGS | |
| AE144B | SEPATSGSETPGTSESATPESGPGSEPATSGSETPGTSESATPESGPGTSTEPSEGSAPGSP | 128 |
| | AGSPTSTEEGTSESATPESGPGSEPATSGSETPGTSESATPESGPGSPAGSPTSTEEGSPAG | |
| | SPTSTEEGTSTEPSEGSAPG | |
| AE180A | TSTEEGTSESATPESGPGSEPATSGSETPGTSESATPESGPGSPAGSPTSTEEGSPAGSPTS | 129 |
| | TEEGTSTEPSEGSAPGTSESATPESGPGTSESATPESGPGTSESATPESGPGSEPATSGSET | |
| | PGSEPATSGSETPGSPAGSPTSTEEGTSTEPSEGSAPGTSTEPSEGSAPGSEPATS | |
| AE216A | PESGPGTSTEPSEGSAPGSPAGSPTSTEEGTSESATPESGPGSEPATSGSETPGTSESATPE | 130 |
| | SGPGSPAGSPTSTEEGSPAGSPTSTEEGTSTEPSEGSAPGTSESATPESGPGTSESATPESG | |
| | PGTSESATPESGPGSEPATSGSETPGSEPATSGSETPGSPAGSPTSTEEGTSTEPSEGSAPG | |
| | TSTEPSEGSAPGSEPATSGSETPGTSESAT | |
| AE252A | ESGPGSEPATSGSETPGTSESATPESGPGTSTEPSEGSAPGSPAGSPTSTEEGTSESATPES | 131 |
| | GPGSEPATSGSETPGTSESATPESGPGSPAGSPTSTEEGSPAGSPTSTEEGTSTEPSEGSAP | |
| | GTSESATPESGPGTSESATPESGPGTSESATPESGPGSEPATSGSETPGSEPATSGSETPGS | |
| | PAGSPTSTEEGTSTEPSEGSAPGTSTEPSEGSAPGSEPATSGSETPGTSESATPESGPGTST | |
| | EPSE | |
| AE288A | TPESGPGTSTEPSEGSAPGTSESATPESGPGSEPATSGSETPGTSESATPESGPGSEPATSG | 132 |
| | SETPGTSESATPESGPGTSTEPSEGSAPGSPAGSPTSTEEGTSESATPESGPGSEPATSGSE | |
| | TPGTSESATPESGPGSPAGSPTSTEEGSPAGSPTSTEEGTSTEPSEGSAPGTSESATPESGP | |
| | GTSESATPESGPGTSESATPESGPGSEPATSGSETPGSEPATSGSETPGSPAGSPTSTEEGT | |
| | STEPSEGSAPGTSTEPSEGSAPGSEPATSGSETPGTSESA | |
| AE324A | PESGPGSPAGSPTSTEEGSPAGSPTSTEEGSPAGSPTSTEEGTSESATPESGPGTSTEPSEG | 133 |
| | SAPGTSESATPESGPGSEPATSGSETPGTSESATPESGPGSEPATSGSETPGTSESATPESG | |
| | PGTSTEPSEGSAPGSPAGSPTSTEEGTSESATPESGPGSEPATSGSETPGTSESATPESGPG | |
| | SPAGSPTSTEEGSPAGSPTSTEEGTSTEPSEGSAPGTSESATPESGPGTSESATPESGPGTS | |
| | ESATPESGPGSEPATSGSETPGSEPATSGSETPGSPAGSPTSTEEGTSTEPSEGSAPGTSTE | |
| | PSEGSAPGSEPATS | |
| AE360A | PESGPGTSTEPSEGSAPGTSESATPESGPGSPAGSPTSTEEGSPAGSPTSTEEGSPAGSPTS | 134 |
| | TEEGTSESATPESGPGTSTEPSEGSAPGTSESATPESGPGSEPATSGSETPGTSESATPESG | |
| | PGSEPATSGSETPGTSESATPESGPGTSTEPSEGSAPGSPAGSPTSTEEGTSESATPESGPG | |
| | SEPATSGSETPGTSESATPESGPGSPAGSPTSTEEGSPAGSPTSTEEGTSTEPSEGSAPGTS | |
| | ESATPESGPGTSESATPESGPGTSESATPESGPGSEPATSGSETPGSEPATSGSETPGSPAG | |
| | SPTSTEEGTSTEPSEGSAPGTSTEPSEGSAPGSEPATSGSETPGTSESAT | |
| AE396A | PESGPGSEPATSGSETPGTSESATPESGPGTSTEPSEGSAPGTSESATPESGPGSPAGSPTS | 135 |
| | TEEGSPAGSPTSTEEGSPAGSPTSTEEGTSESATPESGPGTSTEPSEGSAPGTSESATPESG | |
| | PGSEPATSGSETPGTSESATPESGPGSEPATSGSETPGTSESATPESGPGTSTEPSEGSAPG | |
| | SPAGSPTSTEEGTSESATPESGPGSEPATSGSETPGTSESATPESGPGSPAGSPTSTEEGSP | |
| | AGSPTSTEEGTSTEPSEGSAPGTSESATPESGPGTSESATPESGPGTSESATPESGPGSEPA | |
| | TSGSETPGSEPATSGSETPGSPAGSPTSTEEGTSTEPSEGSAPGTSTEPS | |
| AE432A | EGSAPGSPAGSPTSTEEGTSTEPSEGSAPGTSESATPESGPGSEPATSGSETPGTSESATPE | 136 |
| | SGPGSEPATSGSETPGTSESATPESGPGTSTEPSEGSAPGTSESATPESGPGSPAGSPTSTE | |
| | EGSPAGSPTSTEEGSPAGSPTSTEEGTSESATPESGPGTSTEPSEGSAPGTSESATPESGPG | |
| | SEPATSGSETPGTSESATPESGPGSEPATSGSETPGTSESATPESGPGTSTEPSEGSAPGSP | |
| | AGSPTSTEEGTSESATPESGPGSEPATSGSETPGTSESATPESGPGSPAGSPTSTEEGSPAG | |
| | SPTSTEEGTSTEPSEGSAPGTSESATPESGPGTSESATPESGPGTSESATPESGPGSEPATS | |
| | GSETPGSEPATSGSETPGSPAGSPTSTEEGTSTEPSEGSAPGTSTEPSEGSAPGSEPATS | |
| AE468A | EGSAPGTSTEPSEGSAPGTSTEPSEGSAPGSPAGSPTSTEEGTSTEPSEGSAPGTSESATPE | 137 |
| | SGPGSEPATSGSETPGTSESATPESGPGSEPATSGSETPGTSESATPESGPGTSTEPSEGSA | |
| | PGTSESATPESGPGSPAGSPTSTEEGSPAGSPTSTEEGSPAGSPTSTEEGTSESATPESGPG | |
| | TSTEPSEGSAPGTSESATPESGPGSEPATSGSETPGTSESATPESGPGSEPATSGSETPGTS | |
| | ESATPESGPGTSTEPSEGSAPGSPAGSPTSTEEGTSESATPESGPGSEPATSGSETPGTSES | |
| | ATPESGPGSPAGSPTSTEEGSPAGSPTSTEEGTSTEPSEGSAPGTSESATPESGPGTSESAT | |
| | PESGPGTSESATPESGPGSEPATSGSETPGSEPATSGSETPGSPAGSPTSTEEGTSTEPSEG | |
| | SAPGTSTEPSEGSAPGSEPATSGSETPGTSESAT | |
| AE504A | EGSAPGTSTEPSEGSAPGTSTEPSEGSAPGTSTEPSEGSAPGTSTEPSEGSAPGSPAGSPTS | 138 |
| | TEEGTSTEPSEGSAPGTSESATPESGPGSEPATSGSETPGTSESATPESGPGSEPATSGSET | |
| | PGTSESATPESGPGTSTEPSEGSAPGTSESATPESGPGSPAGSPTSTEEGSPAGSPTSTEEG | |
| | SPAGSPTSTEEGTSESATPESGPGTSTEPSEGSAPGTSESATPESGPGSEPATSGSETPGTS | |
| | ESATPESGPGSEPATSGSETPGTSESATPESGPGTSTEPSEGSAPGSPAGSPTSTEEGTSES | |
| | ATPESGPGSEPATSGSETPGTSESATPESGPGSPAGSPTSTEEGSPAGSPTSTEEGTSTEPS | |
| | EGSAPGTSESATPESGPGTSESATPESGPGTSESATPESGPGSEPATSGSETPGSEPATSGS | |
| | ETPGSPAGSPTSTEEGTSTEPSEGSAPGTSTEPSEGSAPGSEPATSGSETPGTSESATPESG | |
| | PGTSTEPS | |
| AE540A | TPESGPGSPAGSPTSTEEGTSESATPESGPGSEPATSGSETPGTSESATPESGPGTSTEPSE | 139 |
| | GSAPGTSTEPSEGSAPGTSTEPSEGSAPGTSTEPSEGSAPGTSTEPSEGSAPGTSTEPSEGS | |
| | APGSPAGSPTSTEEGTSTEPSEGSAPGTSESATPESGPGSEPATSGSETPGTSESATPESGP | |
| | GSEPATSGSETPGTSESATPESGPGTSTEPSEGSAPGTSESATPESGPGSPAGSPTSTEEGS | |
| | PAGSPTSTEEGSPAGSPTSTEEGTSESATPESGPGTSTEPSEGSAPGTSESATPESGPGSEP | |
| | ATSGSETPGTSESATPESGPGSEPATSGSETPGTSESATPESGPGTSTEPSEGSAPGSPAGS | |
| | PTSTEEGTSESATPESGPGSEPATSGSETPGTSESATPESGPGSPAGSPTSTEEGSPAGSPT | |
| | STEEGTSTEPSEGSAPGTSESATPESGPGTSESATPESGPGTSESATPESGPGSEPATSGSE | |
| | TPGSEPATSGSETPGSPAGSPTSTEEGTSTEPSEGSAPGTSTEP | |
| AE576A | TPESGPGTSESATPESGPGSPAGSPTSTEEGTSESATPESGPGSEPATSGSETPGTSESATP | 140 |
| | ESGPGTSTEPSEGSAPGTSTEPSEGSAPGTSTEPSEGSAPGTSTEPSEGSAPGTSTEPSEGS | |
| | APGTSTEPSEGSAPGSPAGSPTSTEEGTSTEPSEGSAPGTSESATPESGPGSEPATSGSETP | |
| | GTSESATPESGPGSEPATSGSETPGTSESATPESGPGTSTEPSEGSAPGTSESATPESGPGS | |
| | PAGSPTSTEEGSPAGSPTSTEEGSPAGSPTSTEEGTSESATPESGPGTSTEPSEGSAPGTSE | |
| | SATPESGPGSEPATSGSETPGTSESATPESGPGSEPATSGSETPGTSESATPESGPGTSTEP | |
| | SEGSAPGSPAGSPTSTEEGTSESATPESGPGSEPATSGSETPGTSESATPESGPGSPAGSPT | |
| | STEEGSPAGSPTSTEEGTSTEPSEGSAPGTSESATPESGPGTSESATPESGPGTSESATPES | |
| | GPGSEPATSGSETPGSEPATSGSETPGSPAGSPTSTEEGTSTEPSEGSAPGTSTEPSEGSAP | |
| | GSEPATSGSETPGTSESA | |
| AE612A | GSETPGTSTEPSEGSAPGTSTEPSEGSAPGTSESATPESGPGTSESATPESGPGSPAGSPTS | 141 |
| | TEEGTSESATPESGPGSEPATSGSETPGTSESATPESGPGTSTEPSEGSAPGTSTEPSEGSA | |
| | PGTSTEPSEGSAPGTSTEPSEGSAPGTSTEPSEGSAPGTSTEPSEGSAPGSPAGSPTSTEEG | |
| | TSTEPSEGSAPGTSESATPESGPGSEPATSGSETPGTSESATPESGPGSEPATSGSETPGTS | |
| | ESATPESGPGTSTEPSEGSAPGTSESATPESGPGSPAGSPTSTEEGSPAGSPTSTEEGSPAG | |
| | SPTSTEEGTSESATPESGPGTSTEPSEGSAPGTSESATPESGPGSEPATSGSETPGTSESAT | |
| | PESGPGSEPATSGSETPGTSESATPESGPGTSTEPSEGSAPGSPAGSPTSTEEGTSESATPE | |
| | SGPGSEPATSGSETPGTSESATPESGPGSPAGSPTSTEEGSPAGSPTSTEEGTSTEPSEGSA | |
| | PGTSESATPESGPGTSESATPESGPGTSESATPESGPGSEPATSGSETPGSEPATSGSETPG | |
| | SPAGSPTSTEEGTSTEPSEGSAPGTSTEPSEGSAPGSEPATSGSETPGTSESAT | |
| AE648A | PESGPGTSTEPSEGSAPGTSESATPESGPGSEPATSGSETPGTSTEPSEGSAPGTSTEPSEG | 142 |
| | SAPGTSESATPESGPGTSESATPESGPGSPAGSPTSTEEGTSESATPESGPGSEPATSGSET | |
| | PGTSESATPESGPGTSTEPSEGSAPGTSTEPSEGSAPGTSTEPSEGSAPGTSTEPSEGSAPG | |
| | TSTEPSEGSAPGTSTEPSEGSAPGSPAGSPTSTEEGTSTEPSEGSAPGTSESATPESGPGSE | |
| | PATSGSETPGTSESATPESGPGSEPATSGSETPGTSESATPESGPGTSTEPSEGSAPGTSES | |
| | ATPESGPGSPAGSPTSTEEGSPAGSPTSTEEGSPAGSPTSTEEGTSESATPESGPGTSTEPS | |
| | EGSAPGTSESATPESGPGSEPATSGSETPGTSESATPESGPGSEPATSGSETPGTSESATPE | |
| | SGPGTSTEPSEGSAPGSPAGSPTSTEEGTSESATPESGPGSEPATSGSETPGTSESATPESG | |
| | PGSPAGSPTSTEEGSPAGSPTSTEEGTSTEPSEGSAPGTSESATPESGPGTSESATPESGPG | |
| | TSESATPESGPGSEPATSGSETPGSEPATSGSETPGSPAGSPTSTEEGTSTEPSEGSAPGTS | |
| | TEPSEGSAPGSEPATSGSETPGTSESAT | |
| AE684A | EGSAPGSPAGSPTSTEEGTSTEPSEGSAPGTSTEPSEGSAPGTSESATPESGPGTSTEPSEG | 143 |
| | SAPGTSESATPESGPGSEPATSGSETPGTSTEPSEGSAPGTSTEPSEGSAPGTSESATPESG | |
| | PGTSESATPESGPGSPAGSPTSTEEGTSESATPESGPGSEPATSGSETPGTSESATPESGPG | |
| | TSTEPSEGSAPGTSTEPSEGSAPGTSTEPSEGSAPGTSTEPSEGSAPGTSTEPSEGSAPGTS | |
| | TEPSEGSAPGSPAGSPTSTEEGTSTEPSEGSAPGTSESATPESGPGSEPATSGSETPGTSES | |
| | ATPESGPGSEPATSGSETPGTSESATPESGPGTSTEPSEGSAPGTSESATPESGPGSPAGSP | |
| | TSTEEGSPAGSPTSTEEGSPAGSPTSTEEGTSESATPESGPGTSTEPSEGSAPGTSESATPE | |
| | SGPGSEPATSGSETPGTSESATPESGPGSEPATSGSETPGTSESATPESGPGTSTEPSEGSA | |
| | PGSPAGSPTSTEEGTSESATPESGPGSEPATSGSETPGTSESATPESGPGSPAGSPTSTEEG | |
| | SPAGSPTSTEEGTSTEPSEGSAPGTSESATPESGPGTSESATPESGPGTSESATPESGPGSE | |
| | PATSGSETPGSEPATSGSETPGSPAGSPTSTEEGTSTEPSEGSAPGTSTEPSEGSAPGSEPA | |
| | TS | |
| AE720A | TSGSETPGSEPATSGSETPGSPAGSPTSTEEGTSESATPESGPGTSTEPSEGSAPGTSTEPS | 144 |
| | EGSAPGSPAGSPTSTEEGTSTEPSEGSAPGTSTEPSEGSAPGTSESATPESGPGTSTEPSEG | |
| | SAPGTSESATPESGPGSEPATSGSETPGTSTEPSEGSAPGTSTEPSEGSAPGTSESATPESG | |
| | PGTSESATPESGPGSPAGSPTSTEEGTSESATPESGPGSEPATSGSETPGTSESATPESGPG | |
| | TSTEPSEGSAPGTSTEPSEGSAPGTSTEPSEGSAPGTSTEPSEGSAPGTSTEPSEGSAPGTS | |
| | TEPSEGSAPGSPAGSPTSTEEGTSTEPSEGSAPGTSESATPESGPGSEPATSGSETPGTSES | |
| | ATPESGPGSEPATSGSETPGTSESATPESGPGTSTEPSEGSAPGTSESATPESGPGSPAGSP | |
| | TSTEEGSPAGSPTSTEEGSPAGSPTSTEEGTSESATPESGPGTSTEPSEGSAPGTSESATPE | |
| | SGPGSEPATSGSETPGTSESATPESGPGSEPATSGSETPGTSESATPESGPGTSTEPSEGSA | |
| | PGSPAGSPTSTEEGTSESATPESGPGSEPATSGSETPGTSESATPESGPGSPAGSPTSTEEG | |
| | SPAGSPTSTEEGTSTEPSEGSAPGTSESATPESGPGTSESATPESGPGTSESATPESGPGSE | |
| | PATSGSETPGSEPATSGSETPGSPAGSPTSTEEGTSTE | |
| AE756A | TSGSETPGSEPATSGSETPGSPAGSPTSTEEGTSESATPESGPGTSTEPSEGSAPGTSTEPS | 145 |
| | EGSAPGSPAGSPTSTEEGTSTEPSEGSAPGTSTEPSEGSAPGTSESATPESGPGTSTEPSEG | |
| | SAPGTSESATPESGPGSEPATSGSETPGTSTEPSEGSAPGTSTEPSEGSAPGTSESATPESG | |
| | PGTSESATPESGPGSPAGSPTSTEEGTSESATPESGPGSEPATSGSETPGTSESATPESGPG | |
| | TSTEPSEGSAPGTSTEPSEGSAPGTSTEPSEGSAPGTSTEPSEGSAPGTSTEPSEGSAPGTS | |
| | TEPSEGSAPGSPAGSPTSTEEGTSTEPSEGSAPGTSESATPESGPGSEPATSGSETPGTSES | |
| | ATPESGPGSEPATSGSETPGTSESATPESGPGTSTEPSEGSAPGTSESATPESGPGSPAGSP | |
| | TSTEEGSPAGSPTSTEEGSPAGSPTSTEEGTSESATPESGPGTSTEPSEGSAPGTSESATPE | |
| | SGPGSEPATSGSETPGTSESATPESGPGSEPATSGSETPGTSESATPESGPGTSTEPSEGSA | |
| | PGSPAGSPTSTEEGTSESATPESGPGSEPATSGSETPGTSESATPESGPGSPAGSPTSTEEG | |
| | SPAGSPTSTEEGTSTEPSEGSAPGTSESATPESGPGTSESATPESGPGTSESATPESGPGSE | |
| | PATSGSETPGSEPATSGSETPGSPAGSPTSTEEGTSTEPSEGSAPGTSTEPSEGSAPGSEPA | |
| | TSGSETPGTSES | |
| AE792A | EGSAPGTSESATPESGPGSEPATSGSETPGSEPATSGSETPGSPAGSPTSTEEGTSESATPE | 146 |
| | SGPGTSTEPSEGSAPGTSTEPSEGSAPGSPAGSPTSTEEGTSTEPSEGSAPGTSTEPSEGSA | |
| | PGTSESATPESGPGTSTEPSEGSAPGTSESATPESGPGSEPATSGSETPGTSTEPSEGSAPG | |
| | TSTEPSEGSAPGTSESATPESGPGTSESATPESGPGSPAGSPTSTEEGTSESATPESGPGSE | |
| | PATSGSETPGTSESATPESGPGTSTEPSEGSAPGTSTEPSEGSAPGTSTEPSEGSAPGTSTE | |
| | PSEGSAPGTSTEPSEGSAPGTSTEPSEGSAPGSPAGSPTSTEEGTSTEPSEGSAPGTSESAT | |
| | PESGPGSEPATSGSETPGTSESATPESGPGSEPATSGSETPGTSESATPESGPGTSTEPSEG | |
| | SAPGTSESATPESGPGSPAGSPTSTEEGSPAGSPTSTEEGSPAGSPTSTEEGTSESATPESG | |
| | PGTSTEPSEGSAPGTSESATPESGPGSEPATSGSETPGTSESATPESGPGSEPATSGSETPG | |
| | TSESATPESGPGTSTEPSEGSAPGSPAGSPTSTEEGTSESATPESGPGSEPATSGSETPGTS | |
| | ESATPESGPGSPAGSPTSTEEGSPAGSPTSTEEGTSTEPSEGSAPGTSESATPESGPGTSES | |
| | ATPESGPGTSESATPESGPGSEPATSGSETPGSEPATSGSETPGSPAGSPTSTEEGTSTEPS | |
| | EGSAPGTSTEPSEGSAPGSEPATSGSETPGTSESATPESGPGTSTEPS | |
| AE828A | PESGPGTSTEPSEGSAPGSPAGSPTSTEEGTSTEPSEGSAPGTSTEPSEGSAPGTSESATPE | 147 |
| | SGPGSEPATSGSETPGSEPATSGSETPGSPAGSPTSTEEGTSESATPESGPGTSTEPSEGSA | |
| | PGTSTEPSEGSAPGSPAGSPTSTEEGTSTEPSEGSAPGTSTEPSEGSAPGTSESATPESGPG | |
| | TSTEPSEGSAPGTSESATPESGPGSEPATSGSETPGTSTEPSEGSAPGTSTEPSEGSAPGTS | |
| | ESATPESGPGTSESATPESGPGSPAGSPTSTEEGTSESATPESGPGSEPATSGSETPGTSES | |
| | ATPESGPGTSTEPSEGSAPGTSTEPSEGSAPGTSTEPSEGSAPGTSTEPSEGSAPGTSTEPS | |
| | EGSAPGTSTEPSEGSAPGSPAGSPTSTEEGTSTEPSEGSAPGTSESATPESGPGSEPATSGS | |
| | ETPGTSESATPESGPGSEPATSGSETPGTSESATPESGPGTSTEPSEGSAPGTSESATPESG | |
| | PGSPAGSPTSTEEGSPAGSPTSTEEGSPAGSPTSTEEGTSESATPESGPGTSTEPSEGSAPG | |
| | TSESATPESGPGSEPATSGSETPGTSESATPESGPGSEPATSGSETPGTSESATPESGPGTS | |
| | TEPSEGSAPGSPAGSPTSTEEGTSESATPESGPGSEPATSGSETPGTSESATPESGPGSPAG | |
| | SPTSTEEGSPAGSPTSTEEGTSTEPSEGSAPGTSESATPESGPGTSESATPESGPGTSESAT | |
| | PESGPGSEPATSGSETPGSEPATSGSETPGSPAGSPTSTEEGTSTEPSEGSAPGTSTEPSEG | |
| | SAPGSEPATSGSETPGTSESAT | |
| AG72A | GPGSSPSASTGTGPGTPGSGTASSSPGSSTPSGATGSPGSSPSASTGTGPGASPGTSSTGS | 148 |
| | PGTPGSGTASS | |
| AG72B | GSSTPSGATGSPGSSTPSGATGSPGSSPSASTGTGPGSSPSASTGTGPGASPGTSSTGSPG | 149 |
| | TPGSGTASSSP | |
| AG72C | SPSASTGTGPGASPGTSSTGSPGSSPSASTGTGPGTPGSGTASSSPGSSTPSGATGSPGSST | 150 |
| | PSGATGSPGA | |
| AG108A | SASTGTGPGSSPSASTGTGPGTPGSGTASSSPGSSTPSGATGSPGSSPSASTGTGPGASPG | 151 |
| | TSSTGSPGTPGSGTASSSPGSSTPSGATGSPGTPGSGTASSSPGASP | |
| AG108B | PGTPGSGTASSSPGSSTPSGATGSPGTPGSGTASSSPGSSTPSGATGSPGSSTPSGATGSP | 152 |
| | GSSPSASTGTGPGSSPSASTGTGPGASPGTSSTGSPGTPGSGTASSS | |
| AG144A | PGSSPSASTGTGPGSSPSASTGTGPGTPGSGTASSSPGSSTPSGATGSPGSSPSASTGTGP | 153 |
| | GASPGTSSTGSPGTPGSGTASSSPGSSTPSGATGSPGTPGSGTASSSPGASPGTSSTGSPG | |
| | ASPGTSSTGSPGTPGSGTASSS | |
| AG144B | PSGATGSPGTPGSGTASSSPGSSTPSGATGSPGSSTPSGATGSPGSSPSASTGTGPGSSPS | 154 |
| | ASTGTGPGASPGTSSTGSPGTPGSGTASSSPGSSTPSGATGSPGSSPSASTGTGPGSSPSA | |
| | STGTGPGASPGTSSTGSPGASP | |
| AG180A | TSSTGSPGSSPSASTGTGPGSSPSASTGTGPGTPGSGTASSSPGSSTPSGATGSPGSSPSAS | 155 |
| | TGTGPGASPGTSSTGSPGTPGSGTASSSPGSSTPSGATGSPGTPGSGTASSSPGASPGTSS | |
| | TGSPGASPGTSSTGSPGTPGSGTASSSPGSSTPSGATGSPGASPGTSSTGSPGTPGS | |
| AG216A | TGTGPGSSPSASTGTGPGTPGSGTASSSPGSSTPSGATGSPGSSPSASTGTGPGASPGTSS | 156 |
| | TGSPGTPGSGTASSSPGSSTPSGATGSPGTPGSGTASSSPGASPGTSSTGSPGASPGTSST | |
| | GSPGTPGSGTASSSPGSSTPSGATGSPGASPGTSSTGSPGTPGSGTASSSPGSSTPSGATG | |
| | SPGSSPSASTGTGPGSSPSASTGTGPGSSTPSG | |
| AG252A | TSSTGSPGSSPSASTGTGPGSSPSASTGTGPGTPGSGTASSSPGSSTPSGATGSPGSSPSAS | 157 |
| | TGTGPGASPGTSSTGSPGTPGSGTASSSPGSSTPSGATGSPGTPGSGTASSSPGASPGTSS | |
| | TGSPGASPGTSSTGSPGTPGSGTASSSPGSSTPSGATGSPGASPGTSSTGSPGTPGSGTAS | |
| | SSPGSSTPSGATGSPGSSPSASTGTGPGSSPSASTGTGPGSSTPSGATGSPGSSTPSGATGS | |
| | PGASPG | |
| AG288A | TSSTGSPGSSPSASTGTGPGSSPSASTGTGPGTPGSGTASSSPGSSTPSGATGSPGSSPSAS | 158 |
| | TGTGPGASPGTSSTGSPGTPGSGTASSSPGSSTPSGATGSPGTPGSGTASSSPGASPGTSS | |
| | TGSPGASPGTSSTGSPGTPGSGTASSSPGSSTPSGATGSPGASPGTSSTGSPGTPGSGTAS | |
| | SSPGSSTPSGATGSPGSSPSASTGTGPGSSPSASTGTGPGSSTPSGATGSPGSSTPSGATGS | |
| | PGASPGTSSTGSPGASPGTSSTGSPGASPGTSSTGSPGTPGS | |
| AG324A | TSSTGSPGTPGSGTASSSPGASPGTSSTGSPGASPGTSSTGSPGASPGTSSTGSPGASPGTS | 159 |
| | STGSPGTPGSGTASSSPGSSTPSGATGSPGTPGSGTASSSPGSSTPSGATGSPGTPGSGTA | |
| | SSSPGSSTPSGATGSPGSSTPSGATGSPGSSPSASTGTGPGSSPSASTGTGPGASPGTSSTG | |
| | SPGTPGSGTASSSPGSSTPSGATGSPGSSPSASTGTGPGSSPSASTGTGPGASPGTSSTGSP | |
| | GASPGTSSTGSPGSSTPSGATGSPGSSPSASTGTGPGASPGTSSTGSPGSSPSASTGTGPG | |
| | TPGSGTASSSPGSSTP | |
| AG360A | TSSTGSPGASPGTSSTGSPGTPGSGTASSSPGASPGTSSTGSPGASPGTSSTGSPGASPGTS | 160 |
| | STGSPGASPGTSSTGSPGTPGSGTASSSPGSSTPSGATGSPGTPGSGTASSSPGSSTPSGAT | |
| | GSPGTPGSGTASSSPGSSTPSGATGSPGSSTPSGATGSPGSSPSASTGTGPGSSPSASTGT | |
| | GPGASPGTSSTGSPGTPGSGTASSSPGSSTPSGATGSPGSSPSASTGTGPGSSPSASTGTG | |
| | PGASPGTSSTGSPGASPGTSSTGSPGSSTPSGATGSPGSSPSASTGTGPGASPGTSSTGSP | |
| | GSSPSASTGTGPGTPGSGTASSSPGSSTPSGATGSPGSSTPSGATGSPGASPG | |
| AG396A | GATGSPGSSTPSGATGSPGSSPSASTGTGPGASPGTSSTGSPGASPGTSSTGSPGTPGSGT | 161 |
| | ASSSPGASPGTSSTGSPGASPGTSSTGSPGASPGTSSTGSPGASPGTSSTGSPGTPGSGTA | |
| | SSSPGSSTPSGATGSPGTPGSGTASSSPGSSTPSGATGSPGTPGSGTASSSPGSSTPSGATG | |
| | SPGSSTPSGATGSPGSSPSASTGTGPGSSPSASTGTGPGASPGTSSTGSPGTPGSGTASSSP | |
| | GSSTPSGATGSPGSSPSASTGTGPGSSPSASTGTGPGASPGTSSTGSPGASPGTSSTGSPG | |
| | SSTPSGATGSPGSSPSASTGTGPGASPGTSSTGSPGSSPSASTGTGPGTPGSGTASSSPGSS | |
| | TPSGATGSPGSSTPSGATGSPGASPGT | |
| AG432A | GATGSPGSSTPSGATGSPGASPGTSSTGSPGTPGSGTASSSPGSSTPSGATGSPGSSTPSG | 162 |
| | ATGSPGSSTPSGATGSPGSSPSASTGTGPGASPGTSSTGSPGASPGTSSTGSPGTPGSGTA | |
| | SSSPGASPGTSSTGSPGASPGTSSTGSPGASPGTSSTGSPGASPGTSSTGSPGTPGSGTASS | |
| | SPGSSTPSGATGSPGTPGSGTASSSPGSSTPSGATGSPGTPGSGTASSSPGSSTPSGATGSP | |
| | GSSTPSGATGSPGSSPSASTGTGPGSSPSASTGTGPGASPGTSSTGSPGTPGSGTASSSPG | |
| | SSTPSGATGSPGSSPSASTGTGPGSSPSASTGTGPGASPGTSSTGSPGASPGTSSTGSPGSS | |
| | TPSGATGSPGSSPSASTGTGPGASPGTSSTGSPGSSPSASTGTGPGTPGSGTASSSPGSSTP | |
| | S | |
| AG468A | TSSTGSPGSSPSASTGTGPGTPGSGTASSSPGASPGTSSTGSPGASPGTSSTGSPGASPGTS | 163 |
| | STGSPGSSTPSGATGSPGSSTPSGATGSPGASPGTSSTGSPGTPGSGTASSSPGSSTPSGAT | |
| | GSPGSSTPSGATGSPGSSTPSGATGSPGSSPSASTGTGPGASPGTSSTGSPGASPGTSSTG | |
| | SPGTPGSGTASSSPGASPGTSSTGSPGASPGTSSTGSPGASPGTSSTGSPGASPGTSSTGSP | |
| | GTPGSGTASSSPGSSTPSGATGSPGTPGSGTASSSPGSSTPSGATGSPGTPGSGTASSSPG | |
| | SSTPSGATGSPGSSTPSGATGSPGSSPSASTGTGPGSSPSASTGTGPGASPGTSSTGSPGTP | |
| | GSGTASSSPGSSTPSGATGSPGSSPSASTGTGPGSSPSASTGTGPGASPGTSSTGSPGASP | |
| | GTSSTGSPGSSTPSGATGSPGSSPSASTGTGPGASPG | |
| AG504A | TSSTGSPGSSPSASTGTGPGTPGSGTASSSPGASPGTSSTGSPGASPGTSSTGSPGASPGTS | 164 |
| | STGSPGSSTPSGATGSPGSSTPSGATGSPGASPGTSSTGSPGTPGSGTASSSPGSSTPSGAT | |
| | GSPGSSTPSGATGSPGSSTPSGATGSPGSSPSASTGTGPGASPGTSSTGSPGASPGTSSTG | |
| | SPGTPGSGTASSSPGASPGTSSTGSPGASPGTSSTGSPGASPGTSSTGSPGASPGTSSTGSP | |
| | GTPGSGTASSSPGSSTPSGATGSPGTPGSGTASSSPGSSTPSGATGSPGTPGSGTASSSPG | |
| | SSTPSGATGSPGSSTPSGATGSPGSSPSASTGTGPGSSPSASTGTGPGASPGTSSTGSPGTP | |
| | GSGTASSSPGSSTPSGATGSPGSSPSASTGTGPGSSPSASTGTGPGASPGTSSTGSPGASP | |
| | GTSSTGSPGSSTPSGATGSPGSSPSASTGTGPGASPGTSSTGSPGSSPSASTGTGPGTPGS | |
| | GTASSSPGSSTP | |
| AG540A | TSSTGSPGASPGTSSTGSPGSSPSASTGTGPGTPGSGTASSSPGASPGTSSTGSPGASPGTS | 165 |
| | STGSPGASPGTSSTGSPGSSTPSGATGSPGSSTPSGATGSPGASPGTSSTGSPGTPGSGTA | |
| | SSSPGSSTPSGATGSPGSSTPSGATGSPGSSTPSGATGSPGSSPSASTGTGPGASPGTSSTG | |
| | SPGASPGTSSTGSPGTPGSGTASSSPGASPGTSSTGSPGASPGTSSTGSPGASPGTSSTGSP | |
| | GASPGTSSTGSPGTPGSGTASSSPGSSTPSGATGSPGTPGSGTASSSPGSSTPSGATGSPG | |
| | TPGSGTASSSPGSSTPSGATGSPGSSTPSGATGSPGSSPSASTGTGPGSSPSASTGTGPGA | |
| | SPGTSSTGSPGTPGSGTASSSPGSSTPSGATGSPGSSPSASTGTGPGSSPSASTGTGPGASP | |
| | GTSSTGSPGASPGTSSTGSPGSSTPSGATGSPGSSPSASTGTGPGASPGTSSTGSPGSSPSA | |
| | STGTGPGTPGSGTASSSPGSSTPSGATGSPGSSTPSGATGSPGASPG | |
| AG576A | TSSTGSPGTPGSGTASSSPGASPGTSSTGSPGASPGTSSTGSPGASPGTSSTGSPGSSPSAS | 166 |
| | TGTGPGTPGSGTASSSPGASPGTSSTGSPGASPGTSSTGSPGASPGTSSTGSPGSSTPSGA | |
| | TGSPGSSTPSGATGSPGASPGTSSTGSPGTPGSGTASSSPGSSTPSGATGSPGSSTPSGAT | |
| | GSPGSSTPSGATGSPGSSPSASTGTGPGASPGTSSTGSPGASPGTSSTGSPGTPGSGTASS | |
| | SPGASPGTSSTGSPGASPGTSSTGSPGASPGTSSTGSPGASPGTSSTGSPGTPGSGTASSSP | |
| | GSSTPSGATGSPGTPGSGTASSSPGSSTPSGATGSPGTPGSGTASSSPGSSTPSGATGSPG | |
| | SSTPSGATGSPGSSPSASTGTGPGSSPSASTGTGPGASPGTSSTGSPGTPGSGTASSSPGSS | |
| | TPSGATGSPGSSPSASTGTGPGSSPSASTGTGPGASPGTSSTGSPGASPGTSSTGSPGSSTP | |
| | SGATGSPGSSPSASTGTGPGASPGTSSTGSPGSSPSASTGTGPGTPGSGTASSSPGSSTPS | |
| | GATGSPGSSTPSGATGSPGASPG | |
| AG612A | STGSPGTPGSGTASSSPGSSTPSGATGSPGASPGTSSTGSPGTPGSGTASSSPGSSTPSGAT | 167 |
| | GSPGSSPSASTGTGPGSSPSASTGTGPGSSTPSGATGSPGSSTPSGATGSPGASPGTSSTG | |
| | SPGASPGTSSTGSPGASPGTSSTGSPGTPGSGTASSSPGASPGTSSTGSPGASPGTSSTGSP | |
| | GASPGTSSTGSPGSSPSASTGTGPGTPGSGTASSSPGASPGTSSTGSPGASPGTSSTGSPG | |
| | ASPGTSSTGSPGSSTPSGATGSPGSSTPSGATGSPGASPGTSSTGSPGTPGSGTASSSPGSS | |
| | TPSGATGSPGSSTPSGATGSPGSSTPSGATGSPGSSPSASTGTGPGASPGTSSTGSPGASP | |
| | GTSSTGSPGTPGSGTASSSPGASPGTSSTGSPGASPGTSSTGSPGASPGTSSTGSPGASPG | |
| | TSSTGSPGTPGSGTASSSPGSSTPSGATGSPGTPGSGTASSSPGSSTPSGATGSPGTPGSG | |
| | TASSSPGSSTPSGATGSPGSSTPSGATGSPGSSPSASTGTGPGSSPSASTGTGPGASPGTSS | |
| | TGSPGTPGSGTASSSPGSSTPSGATGSPGSSPSASTGTGPGSSPSASTGTGPGASPGTS | |
| AG648A | GTASSSPGSSTPSGATGSPGSSPSASTGTGPGSSPSASTGTGPGSSTPSGATGSPGSSTPSG | 168 |
| | ATGSPGASPGTSSTGSPGASPGTSSTGSPGASPGTSSTGSPGTPGSGTASSSPGASPGTSS | |
| | TGSPGASPGTSSTGSPGASPGTSSTGSPGSSPSASTGTGPGTPGSGTASSSPGASPGTSST | |
| | GSPGASPGTSSTGSPGASPGTSSTGSPGSSTPSGATGSPGSSTPSGATGSPGASPGTSSTG | |
| | SPGTPGSGTASSSPGSSTPSGATGSPGSSTPSGATGSPGSSTPSGATGSPGSSPSASTGTGP | |
| | GASPGTSSTGSPGASPGTSSTGSPGTPGSGTASSSPGASPGTSSTGSPGASPGTSSTGSPG | |
| | ASPGTSSTGSPGASPGTSSTGSPGTPGSGTASSSPGSSTPSGATGSPGTPGSGTASSSPGSS | |
| | TPSGATGSPGTPGSGTASSSPGSSTPSGATGSPGSSTPSGATGSPGSSPSASTGTGPGSSPS | |
| | ASTGTGPGASPGTSSTGSPGTPGSGTASSSPGSSTPSGATGSPGSSPSASTGTGPGSSPSA | |
| | STGTGPGASPGTSSTGSPGASPGTSSTGSPGSSTPSGATGSPGSSPSASTGTGPGASPGTS | |
| | STGSPGSSPSASTGTGPGTPGSGTASSSPGSSTP | |
| AG684A | TSSTGSPGTPGSGTASSSPGSSTPSGATGSPGSSPSASTGTGPGSSPSASTGTGPGSSTPSG | 169 |
| | ATGSPGSSTPSGATGSPGASPGTSSTGSPGASPGTSSTGSPGASPGTSSTGSPGTPGSGTA | |
| | SSSPGASPGTSSTGSPGASPGTSSTGSPGASPGTSSTGSPGSSPSASTGTGPGTPGSGTASS | |
| | SPGASPGTSSTGSPGASPGTSSTGSPGASPGTSSTGSPGSSTPSGATGSPGSSTPSGATGSP | |
| | GASPGTSSTGSPGTPGSGTASSSPGSSTPSGATGSPGSSTPSGATGSPGSSTPSGATGSPG | |
| | SSPSASTGTGPGASPGTSSTGSPGASPGTSSTGSPGTPGSGTASSSPGASPGTSSTGSPGA | |
| | SPGTSSTGSPGASPGTSSTGSPGASPGTSSTGSPGTPGSGTASSSPGSSTPSGATGSPGTPG | |
| | SGTASSSPGSSTPSGATGSPGTPGSGTASSSPGSSTPSGATGSPGSSTPSGATGSPGSSPSA | |
| | STGTGPGSSPSASTGTGPGASPGTSSTGSPGTPGSGTASSSPGSSTPSGATGSPGSSPSAST | |
| | GTGPGSSPSASTGTGPGASPGTSSTGSPGASPGTSSTGSPGSSTPSGATGSPGSSPSASTG | |
| | TGPGASPGTSSTGSPGSSPSASTGTGPGTPGSGTASSSPGSSTPSGATGSPGSSTPSGATG | |
| | SPGASPG | |
| AG720A | TSSTGSPGTPGSGTASSSPGSSTPSGATGSPGASPGTSSTGSPGTPGSGTASSSPGSSTPSG | 170 |
| | ATGSPGSSPSASTGTGPGSSPSASTGTGPGSSTPSGATGSPGSSTPSGATGSPGASPGTSS | |
| | TGSPGASPGTSSTGSPGASPGTSSTGSPGTPGSGTASSSPGASPGTSSTGSPGASPGTSST | |
| | GSPGASPGTSSTGSPGSSPSASTGTGPGTPGSGTASSSPGASPGTSSTGSPGASPGTSSTG | |
| | SPGASPGTSSTGSPGSSTPSGATGSPGSSTPSGATGSPGASPGTSSTGSPGTPGSGTASSSP | |
| | GSSTPSGATGSPGSSTPSGATGSPGSSTPSGATGSPGSSPSASTGTGPGASPGTSSTGSPG | |
| | ASPGTSSTGSPGTPGSGTASSSPGASPGTSSTGSPGASPGTSSTGSPGASPGTSSTGSPGA | |
| | SPGTSSTGSPGTPGSGTASSSPGSSTPSGATGSPGTPGSGTASSSPGSSTPSGATGSPGTPG | |
| | SGTASSSPGSSTPSGATGSPGSSTPSGATGSPGSSPSASTGTGPGSSPSASTGTGPGASPG | |
| | TSSTGSPGTPGSGTASSSPGSSTPSGATGSPGSSPSASTGTGPGSSPSASTGTGPGASPGTS | |
| | STGSPGASPGTSSTGSPGSSTPSGATGSPGSSPSASTGTGPGASPGTSSTGSPGSSPSASTG | |
| | TGPGTPGSGTASSSPGSSTPSGATGSPGSSTPSGATGSPGASPG | |
| AG756A | TSSTGSPGSSPSASTGTGPGSSPSASTGTGPGTPGSGTASSSPGSSTPSGATGSPGSSPSAS | 171 |
| | TGTGPGASPGTSSTGSPGTPGSGTASSSPGSSTPSGATGSPGTPGSGTASSSPGASPGTSS | |
| | TGSPGASPGTSSTGSPGTPGSGTASSSPGSSTPSGATGSPGASPGTSSTGSPGTPGSGTAS | |
| | SSPGSSTPSGATGSPGSSPSASTGTGPGSSPSASTGTGPGSSTPSGATGSPGSSTPSGATGS | |
| | PGASPGTSSTGSPGASPGTSSTGSPGASPGTSSTGSPGTPGSGTASSSPGASPGTSSTGSP | |
| | GASPGTSSTGSPGASPGTSSTGSPGSSPSASTGTGPGTPGSGTASSSPGASPGTSSTGSPG | |
| | ASPGTSSTGSPGASPGTSSTGSPGSSTPSGATGSPGSSTPSGATGSPGASPGTSSTGSPGTP | |
| | GSGTASSSPGSSTPSGATGSPGSSTPSGATGSPGSSTPSGATGSPGSSPSASTGTGPGASP | |
| | GTSSTGSPGASPGTSSTGSPGTPGSGTASSSPGASPGTSSTGSPGASPGTSSTGSPGASPG | |
| | TSSTGSPGASPGTSSTGSPGTPGSGTASSSPGSSTPSGATGSPGTPGSGTASSSPGSSTPSG | |
| | ATGSPGTPGSGTASSSPGSSTPSGATGSPGSSTPSGATGSPGSSPSASTGTGPGSSPSAST | |
| | GTGPGASPGTSSTGSPGTPGSGTASSSPGSSTPSGATGSPGSSPSASTGTGPGSSPSASTG | |
| | TGPGASPGTSSTGSPGASPG | |
| AG792A | TSSTGSPGSSPSASTGTGPGSSPSASTGTGPGTPGSGTASSSPGSSTPSGATGSPGSSPSAS | 172 |
| | TGTGPGASPGTSSTGSPGTPGSGTASSSPGSSTPSGATGSPGTPGSGTASSSPGASPGTSS | |
| | TGSPGASPGTSSTGSPGTPGSGTASSSPGSSTPSGATGSPGASPGTSSTGSPGTPGSGTAS | |
| | SSPGSSTPSGATGSPGSSPSASTGTGPGSSPSASTGTGPGSSTPSGATGSPGSSTPSGATGS | |
| | PGASPGTSSTGSPGASPGTSSTGSPGASPGTSSTGSPGTPGSGTASSSPGASPGTSSTGSP | |
| | GASPGTSSTGSPGASPGTSSTGSPGSSPSASTGTGPGTPGSGTASSSPGASPGTSSTGSPG | |
| | ASPGTSSTGSPGASPGTSSTGSPGSSTPSGATGSPGSSTPSGATGSPGASPGTSSTGSPGTP | |
| | GSGTASSSPGSSTPSGATGSPGSSTPSGATGSPGSSTPSGATGSPGSSPSASTGTGPGASP | |
| | GTSSTGSPGASPGTSSTGSPGTPGSGTASSSPGASPGTSSTGSPGASPGTSSTGSPGASPG | |
| | TSSTGSPGASPGTSSTGSPGTPGSGTASSSPGSSTPSGATGSPGTPGSGTASSSPGSSTPSG | |
| | ATGSPGTPGSGTASSSPGSSTPSGATGSPGSSTPSGATGSPGSSPSASTGTGPGSSPSAST | |
| | GTGPGASPGTSSTGSPGTPGSGTASSSPGSSTPSGATGSPGSSPSASTGTGPGSSPSASTG | |
| | TGPGASPGTSSTGSPGASPGTSSTGSPGSSTPSGATGSPGSSPSASTGTGPGASPG | |
| AG828A | TSSTGSPGSSPSASTGTGPGSSPSASTGTGPGTPGSGTASSSPGSSTPSGATGSPGSSPSAS | 173 |
| | TGTGPGASPGTSSTGSPGTPGSGTASSSPGSSTPSGATGSPGTPGSGTASSSPGASPGTSS | |
| | TGSPGASPGTSSTGSPGTPGSGTASSSPGSSTPSGATGSPGASPGTSSTGSPGTPGSGTAS | |
| | SSPGSSTPSGATGSPGSSPSASTGTGPGSSPSASTGTGPGSSTPSGATGSPGSSTPSGATGS | |
| | PGASPGTSSTGSPGASPGTSSTGSPGASPGTSSTGSPGTPGSGTASSSPGASPGTSSTGSP | |
| | GASPGTSSTGSPGASPGTSSTGSPGSSPSASTGTGPGTPGSGTASSSPGASPGTSSTGSPG | |
| | ASPGTSSTGSPGASPGTSSTGSPGSSTPSGATGSPGSSTPSGATGSPGASPGTSSTGSPGTP | |
| | GSGTASSSPGSSTPSGATGSPGSSTPSGATGSPGSSTPSGATGSPGSSPSASTGTGPGASP | |
| | GTSSTGSPGASPGTSSTGSPGTPGSGTASSSPGASPGTSSTGSPGASPGTSSTGSPGASPG | |
| | TSSTGSPGASPGTSSTGSPGTPGSGTASSSPGSSTPSGATGSPGTPGSGTASSSPGSSTPSG | |
| | ATGSPGTPGSGTASSSPGSSTPSGATGSPGSSTPSGATGSPGSSPSASTGTGPGSSPSAST | |
| | GTGPGASPGTSSTGSPGTPGSGTASSSPGSSTPSGATGSPGSSPSASTGTGPGSSPSASTG | |
| | TGPGASPGTSSTGSPGASPGTSSTGSPGSSTPSGATGSPGSSPSASTGTGPGASPGTSSTG | |
| | SPGSSPSASTGTGPGTPGSGTASSSPGSSTP | |
| AG288_DE | GTPGSGTASSSPGSSTPSGATGSPGSSTPSGATGSPGSSTPSGATGSPGSSPSASTGTGPG | 1699 |
| | ASPGTSSTGSPGASPGTSSTGSPGTPGSGTASSSPGASPGTSSTGSPGASPGTSSTGSPGA | |
| | SPGTSSTGSPGASPGTSSTGSPGTPGSGTASSSPGSSTPSGATGSPGTPGSGTASSSPGSST | |
| | PSGATGSPGTPGSGTASSSPGSSTPSGATGSPGSSTPSGATGSPGSSPSASTGTGPGSSPS | |
| | ASTGTGPGASPGTSSTGSPGTPGSGTASSSPGSSTPSGATGSP | |

[0188] In other embodiments, the CFXTEN composition comprises one or more non-repetitive XTEN sequences of lengths ranging from about 36 to about 3000 amino acid residues, wherein at least about 80%, or at least about 90%, or about 91%, or about 92%, or about 93%, or about 94%, or about 95%, or about 96%, or about 97%, or about 98%, or about 99% to about 100% of the sequence consists of non-overlapping 36 amino acid sequence motifs selected from one or more of the polypeptide sequences of Tables 13-17, either as a family sequence, or where motifs are selected from two or more families of motifs.

[0189] In those embodiments wherein the XTEN component of the CFXTEN fusion protein has less than 100% of its amino acids consisting of 4, 5, or 6 types of amino acid selected from glycine (G), alanine (A), serine (S), threonine (T), glutamate (E) and proline (P), or less than 100% of the sequence consisting of the sequence motifs from Table 3 or the XTEN sequences of Tables 4, and 13-17, the other amino acid residues of the XTEN are selected from any of the other 14 natural L-amino acids, but are preferentially selected from hydrophilic amino acids such that the XTEN sequence contains at least about 90%, 91%, 92%, 93%, 94%, 95%, 96%, 97%, 98%, or at least about 99% hydrophilic amino acids. The XTEN amino acids that are not glycine (G), alanine (A), serine (S), threonine (T), glutamate (E) and proline (P) are either interspersed throughout the XTEN sequence, are located within or between the sequence motifs, or are concentrated in one or more short stretches of the XTEN sequence, e.g., to create a linker between the XTEN and the FVIII components. In such cases where the XTEN component of the CFXTEN comprises amino acids other than glycine (G), alanine (A), serine (S), threonine (T), glutamate (E) and proline (P), it is preferred that less than about 2% or less than about 1% of the amino acids be hydrophobic residues such that the resulting sequences generally lack secondary structure, e.g., not having more than 2% alpha helices or 2% beta-sheets, as determined by the methods disclosed herein. Hydrophobic residues that are less favored in construction of XTEN include tryptophan, phenylalanine, tyrosine, leucine, isoleucine, valine, and methionine. Additionally, one can design the XTEN sequences to contain less than 5% or less than 4% or less than 3% or less than 2% or less than 1% or none of the following amino acids: cysteine (to avoid disulfide formation and oxidation), methionine (to avoid oxidation), asparagine and glutamine (to avoid desamidation). Thus, in some embodiments, the XTEN component of the CFXTEN fusion protein comprising other amino acids in addition to glycine (G), alanine (A), serine (S), threonine (T), glutamate (E) and proline (P) have a sequence with less than 5% of the residues contributing to alpha-helices and beta-sheets as measured by the Chou-Fasman algorithm and have at least 90%, or at least about 95% or more random coil formation as measured by the GOR algorithm.

### 3. Length of Sequence

[0190] In another aspect, the invention provides XTEN of varying lengths for incorporation into CFXTEN compositions wherein the length of the XTEN sequence(s) are chosen based on the property or function to be achieved in the fusion protein. Depending on the intended property or function, the CFXTEN compositions comprise short or intermediate length XTEN located internal to the FVIII sequence or between FVIII domains and/or longer XTEN sequences that can serve as carriers, located in the fusion proteins as described herein. While not intended to be limiting, the XTEN or fragments of XTEN include short segments of about 6 to about 99 amino acid residues, intermediate lengths of about 100 to about 399 amino acid residues, and longer lengths of about 400 to about 1000 and up to about 3000 amino acid residues. Thus, the XTEN for incorporation into the subject CFXTEN encompass XTEN or fragments of XTEN with lengths of about 6, or about 12, or about 36, or about 40, or about 42, or about 72 or about 96, or about 144, or about 288, or about 400, or about 500, or about 576, or about 600, or about 700, or about 800, or about 864, or about 900, or about 1000, or about 1500, or about 2000, or about 2500, or up to about 3000 amino acid residues in length. Alternatively, the XTEN sequences can be about 6 to about 50, about 50 to about 100, about 100 to 150, about 150 to 250, about 250 to 400, about 400 to about 500, about 500 to about 900, about 900 to 1500, about 1500 to 2000, or about 2000 to about 3000 amino acid residues in length. The precise length of an XTEN incorporated into the subject CFXTEN can vary without adversely affecting the activity of a CFXTEN composition. In one embodiment, one or more of the XTEN used in the CFXTEN disclosed herein has 36 amino acids, 42 amino acids, 144 amino acids, 288 amino acids, 576 amino acids, or 864 amino acids in length and may be selected from one of the XTEN family sequences; i.e., AD, AE, AF, AG, AM, AQ, BC or BD. In another embodiment, two or more of the XTEN used in the CFXTEN disclosed herein has 36 amino acids, 42 amino acids, 144 amino acids, 288 amino acids, 576 amino acids, or 864 amino acids in length and may be selected from two of the XTEN family sequences; i.e., AD, AE, AF, AG, AM, AQ, BC or BD, with combinations of AE and AG family sequences preferred. In some embodiments, CFXTEN comprising one or more of the XTEN used herein contain XTEN selected from any one of the sequences in Table 4, which may be linked to the FVIII component directly or via spacer sequences disclosed herein.

[0191] In particular CFXTEN configuration designs, where the XTEN serve as a flexible linker, or are inserted in external loops or unordered regions of the FVIII sequence to increase the bulk, flexibility, or hydrophilicity of the region, or are designed to interfere with clearance receptors for FVIII to enhance pharmacokinetic properties, or to interfere with binding of FVIII inhibitors or other anti-FVIII antibodies, or where a short or intermediate length of XTEN is used to facilitate tissue penetration or to vary the strength of interactions of the CFXTEN fusion protein with its target, or where it is desirable to distribute the cumulative length of XTEN in segments of short or intermediate length at multiple locations within the FVIII sequence, the invention contemplates CFXTEN compositions with one, two, three, four, five or more short or intermediate XTEN sequences inserted between or within one or more FVIII domains or within external loops, or at other sites in the FVIII sequence such as, but not limited to, locations at or proximal to the insertion sites identified in Table 5, Table 6, Table 7, Table 8, and Table 9 or as illustrated in FIGS. 8-9. In one embodiment of the foregoing, the CFXTEN fusion protein contains multiple XTEN segments, e.g., at least two, or at least three, or at least four, or at least five or more XTEN segments in which the XTEN segments can be identical or they can be different and wherein the CFXTEN retains at least 10%, 20%, 30%, 40%, 50%, 60%, 70% or more of the procoagulant activity of native FVIII when assayed by one of the assays disclosed herein. In other particular CFXTEN configuration designs, where the XTEN serves as a carrier to increase the bulk of the fusion protein, or to vary the strength of interactions of the CFXTEN fusion protein with its target, or to enhance the pharmacokinetic properties of the fusion protein, the invention contemplates CFXTEN compositions with one or more intermediate or longer length XTEN sequences inserted at the C-terminus, within the B domain (or the residual of the BDD sequence) between or within one or more FVIII domains, within external loops, or at other sites in the FVIII sequence such as, but not limited to, insertion sites identified in Table 5, Table 6, Table 7, Table 8, and Table 9 or as illustrated in FIGS. 8-9. However, it is believed that the incorporation of multiple XTEN of short to intermediate lengths into CFXTEN compositions confers enhanced properties on the fusion proteins compared to CFXTEN fusion proteins with the same number of amino acids in fewer but longer length XTEN, yet still results in compositions with procoagulant activity and extended half-life; the rationale of which is detailed herein regarding the derived radii of multiple XTEN.

[0192] In the embodiments wherein the CFXTEN fusion proteins comprise multiple XTEN sequences, the cumulative length of the total residues in the XTEN sequences is greater than about 100 to about 3000, or about 200 to about 2000, or about 400 to about 1000 amino acid residues and the XTEN can be identical or they can be different in sequence, net charge, or in length. In one embodiment of CFXTEN comprising multiple XTEN, the individual XTEN sequences each exhibit at least about 80% sequence identity, or alternatively 81%, 82%, 83%, 84%, 85%, 86%, 87%, 88%, 89%, 90%, 91%, 92%, 93%, 94%, 95%, 96%, 97%, 98%, 99%, or 100% sequence identity compared to a motif or an XTEN selected from Tables 3, 4, and 13-17 or a fragment thereof, when optimally aligned with a sequence of comparable length.

[0193] As described more fully below, methods are disclosed in which the CFXTEN are designed by selecting the length of the XTEN and its site of incorporation within the CFXTEN to confer a target half-life, retention of procoagulant activity, reduced binding to FVIII inhibitors or an enhanced physicochemical property (e.g., stability or solubility) of a CFXTEN fusion protein, encoding constructs are created and expressed and the recombinant CFXTEN fusion proteins are isolated and recovered. In general, XTEN cumulative lengths longer that about 400 residues incorporated into the CFXTEN compositions result in longer half-life compared to shorter cumulative lengths, e.g., shorter than about 280 residues. In one embodiment, CFXTEN fusion proteins designs are contemplated that comprise at least a single XTEN as a carrier, with a long sequence length of at least about 400, or at least about 600, or at least about 800, or at least about 900, or at least about 1000 or more amino acids. In another embodiment, multiple XTEN are incorporated into the fusion protein to achieve cumulative lengths of at least about 400, or at least about 600, or at least about 800, or at least about 900, or at least about 1000 or more amino acids, wherein the XTEN can be identical or they can be different in sequence or length. As used herein, “cumulative length” is intended to encompass the total length, in amino acid residues, when more than one XTEN is incorporated into the CFXTEN fusion protein. Both of the foregoing embodiments are designed to confer increased bioavailability and/or increased terminal half-life after administration to a subject compared to CFXTEN comprising shorter cumulative XTEN lengths, yet still result in a procoagulant activity and hemostasis effect. When administered subcutaneously or intramuscularly, the Cₘₐₓ is reduced but the area under the curve (AUC) is increased in comparison to a comparable dose of a CFXTEN with shorter cumulative length XTEN or FVIII not linked to XTEN, thereby contributing to the ability to maintain effective levels of the CFXTEN composition for a longer period of time and permitting increased periods of 2, 4, 7, 10, 14 or 21 days between dosing, as described more fully below. Thus, the XTEN confers the property of a depot to the administered CFXTEN, in addition to the other physicochemical properties described herein.

[0194] When XTEN are used as a carrier, the invention takes advantage of the discovery that increasing the length of the non-repetitive, unstructured polypeptides enhances the unstructured nature of the XTENs and correspondingly enhances the physical/chemical and pharmacokinetic properties of fusion proteins comprising the XTEN carrier. As described more fully in the Examples, proportional increases in the length of the XTEN, even if created by a repeated order of single family sequence motifs (e.g., the four AE motifs of Table 3), result in a sequence with a higher percentage (e.g., 90% or more) of random coil formation, as determined by GOR algorithm, or reduced content of alpha-helices or beta-sheets (e.g., less than 2%), as determined by Chou-Fasman algorithm, compared to shorter XTEN lengths. In addition, increasing the length of the unstructured polypeptide fusion partner, as described in the Examples, results in a fusion protein with a disproportionate increase in terminal half-life (e.g., as much as 50, 100, 200 or more hours) compared to fusion proteins with unstructured polypeptide partners with shorter sequence lengths. The enhanced pharmacokinetic properties of the CFXTEN in comparison to FVIII not linked to XTEN are described more fully, below.

[0195] In another aspect, the invention provides methods to create XTEN of short or intermediate lengths from longer “donor” XTEN sequences, wherein the longer donor XTEN sequence is truncated at the N-terminus, or the C-terminus, or a fragment is created from the interior of a donor sequence, thereby resulting in a short or intermediate length XTEN. In non-limiting examples, as schematically depicted in FIG. 16A-C, an AG sequence of 864 amino acid residues can be truncated to yield an AG sequence with 144 residues, an AG sequence with 288 residues, an AG sequence with 576 residues, or other intermediate lengths, while the AE sequence of 864 residues (as depicted in FIG. 16D, E) can be truncated to yield multiple AE sequences of 144 residues, an AE sequence with 288 or 576 residues or other shorter or intermediate lengths. It is specifically contemplated that such an approach can be utilized with any of the XTEN embodiments described herein or with any of the sequences listed in Tables 4 or 13-17 to result in XTEN of a desired length. In preferred embodiments, the CFXTEN comprising multiple XTEN have XTEN exhibiting at least about 80%, or at least about 90%, or at least about 91%, or at least about 92%, or at least about 93%, or at least about 94%, or at least about 95%, or at least about 96%, or at least about 97%, or at least about 98%, or at least about 99%, or 100% sequence identity to sequences selected from AE42_1, AE42_2, AE42_3, AG42_1, AG42_2, AG42_3, AG42_4, AE144_1A, AE144_2A, AE144_2B, AE144_3A, AE144_3B, AE144_4A, AE144_4B, AE144_5A, AE144_6B, AG144_1, AG144_2, AG144_ A, AG144_B, AG144_C, AG144_F, AG144_3, AG144_4, AE288_1, AE288_2, AG288_1, AG288_2, and AG288_DE.

### 4. Net Charge

[0196] In other embodiments, the unstructured characteristic of an XTEN polypeptide can be enhanced by incorporation of amino acid residues with a net charge and/or reduction of the overall percentage (e.g. less than 5%, or 4%, or 3%, or 2%, or 1%) of hydrophobic amino acids in the XTEN sequence. The overall net charge and net charge density is controlled by modifying the content of charged amino acids in the XTEN sequences, either positive or negative, with the net charge typically represented as the percentage of amino acids in the polypeptide contributing to a charged state beyond those residues that are cancelled by a residue with an opposite charge. In some embodiments, the net charge density of the XTEN of the compositions may be above +0.1 or below −0.1 charges/residue. By “net charge density” of a protein or peptide herein is meant the net charge divided by the total number of amino acids in the protein or propeptide. In other embodiments, the net charge of an XTEN can be about 0%, about 1%, about 2%, about 3%, about 4%, about 5%, about 6%, about 7%, about 8%, about 9%, about 10% about 11%, about 12%, about 13%, about 14%, about 15%, about 16%, about 17%, about 18%, about 19%, or about 20% or more. Based on the net charge, some XTENs have an isoelectric point (pI) of 1.0, 1.5, 2.0, 2.5, 3.0, 3.5, 4.0, 4.5, 5.0, 5.5, 6.0, or even 6.5. In preferred embodiments, the XTEN will have an isoelectric point between 1.5 and 4.5 and carry a net negative charge under physiologic conditions.

[0197] Since most tissues and surfaces in a human or animal have a net negative charge, in some embodiments the XTEN sequences are designed to have a net negative charge to minimize non-specific interactions between the XTEN containing compositions and various surfaces such as blood vessels, healthy tissues, or various receptors. Not to be bound by a particular theory, an XTEN can adopt open conformations due to electrostatic repulsion between individual amino acids of the XTEN polypeptide that individually carry a net negative charge and that are distributed across the sequence of the XTEN polypeptide. In some embodiments, the XTEN sequence is designed with at least 90% or 95% of the charged residues separated by other residues such as serine, alanine, threonine, proline or glycine, which leads to a more uniform distribution of charge, better expression or purification behavior. Such a distribution of net negative charge in the extended sequence lengths of XTEN can lead to an unstructured conformation that, in turn, can result in an effective increase in hydrodynamic radius. In preferred embodiments, the negative charge of the subject XTEN is conferred by incorporation of glutamic acid residues. Generally, the glutamic residues are spaced uniformly across the XTEN sequence. In some cases, the XTEN can contain about 10-80, or about 15-60, or about 20-50 glutamic residues per 20 kDa of XTEN that can result in an XTEN with charged residues that would have very similar pKa, which can increase the charge homogeneity of the product and sharpen its isoelectric point, enhance the physicochemical properties of the resulting CFXTEN fusion protein for, and hence, simplifying purification procedures. For example, where an XTEN with a negative charge is desired, the XTEN can be selected solely from an AE family sequence, which has approximately a 17% net charge due to incorporated glutamic acid, or can include varying proportions of glutamic acid-containing motifs of Table 3 to provide the desired degree of net charge. Non-limiting examples of AE XTEN include, but are not limited to the 36, 42, 144, 288, 576, 624, 864, and 912 AE family sequences of Tables 4 and 14 or fragments thereof. In one embodiment, an XTEN sequence of Tables 4, or 13-17 can be modified to include additional glutamic acid residues to achieve the desired net negative charge. Accordingly, in one embodiment the invention provides XTEN in which the XTEN sequences contain about 1%, 2%, 4%, 8%, 10%, 15%, 17%, 20%, 25%, or even about 30% glutamic acid. In one embodiment, the invention contemplates incorporation of up to 5% aspartic acid residues into XTEN in addition to glutamic acid in order to achieve a net negative charge.

[0198] In other embodiments, where no net charge is desired, the XTEN can be selected from, for example, AG XTEN components, such as the AG motifs of Table 3, or those AM motifs of Table 3 that have no net charge. Non-limiting examples of AG XTEN include, but are not limited to 36, 42, 144, 288, 576, and 864 AG family sequences of Tables 4 and 16, or fragments thereof. In another embodiment, the XTEN can comprise varying proportions of AE and AG motifs (in order to have a net charge that is deemed optimal for a given use or to maintain a given physicochemical property.

[0199] Not to be bound by a particular theory, the XTEN of the CFXTEN compositions with the higher net charge are expected to have less non-specific interactions with various negatively-charged surfaces such as blood vessels, tissues, or various receptors, which would further contribute to reduced active clearance. Conversely, it is believed that the XTEN of the CFXTEN compositions with a low (or no) net charge would have a higher degree of interaction with surfaces that can potentiate the activity of the associated coagulation factor, given the known contribution of cell (e.g., platelets) and vascular surfaces to the coagulation process and the intensity of activation of coagulation factors (Zhou, R., et al., Biomaterials (2005) 26(16):2965-2973; London, F., et al. Biochemistry (2000) 39(32):9850-9858).

[0200] The XTEN of the compositions of the present invention generally have no or a low content of positively charged amino acids. In some embodiments, the XTEN may have less than about 10% amino acid residues with a positive charge, or less than about 7%, or less than about 5%, or less than about 2%, or less than about 1% amino acid residues with a positive charge. However, the invention contemplates constructs where a limited number of amino acids with a positive charge, such as lysine, are incorporated into XTEN to permit conjugation between the epsilon amine of the lysine and a reactive group on a peptide, a linker bridge, or a reactive group on a drug or small molecule to be conjugated to the XTEN backbone. In one embodiment of the foregoing, the XTEN of the subject CFXTEN has between about 1 to about 100 lysine residues, or about 1 to about 70 lysine residues, or about 1 to about 50 lysine residues, or about 1 to about 30 lysine residues, or about 1 to about 20 lysine residues, or about 1 to about 10 lysine residues, or about 1 to about 5 lysine residues, or alternatively only a single lysine residue. Using the foregoing lysine-containing XTEN, fusion proteins can be constructed that comprise XTEN, a FVIII coagulation factor, plus a chemotherapeutic agent or other coagulation factor or cofactor useful in the treatment of coagulopathy conditions, wherein the maximum number of molecules of the agent incorporated into the XTEN component is determined by the numbers of lysines or other amino acids with reactive side chains (e.g., cysteine) incorporated into the XTEN.

[0201] As hydrophobic amino acids impart structure to a polypeptide, the invention provides that the content of hydrophobic amino acids in the XTEN will typically be less than 5%, or less than 2%, or less than 1% hydrophobic amino acid content. In one embodiment, the amino acid content of methionine and tryptophan in the XTEN component of a CFXTEN fusion protein is typically less than 5%, or less than 2%, and most preferably less than 1%. In another embodiment, the XTEN of the subject CFXTEN compositions will have a sequence that has less than 10% amino acid residues with a positive charge, or less than about 7%, or less that about 5%, or less than about 2% amino acid residues with a positive charge, the sum of methionine and tryptophan residues will be less than 2%, and the sum of asparagine and glutamine residues will be less than 5% of the total XTEN sequence.

### 5. Low Immunogenicity

[0202] In another aspect, the XTEN sequences provided herein have a low degree of immunogenicity or are substantially non-immunogenic. Several factors can contribute to the low immunogenicity of XTEN, e.g., the non-repetitive sequence, the unstructured conformation, the high degree of solubility, the low degree or lack of self-aggregation, the low degree or lack of proteolytic sites within the sequence, and the low degree or lack of epitopes in the XTEN sequence.

[0203] Conformational epitopes are formed by regions of the protein surface that are composed of multiple discontinuous amino acid sequences of the protein antigen. The precise folding of the protein brings these sequences into a well-defined, stable spatial configurations, or epitopes, that can be recognized as “foreign” by the host humoral immune system, resulting in the production of antibodies to the protein or the activation of a cell-mediated immune response. In the latter case, the immune response to a protein in an individual is heavily influenced by T-cell epitope recognition that is a function of the peptide binding specificity of that individual's HLA-DR allotype. Engagement of a MHC Class II peptide complex by a cognate T-cell receptor on the surface of the T-cell, together with the cross-binding of certain other co-receptors such as the CD4 molecule, can induce an activated state within the T-cell. Activation leads to the release of cytokines further activating other lymphocytes such as B cells to produce antibodies or activating T killer cells as a full cellular immune response.

[0204] The ability of a peptide to bind a given MHC Class II molecule for presentation on the surface of an APC (antigen presenting cell) is dependent on a number of factors; most notably its primary sequence. In one embodiment, a lower degree of immunogenicity is achieved by designing XTEN sequences that resist antigen processing in antigen presenting cells, and/or choosing sequences that do not bind MHC receptors well. The invention provides CFXTEN fusion proteins with substantially non-repetitive XTEN polypeptides designed to reduce binding with MHC II receptors, as well as avoiding formation of epitopes for T-cell receptor or antibody binding, resulting in a low degree of immunogenicity. Avoidance of immunogenicity can attribute to, at least in part, a result of the conformational flexibility of XTEN sequences; i.e., the lack of secondary structure due to the selection and order of amino acid residues. For example, of particular interest are sequences having a low tendency to adapt compactly folded conformations in aqueous solution or under physiologic conditions that could result in conformational epitopes. The administration of fusion proteins comprising XTEN, using conventional therapeutic practices and dosing, would generally not result in the formation of neutralizing antibodies to the XTEN sequence, and also reduce the immunogenicity of the FVIII fusion partner in the CFXTEN compositions.

[0205] In one embodiment, the XTEN sequences utilized in the subject fusion proteins can be substantially free of epitopes recognized by human T cells. The elimination of such epitopes for the purpose of generating less immunogenic proteins has been disclosed previously; see for example WO 98/52976, WO 02/079232, and WO 00/3317 which are incorporated by reference herein. Assays for human T cell epitopes have been described (Stickler, M., et al. (2003) J Immunol Methods, 281: 95-108). Of particular interest are peptide sequences that can be oligomerized without generating T cell epitopes or non-human sequences. This is achieved by testing direct repeats of these sequences for the presence of T-cell epitopes and for the occurrence of 6 to 15-mer and, in particular, 9-mer sequences that are not human, and then altering the design of the XTEN sequence to eliminate or disrupt the epitope sequence. In some embodiments, the XTEN sequences are substantially non-immunogenic by the restriction of the numbers of epitopes of the XTEN predicted to bind MHC receptors. With a reduction in the numbers of epitopes capable of binding to MHC receptors, there is a concomitant reduction in the potential for T cell activation as well as T cell helper function, reduced B cell activation or upregulation and reduced antibody production. The low degree of predicted T-cell epitopes can be determined by epitope prediction algorithms such as, e.g., TEPITOPE (Sturniolo, T., et al. (1999) Nat Biotechnol, 17: 555-61), as shown in Example 46. The TEPITOPE score of a given peptide frame within a protein is the log of the K_{d} (dissociation constant, affinity, off-rate) of the binding of that peptide frame to multiple of the most common human MHC alleles, as disclosed in Sturniolo, T. et al. (1999) Nature Biotechnology 17:555). The score ranges over at least 20 logs, from about 10 to about −10 (corresponding to binding constraints of 10e¹⁰ K_{d} to 10e⁴⁰ K_{d}), and can be reduced by avoiding hydrophobic amino acids that serve as anchor residues during peptide display on MHC, such as M, I, L, V, F. In some embodiments, an XTEN component incorporated into a CFXTEN does not have a predicted T-cell epitope at a TEPITOPE threshold score of about −5, or −6, or −7, or −8, or −9, or at a TEPITOPE score of −10. As used herein, a score of “−9” is a more stringent TEPITOPE threshold than a score of −5.

[0206] In another embodiment, the inventive XTEN sequences, including those incorporated into the subject CFXTEN fusion proteins, are rendered substantially non-immunogenic by the restriction of known proteolytic sites from the sequence of the XTEN, reducing the processing of XTEN into small peptides that can bind to MHC II receptors. In another embodiment, the XTEN sequence is rendered substantially non-immunogenic by the use a sequence that is substantially devoid of secondary structure, conferring resistance to many proteases due to the high entropy of the structure. Accordingly, the reduced TEPITOPE score and elimination of known proteolytic sites from the XTEN render the XTEN compositions, including the XTEN of the CFXTEN fusion protein compositions, substantially unable to be bound by mammalian receptors, including those of the immune system or active clearance receptors that target FVIII. In one embodiment, an XTEN of a CFXTEN fusion protein can have >100 nM K_{d} binding to a mammalian receptor, or greater than 500 nM K_{d}, or greater than 1 μM K_{d} towards a mammalian cell surface receptor or circulating polypeptide receptor.

[0207] Additionally, the non-repetitive sequence and corresponding lack of epitopes of XTEN limit the ability of B cells to bind to or be activated by XTEN. A repetitive sequence is recognized and can form multivalent contacts with even a few B cells and, as a consequence of the cross-linking of multiple T-cell independent receptors, can stimulate B cell proliferation and antibody production. In contrast, while an XTEN can make contacts with many different B cells over its extended sequence, each individual B cell may only make one or a small number of contacts with an individual XTEN due to the lack of repetitiveness of the sequence. Not being to be bound by any theory, XTENs typically have a much lower tendency to stimulate proliferation of B cells and thus an immune response. In one embodiment, the CFXTEN have reduced immunogenicity as compared to the corresponding FVIII that is not fused to an XTEN. In one embodiment, the administration of up to three parenteral doses of a CFXTEN to a mammal result in detectable anti-CFXTEN IgG at a serum dilution of 1:100 but not at a dilution of 1:1000. In another embodiment, the administration of up to three parenteral doses of a CFXTEN to a mammal result in detectable anti-FVIII IgG at a serum dilution of 1:100 but not at a dilution of 1:1000. In another embodiment, the administration of up to three parenteral doses of a CFXTEN to a mammal result in detectable anti-XTEN IgG at a serum dilution of 1:100 but not at a dilution of 1:1000. In the foregoing embodiments, the mammal can be a mouse, a rat, a rabbit, or a cynomolgus monkey.

[0208] An additional feature of XTENs with non-repetitive sequences relative to sequences with a high degree of repetitiveness is non-repetitive XTENs form weaker contacts with antibodies. Antibodies are multivalent molecules. For instance, IgGs have two identical binding sites and IgMs contain 10 identical binding sites. Thus antibodies against repetitive sequences can form multivalent contacts with such repetitive sequences with high avidity, which can affect the potency and/or elimination of such repetitive sequences. In contrast, antibodies against non-repetitive XTENs may yield monovalent interactions, resulting in less likelihood of immune clearance such that the CFXTEN compositions can remain in circulation for an increased period of time. In addition, it is believed, as schematically portrayed in FIG. 6, the flexible unstructured nature of XTEN provides steric shielding of FVIII regions proximal to the XTEN site of insertion and providing steric hindrance to binding by FVIII inhibitors.

[0209] In another aspect, a subject XTEN useful as a fusion partner has a high hydrodynamic radius; a property that in some embodiments confers a corresponding increased apparent molecular weight to the CFXTEN fusion protein incorporating the XTEN, while in other embodiments enhances steric hindrance to FVIII inhibitors and to anti-FVIII antibodies, reducing their ability to bind to CFXTEN. As detailed in Example 26, the linking of XTEN to therapeutic protein sequences results in CFXTEN compositions that can have increased hydrodynamic radii, increased apparent molecular weight, and increased apparent molecular weight factor compared to a therapeutic protein not linked to an XTEN. For example, in therapeutic applications in which prolonged half-life is desired, compositions in which an XTEN with a high hydrodynamic radius is incorporated into a fusion protein comprising a therapeutic protein can effectively enlarge the hydrodynamic radius of the composition beyond the glomerular pore size of approximately 3-5 nm (corresponding to an apparent molecular weight of about 70 kDa) (Caliceti. 2003. Pharmacokinetic and biodistribution properties of poly(ethylene glycol)-protein conjugates. Adv Drug Deliv Rev 55:1261-1277), resulting in reduced renal clearance of circulating proteins with a corresponding increase in terminal half-life and other enhanced pharmacokinetic properties. The hydrodynamic radius of a protein is conferred by its molecular weight as well as by its structure, including shape or compactness. Not to be bound by a particular theory, the XTEN can adopt open conformations due to electrostatic repulsion between individual charges of the peptide or the inherent flexibility imparted by the particular amino acids in the sequence that lack potential to confer secondary structure. The open, extended and unstructured conformation of the XTEN polypeptide can have a greater proportional hydrodynamic radius compared to polypeptides of a comparable sequence length and/or molecular weight that have secondary and/or tertiary structure, such as typical globular proteins. Methods for determining the hydrodynamic radius are well known in the art, such as by the use of size exclusion chromatography (SEC), as described in U.S. Pat. Nos. 6,406,632 and 7,294,513. Example 26 demonstrates that increases in XTEN length result in proportional increase in the hydrodynamic radius, apparent molecular weight, and/or apparent molecular weight factor, and thus permit the tailoring of CFXTEN to desired cut-off values of apparent molecular weights or hydrodynamic radii. Accordingly, in certain embodiments, the CFXTEN fusion protein can be configured with an XTEN such that the fusion protein can have a hydrodynamic radius of at least about 5 nm, or at least about 8 nm, or at least about 10 nm, or about 12 nm, or about 15 nm, or about 20 nm, or about 30 nm or more. In the foregoing embodiments, the large hydrodynamic radius conferred by the XTEN in a CFXTEN fusion protein can lead to reduced clearance of the resulting fusion protein, an increase in terminal half-life, and an increase in mean residence time.

[0210] Generally, the actual molecular weight of the mature form of FVIII component is about 265 kDa, while in the case of a FVIII BDD, it is about 165 kDa. The actual molecular weight of a CFXTEN fusion protein for comprising a FVIII BDD plus one or more XTEN ranges from about 200 to about 270 kDa, depending on the length of the XTEN components. As described in the Examples, when the molecular weights of the CFXTEN fusion proteins are derived from size exclusion chromatography analyses, the open conformation of the XTEN due to the low degree of secondary structure results in an increase in the apparent molecular weight of the fusion proteins into which they are incorporated. In some embodiments, the CFXTEN comprising a FVIII and at least one or more XTEN exhibits an apparent molecular weight of at least about 400 kD, or at least about 500 kD, or at least about 700 kD, or at least about 1000 kD, or at least about 1400 kD, or at least about 1600 kD, or at least about 1800 kD, or at least about 2000 kD. Accordingly, the CFXTEN fusion proteins comprising one or more XTEN exhibit an apparent molecular weight that is about 1.3-fold greater, or about 2-fold greater, or about 3-fold greater or about 4-fold greater, or about 8-fold greater, or about 10-fold greater, or about 12-fold greater, or about 15-fold greater than the actual molecular weight of the fusion protein. In one embodiment, the isolated CFXTEN fusion protein of any of the embodiments disclosed herein exhibit an apparent molecular weight factor under physiologic conditions that is greater than about 1.3, or about 2, or about 3, or about 4, or about 5, or about 6, or about 7, or about 8, or about 10, or greater than about 15. In another embodiment, the CFXTEN fusion protein has, under physiologic conditions, an apparent molecular weight factor that is about 3 to about 20, or is about 5 to about 15, or is about 8 to about 12, or is about 9 to about 10 relative to the actual molecular weight of the fusion protein. It is believed that the increased apparent molecular weight of the subject CFXTEN compositions enhances the pharmacokinetic properties of the fusion proteins by a combination of factors, which include reduced active clearance, reduced binding by FVIII inhibitors, and reduced loss in capillary and venous bleeding.

### IV). CFXTEN Compositions

[0211] The present invention provides compositions comprising fusion proteins having factor VIII linked to one or more XTEN sequences, wherein the fusion protein acts to replace or augment the amount of existing FVIII in the intrinsic or contact activated coagulation pathway when administered into a subject. The invention addresses a long-felt need in increasing the terminal half-life of exogenously administered factor VIII to a subject in need thereof. One way to increase the circulation half-life of a therapeutic protein is to ensure that renal clearance or metabolism of the protein is reduced. Another way to increase the terminal half-life is to reduce the active clearance of the therapeutic protein, whether mediated by receptors, active metabolism of the protein, or other endogenous mechanisms. Both may be achieved by conjugating the protein to a polymer, which, on one hand, is capable of conferring an increased molecular size (or hydrodynamic radius) to the protein and, hence, reduced renal clearance, and, on the other hand, interferes with binding of the protein to clearance receptors or other proteins that contribute to metabolism or clearance. Thus, certain objects of the present invention include, but are not limited to, providing improved FVIII molecules with a longer circulation or terminal half-life, decreasing the number or frequency of necessary administrations of FVIII compositions, retaining at least a portion of the activity compared to native coagulation factor VIII, and/or enhancing the ability to treat coagulation deficiencies and uncontrolled bleedings more efficiently, more effectively, more economically, and/or with greater safety compared to presently available factor VIII preparations.

[0212] Accordingly, the present invention provides recombinant factor VIII fusion protein compositions comprising an FVIII covalently linked to one or more extended recombinant polypeptides (“XTEN”), resulting in a CFXTEN fusion protein composition. The term “CFXTEN”, as used herein, is meant to encompass fusion polypeptides that comprise at least one payload region comprising a FVIII or a portion of a FVIII that is capable of procoagulant activity associated with a FVIII coagulation factor and at least one other region comprising one or more XTEN polypeptides that may be interspersed within the payload region and/or attached to the terminus. In one embodiment, the FVIII is native FVIII. In another embodiment, the FVIII is a sequence variant, fragment, homolog, or mimetic of a natural sequence that retains at least a portion of the procoagulant activity of native FVIII, as disclosed herein. Non-limiting examples of FVIII suitable for inclusion in the compositions include the sequences of Table 1 or sequences having at least 80%, or at least 90%, or at least 91%, or at least 92%, or at least 93%, or at least 94%, or at least 95%, or at least 96%, or at least 97%, or at least 98%, or at least 99% sequence identity to a sequence of Table 1. In a preferred embodiment, the FVIII is a B-domain deleted (BDD) FVIII sequence variant, such as those BDD sequences from Table 1 or other such sequences known in the art. In another preferred embodiment, the CFXTEN comprises a B-domain deleted (BDD) FVIII sequence variant expressed with the native 19 amino acid signal sequence, which is cleaved during the maturation of the protein.

[0213] The compositions of the invention include fusion proteins that are useful, when administered to a subject in need thereof, for mediating or preventing or ameliorating a condition associated with factor VIII deficiencies or defects in endogenously produced FVIII, or bleeding disorders associated with trauma, surgery, factor VIII deficiencies or defects. Of particular interest are CFXTEN fusion protein compositions for which an increase in a pharmacokinetic parameter, increased solubility, increased stability, or some other enhanced pharmaceutical property compared to native FVIII is sought, or for which increasing the terminal half-life would improve efficacy, safety, or result in reduced dosing frequency and/or improve patient management. The CFXTEN fusion proteins of the embodiments disclosed herein exhibit one or more or any combination of the improved properties and/or the embodiments as detailed herein. In some embodiments, the CFXTEN fusion composition remains at a level above a threshold value of at least 0.01-0.05, or 0.05 to 0.1, or 0.1 to 0.4 IU/ml when administered to a subject, for a longer period of time when compared to a FVIII not linked to XTEN and administered at a comparable dose to a subject in need thereof (e.g., a subject such as a human or mouse or monkey with hemophilia A).

[0214] The FVIII of the subject compositions, particularly those disclosed in Table 1, together with their corresponding nucleic acid and amino acid sequences, are available in public databases such as Chemical Abstracts Services Databases (e.g., the CAS Registry), GenBank, The Universal Protein Resource (UniProt), subscription provided databases such as GenSeq (e.g., Derwent), as well as in the patent and primary literature. Polynucleotide sequences applicable for expressing the subject CFXTEN sequences may be a wild type polynucleotide sequence encoding a given FVIII (e.g., either full length or mature), or in some instances the sequence may be a variant of the wild type polynucleotide sequence (e.g., a polynucleotide which encodes the wild type biologically active protein, wherein the DNA sequence of the polynucleotide has been optimized, for example, for expression in a particular species, or a polynucleotide encoding a variant of the wild type protein, such as a site directed mutant or an allelic variant. It is well within the ability of the skilled artisan to use a wild-type or consensus cDNA sequence or a codon-optimized variant of a FVIII to create CFXTEN constructs contemplated by the invention using methods known in the art and/or in conjunction with the guidance and methods provided herein, and described more fully in the Examples.

[0215] In one embodiment, a CFXTEN fusion protein comprises a single FVIII molecule exhibiting at least about 80% sequence identity, or alternatively 81%, 82%, 83%, 84%, 85%, 86%, 87%, 88%, 89%, 90%, 91%, 92%, 93%, 94%, 95%, 96%, 97%, 98%, or at least about 99%, or 100% sequence identity to a sequence of Table 1 linked to a single XTEN (e.g., an XTEN as described above) including, but not limited to sequences of the AE or AG family with 42, 144, 288, 576, or 864 amino acids, as set forth in Table 4. In another embodiment, the CFXTEN comprises a single FVIII linked to two XTEN, wherein the XTEN may be identical or they may be different. In another embodiment, the CFXTEN fusion protein comprises a single FVIII molecule linked to one, two, three, four, five, six or more XTEN sequences, in which the FVIII is a sequence that has at least about 80% sequence identity, or alternatively 81%, 82%, 83%, 84%, 85%, 86%, 87%, 88%, 89%, 90%, 91%, 92%, 93%, 94%, 95%, 96%, 97%, 98%, or at least about 99%, or 100% sequence identity compared to a protein sequence selected from Table 1, when optimally aligned, and the one or more XTEN are each having at least about 80% sequence identity, or alternatively 81%, 82%, 83%, 84%, 85%, 86%, 87%, 88%, 89%, 90%, 91%, 92%, 93%, 94%, 95%, 96%, 97%, 98%, or at least about 99%, or 100% sequence identity compared to one or more sequences selected from any one of Tables 3, 4, and 13-17, when optimally aligned. In the foregoing embodiment, where the CFXTEN has two or more XTEN, the XTEN may be identical or they may be different sequences. In yet another embodiment, the CFXTEN fusion protein comprises a single FVIII exhibiting at least about 80% sequence identity, or alternatively 81%, 82%, 83%, 84%, 85%, 86%, 87%, 88%, 89%, 90%, 91%, 92%, 93%, 94%, 95%, 96%, 97%, 98%, or at least about 99%, or 100% sequence identity compared to sequences of comparable length selected from Table 1, when optimally aligned, with the portions interspersed with and linked by three, four, five, six or more XTEN sequences that may be identical or may be different and wherein each has at least about 80% sequence identity, or alternatively 81%, 82%, 83%, 84%, 85%, 86%, 87%, 88%, 89%, 90%, 91%, 92%, 93%, 94%, 95%, 96%, 97%, 98%, or at least about 99%, or 100% sequence identity compared to sequences selected from any one of Tables 3, 4, and 13-17, or fragments thereof, when optimally aligned. In yet another embodiment, the invention provides a CFXTEN fusion protein comprising a sequence with at least about 80% sequence identity, or alternatively 81%, 82%, 83%, 84%, 85%, 86%, 87%, 88%, 89%, 90%, 91%, 92%, 93%, 94%, 95%, 96%, 97%, 98%, or at least about 99%, or 100% sequence identity to a sequence from Table 21, when optimally aligned.

[0216] 1. CFXTEN Fusion Protein Configurations

[0217] The invention provides CFXTEN fusion protein compositions with the CF and XTEN components linked in specific N- to C-terminus configurations.

[0218] In one embodiment of the CFXTEN composition, the invention provides a fusion protein of formula I:

(XTEN)ₓ-CF-(XTEN)_{y} I

wherein independently for each occurrence, CF is a factor VIII as defined herein, including sequences having at least about 80%, or at least about 90%, or at least about 95%, or at least about 96%, or at least about 97%, or at least about 98%, or at least about 99% or 100% sequence identity with sequenced from Table 1; x is either 0 or 1 and y is either 0 or 1 wherein x+y≥1; and XTEN is an extended recombinant polypeptide as described herein, including, but not limited to sequences having at least about 80%, or at least about 90%, or at least about 95%, or at least about 96%, or at least about 97%, or at least about 98%, or at least about 99% or 100% sequence identity to sequences set forth in Table 4. Accordingly, the CFXTEN fusion composition can have XTEN-CF, XTEN-CF-XTEN, or CF-XTEN configurations.

[0219] In another embodiment of the CFXTEN composition, the invention provides a fusion protein of formula II:

(XTEN)ₓ-(S)ₓ-(CF)-(XTEN)_{y} II

wherein independently for each occurrence, CF is a factor VIII as defined herein, including sequences having at least about 80%, or at least about 90%, or at least about 95%, or at least about 96%, or at least about 97%, or at least about 98%, or at least about 99% or 100% sequence identity to sequences set forth in Table 1; S is a spacer sequence having between 1 to about 50 amino acid residues that can optionally include a cleavage sequence or amino acids compatible with restrictions sites; x is either 0 or 1 and y is either 0 or 1 wherein x+y≥1; and XTEN is an extended recombinant polypeptide as described herein including, but not limited to sequences having at least about 80%, or at least about 90%, or at least about 95%, or at least about 96%, or at least about 97%, or at least about 98%, or at least about 99% or 100% sequence identity to sequences set forth in Table 4.

[0220] In another embodiment of the CFXTEN composition, the invention provides a recombinant factor VIII fusion protein, wherein the fusion protein is of formula III:

(XTEN)ₓ-(S)ₓ-(CF)-(S)_{y}-(XTEN)_{y} III

wherein independently for each occurrence, CF is a factor VIII as defined herein, including sequences having at least about 80%, or at least about 90%, or at least about 95%, or at least about 96%, or at least about 97%, or at least about 98%, or at least about 99% or 100% sequence identity to sequence set for in Table 1; S is a spacer sequence having between 1 to about 50 amino acid residues that can optionally include a cleavage sequence or amino acids compatible with restrictions sites; x is either 0 or 1 and y is either 0 or 1 wherein x+y≥1; and XTEN is an extended recombinant polypeptide as described herein including, but not limited to sequences having at least about 80%, or at least about 90%, or at least about 95%, or at least about 96%, or at least about 97%, or at least about 98%, or at least about 99% or 100% sequence identity to sequences set forth in Table 4.

[0221] In another embodiment of the CFXTEN composition, the invention provides a recombinant factor VIII fusion protein of formula IV:

(A1)-(XTEN)ᵤ-(A2)-(XTEN)ᵥ-(B)-(XTEN)_{w}-(A3)-(XTEN)ₓ-(C1)-(XTEN)_{y}-(C2)-(XTEN)_{z} IV

wherein independently for each occurrence, A1 is an A1 domain of FVIII; A2 is an A2 domain of FVIII; A3 is an A3 domain of FVIII; B is a B domain of FVIII which can be a fragment or a splice variant of the B domain; C1 is a C1 domain of FVIII; C2 is a C2 domain of FVIII; v is either 0 or 1; w is either 0 or 1; x is either 0 or 1; y is either 0 or 1; y is either 0 or 1 with the proviso that u+v+x+y+z≥1; and XTEN is an extended recombinant polypeptide as described herein including, but not limited to sequences having at least about 80%, or at least about 90%, or at least about 95%, or at least about 96%, or at least about 97%, or at least about 98%, or at least about 99% or 100% sequence identity to sequences set forth in Table 4.

[0222] In another embodiment of the CFXTEN composition, the invention provides a recombinant factor VIII fusion protein of formula V:

(XTEN)ₜ-(S)ₐ-(A1)-(S)_{b}-(XTEN)ᵤ-(S)_{b}-(A2)-(S)_{c}-(XTEN)ᵥ-(S)_{c}-(B)-(S)_{d}-(XTEN)_{w}-(S)_{d}-(A3)-(S)ₑ-(XTEN)ₓ-(S)ₑ-(C1)-(S)_{f}-(XTEN)_{y}-(S)_{f}-(C2)-(S)_{g}-(XTEN)_{z} V

wherein independently for each occurrence, A1 is an A1 domain of FVIII; A2 is an A2 domain of FVIII; A3 is an A3 domain of FVIII; B is a B domain of FVIII which can be a fragment or a splice variant of the B domain; C1 is a C1 domain of FVIII; C2 is a C2 domain of FVIII; S is a spacer sequence having between 1 to about 50 amino acid residues that can optionally include a cleavage sequence or amino acids compatible with restrictions sites; a is either 0 or 1; b is either 0 or 1; c is either 0 or 1; d is either 0 or 1; e is either 0 or 1; f is either 0 or 1; g is either 0 or 1; t is either 0 or 1; u is either 0 or 1; v is either 0 or 1; w is 0 or 1, x is either 0 or 1; y is either 0 or 1; z is either 0 or 1 with the proviso that t+u+v+w+x+y+z≥1; and XTEN is an extended recombinant polypeptide as described herein including, but not limited to sequences having at least about 80%, or at least about 90%, or at least about 95%, or at least about 96%, or at least about 97%, or at least about 98%, or at least about 99% or 100% sequence identity to sequences set forth in Table 4. In another embodiment of formula V, the spacer sequence is glycine or a sequence selected from Tables 11 and 12.

[0223] In another embodiment of the CFXTEN composition, the invention provides a recombinant factor VIII fusion protein of formula VI:

(XTEN)ᵤ-(S)ₐ-(A1)-(S)_{b}-(XTEN)ᵥ-(S)_{b}-(A2)-(S)_{c}-(XTEN)_{w}-(S)_{c}-(A3)-(S)_{d}-(XTEN)ₓ-(S)_{d}-(C1)-(S)ₑ-(XTEN)_{y}-(S)ₑ-(C2)-(S)_{f}-(XTEN)_{z} VI

wherein independently for each occurrence, A1 is an A1 domain of FVIII; A2 is an A2 domain of FVIII; A3 is an A3 domain of FVIII; C1 is a C1 domain of FVIII; C2 is a C2 domain of FVIII; S is a spacer sequence having between 1 to about 50 amino acid residues that can optionally include a cleavage sequence or amino acids compatible with restrictions sites; a is either 0 or 1; b is either 0 or 1; c is either 0 or 1; d is either 0 or 1; e is either 0 or 1; f is either 0 or 1; u is either 0 or 1; v is either 0 or 1; w is 0 or 1, x is either 0 or 1; y is either 0 or 1; z is either 0 or 1 with the proviso that u+v+w+x+y+z≥1; and XTEN is an extended recombinant polypeptide as described herein including, but not limited to sequences having at least about 80%, or at least about 90%, or at least about 95%, or at least about 96%, or at least about 97%, or at least about 98%, or at least about 99% or 100% sequence identity to sequences set forth in Table 4. In another embodiment of formula V, the spacer sequence is glycine or a sequence selected from Tables 11 and 12.

[0224] In another embodiment of the CFXTEN composition, the invention provides a recombinant factor VIII fusion protein of formula VII:

(SP)-(XTEN)ₓ-(CS)ₓ-(S)ₓ-(FVIII_1-745)-(S)_{y}-(XTEN)_{y}-(S)_{y}-(FVIII_1635-2332)-(S)_{z}-(CS)_{z}-(XTEN)_{z} VII

wherein independently for each occurrence, SP is a signal peptide, preferably with sequence MQIELSTCFFLCLLRFCFS (SEQ ID NO: 1611), CS is a cleavage sequence listed in Table 12, S is a spacer sequence having between 1 to about 50 amino acid residues that can optionally include amino acids compatible with restrictions sites, “FVIII_1-745” is residues 1-745 of Factor FVIII and “FVIII_1635-2332” is residues 1635-2332 of FVIII, x is either 0 or 1, y is either 0 or 1, and z is either 0 or 1, wherein x+y+z≥2; and XTEN is an extended recombinant polypeptide as described herein including, but not limited to sequences having at least about 80%, or at least about 90%, or at least about 95%, or at least about 96%, or at least about 97%, or at least about 98%, or at least about 99% or 100% sequence identity sequences set forth in Table 4. In one embodiment of formula VII, the spacer sequence is GPEGPS (SEQ ID NO: 1612). In another embodiment of formula V, the spacer sequence is glycine or a sequence selected from Tables 11 and 12.

[0225] In another embodiment of the CFXTEN composition, the invention provides a recombinant factor VIII fusion protein of formula VIII:

(A1)-(S)ₐ-(XTEN)ᵥ-(S)ₐ-(A2)-(B1)-(S)_{b}-(XTEN)_{w}-(S)_{b}-(B2)-(A3)-(S)_{c}-(XTEN)ₓ-(S)_{c}-(C1)-(S)_{d}-(XTEN)_{y}-(S)_{d}-(C2)-(S)ₑ-(XTEN)_{z} VIII

wherein independently for each occurrence, A1 is an A1 domain of FVIII; A2 is an A2 domain of FVIII; B1 is a fragment of the B domain that can have from residue 741 to 743-750 of FVIII or alternatively from about residue 741 to about residues 745 of FVIII; B2 is a fragment of the B domain that can have from residues 1635-1686 to 1689 of FVIII or alternatively from about residue 1640 to about residues 1689 of FVIII; A3 is an A3 domain of FVIII; C1 is a C1 domain of FVIII; C2 is a C2 domain of FVIII; S is a spacer sequence having between 1 to about 50 amino acid residues that can optionally include a cleavage sequence or amino acids compatible with restrictions sites; a is either 0 or 1; b is either 0 or 1; c is either 0 or 1; d is either 0 or 1; e is either 0 or 1; f is either 0 or 1; u is either 0 or 1; v is either 0 or 1; w is 0 or 1, x is either 0 or 1; y is either 0 or 1; z is either 0 or 1 with the proviso that u+v+w+x+y+z≥1; and XTEN is an extended recombinant polypeptide as described herein including, but not limited to sequences having at least about 80%, or at least about 90%, or at least about 95%, or at least about 96%, or at least about 97%, or at least about 98%, or at least about 99% or 100% sequence identity to sequences set forth in Table 4. In one embodiment of formula VIII, the spacer sequence is GPEGPS (SEQ ID NO: 1612). In another embodiment of formula V, the spacer sequence is glycine or a sequence selected from Tables 11 and 12.

[0226] In another embodiment of the CFXTEN composition, the invention provides a recombinant factor VIII fusion protein of formula IX:

(A1_{N})-(S)ₐ-(XTEN)ₜ-(S)_{b}-(A1_{C})-(A2_{N})-(S)_{c}-(XTEN)ᵥ-(S)_{d}-(A2_{C})-(B_{N})-(S)ₑ-(XTEN)ᵥ-(S)_{f}-(B_{C})-(A3_{N})- (S)_{g}-(XTEN)_{w}-(S)ₕ-(A3_{C})-(C1_{N})-(S)ᵢ-(XTEN)ₓ-(S)ⱼ-(C1_{C})-(C2_{N})-(S)ₖ-(XTEN)_{y}-(S)ₗ-(C2_{C})-(S)ₘ-(XTEN)_{z} IX

wherein independently for each occurrence, MN is a fragment of the A1 domain from at least residue number 1 (numbered relative to native, mature FVIII) to no more than residue number 371, A1_{c} is a fragment of the A1 domain from at least residue number 2 to no more than residue number 372; A2_{N} is a fragment of the A2 domain from at least residue number 373 to no more than residue number 739, A2_{c} is a fragment of the A2 domain from at least residue number 374 to no more than residue number 740; B_{N} is a fragment of the B domain from at least residue number 741 to no more than residue number 1647, B_{c} is a fragment of the B domain from at least residue number 742 to no more than residue number 1648; A3_{N} is a fragment of the A3 domain from at least residue number 1649 to no more than residue number 2019, A3_{c} is a fragment of the A3 domain from at least residue number 1650 to no more than residue number 2019; C1_{N} is a fragment of the C1 domain from at least residue number 2020 to no more than residue number 2171, C1_{c} is a fragment of the C1 domain from at least residue number 2021 to no more than residue number 2172; C2_{N} is a fragment of the C2 domain from at least residue number 2173 to no more than residue number 2331, C2_{c} is a fragment of the C2 domain from at least residue number 2174 to no more than residue number 2332; S is a spacer sequence having between 1 to about 50 amino acid residues that can optionally include a cleavage sequence or amino acids compatible with restrictions sites; a is either 0 or 1; b is either 0 or 1; c is either 0 or 1; d is either 0 or 1; e is either 0 or 1; f is either 0 or 1; g is either 0 or 1; his either 0 or 1; i is either 0 or 1; j is either 0 or 1; k is either 0 or 1; 1 is either 0 or 1; m is either 0 or 1; t is either 0 or 1; u is either 0 or 1; v is either 0 or 1; w is 0 or 1, x is either 0 or 1; y is either 0 or 1; z is either 0 or 1 with the proviso that t+u+v+w+x+y+z≥1; and XTEN is an extended recombinant polypeptide as described herein including, but not limited to sequences having at least 90% identity to sequences set forth in Table 4. In one embodiment of formula IX, the spacer sequence is GPEGPS (SEQ ID NO: 1612). In another embodiment of formula IX, the spacer sequence is glycine or a sequence selected from Tables 11 and 12.

[0227] The embodiments of formulae IV-VIII encompass CFXTEN configurations wherein one or more XTEN of lengths ranging from about 6 amino acids to ≥1000 amino acids (e.g., sequences selected from any one of Tables 3, 4, and 13-17 or fragments thereof, or sequences exhibiting at least about 90-99% or more sequence identity thereto) are inserted and linked between adjoining domains of the factor VIII or are linked to the N- or C-terminus of the FVIII. In other embodiments of formulae V-VIII, the invention further provides configurations wherein the XTEN are linked to FVIII domains via spacer sequences which can optionally comprise amino acids compatible with restrictions sites or can include cleavage sequences (e.g., the sequences of Tables 11 and 12, described more fully below) such that the XTEN encoding sequence can be, in the case of a restriction site, integrated into a CFXTEN construct and, in the case of a cleavage sequence, the XTEN can be released from the fusion protein by the action of a protease appropriate for the cleavage sequence.

[0228] The embodiments of formulae VI-VIII differ from those of formula V in that the FVIII component of formulae VI-VIII are only the B-domain deleted forms (“FVIII BDD”) of factor VIII that retain short residual sequences of the B-domain, non-limiting examples of sequences of which are provided in Table 1, wherein one or more XTEN or fragments of XTEN of lengths ranging from about 6 amino acids to ≥1000 amino acids (e.g., sequences selected from any one of Tables 3, 4, and 13-17) are inserted and linked between adjoining domains of the factor VIII and/or between the remnants of the B domain residues, such as those of Table 8. The embodiment of formula IX generally differs from those of the other formulae in that the one or more XTEN are each inserted within domains of FVIII rather than between domains, and/or has an XTEN linked to the C-terminus of the FVIII (or is linked via a spacer sequence to the C-terminus of the FVIII).

[0229] In some embodiments of a CFXTEN, the fusion protein comprises a B-domain deleted form of FVIII wherein the B-domain deletion starts from a first position at about amino acid residue number 745 and ends at a second position at amino acid residue number 1635 to about 1690 with reference to the full-length human factor VIII sequence and an XTEN links the first position and the second position of the B-domain deletion. In one embodiment of the foregoing, the first position and the second position of the B-domain deletion are selected from the positions of Table 8. In another embodiment of the foregoing, at least one XTEN links the first and second position wherein the at least one XTEN links factor VIII amino acid residue 745 and amino acid residue 1640, or amino acid residue 741 and amino acid residue 1640, or amino acid residue 741 and amino acid residue 1690, or amino acid residue 745 and amino acid residue 1667, or amino acid residue 745 and amino acid residue 1657, or amino acid residue 745 and amino acid residue 1657, or amino acid residue 747 and amino acid residue 1642, or amino acid residue 751 and amino acid residue 1667. In one embodiment of the CFXTEN, wherein the factor VIII comprises an XTEN linking a first position and a second position of a B-domain deletion described in the embodiments of this paragraph, the XTEN is a sequence having at least 80%, or at least about 90%, or at least about 95%, or at least about 96%, or at least about 97%, or at least about 98%, or at least about 99% or 100% sequence identity compared to a sequence of comparable length selected from any one of Table 4, Table 13, Table 14, Table 15, Table 16, and Table 17, when optimally aligned, wherein the CFXTEN retains at least about 30%, or at least about 40%, or at least about 50%, or at least about 60%, or at least about 70%, or at least about 80%, or at least about 90% of the procoagulant activity of native FVIII.

[0230] The invention contemplates all possible permutations of insertions of XTEN between or within the domains of FVIII or at or proximal to the insertion points of Table 5, Table 6, Table 7, Table 8, and Table 9 or those illustrated in FIGS. 8-9, with optional linking of an additional XTEN to the N- or C-terminus of the FVIII, optionally linked via an additional cleavage sequence selected from Table 12, resulting in a CFXTEN composition; non-limiting examples of which are portrayed in FIGS. 5 and 12. In one embodiment, the CFXTEN comprises a FVIII BDD sequence of Table 1 in which one or more XTEN that each has at least about 80%, or at least about 90%, or at least about 95%, or at least about 96%, or at least about 97%, or at least about 98%, or at least about 99% or more sequence identity compared to a sequence from any one of Tables 3, 4, and 13-17 or fragments thereof are inserted between any two of the residual B domain amino acids of the FVIII BDD sequence, resulting in a single chain FVIII fusion protein, wherein the CFXTEN retains at least about 30%, or at least about 40%, or at least about 50%, or at least about 60%, or at least about 70%, or at least about 80%, or at least about 90% of the procoagulant activity of native FVIII. In the foregoing embodiment, the CFXTEN can have an additional XTEN sequence of any one of Tables 4, and 13-17 linked to the N- or C-terminus of the fusion protein. In another embodiment, a CFXTEN comprises at least a first XTEN inserted at a site set forth in Table 8, wherein the CFXTEN retains at least about 30%, or at least about 40%, or at least about 50%, or at least about 60%, or at least about 70%, or at least about 80%, or at least about 90% of the procoagulant activity of native FVIII. In one embodiment of a fusion protein of formula VII, the CFXTEN comprises a FVIII BDD sequence of Table 1 in which two or more XTEN that each has at least about 80%, or at least about 90%, or at least about 95%, or at least about 96%, or at least about 97%, or at least about 98%, or at least about 99%, or 100% sequence identity compared to a sequence from any one of Tables 3, 4, and 13-17 or fragments thereof are linked to a FVIII-BDD sequence in which at least one XTEN is inserted from about 3 to about 20 amino acid residues to the C-terminus side of the FVIII cleavage site amino acid R740 and from about 3 to about 20 amino acid residues to the N-terminus side of the FVIII cleavage site amino acid R1689 of the residual B domain amino acids of the FVIII BDD sequence, resulting in a single chain FVIII fusion protein, and one or two XTEN are linked by a cleavage sequence to the N- and/or C-terminus of the FVIII-BDD sequence, wherein the CFXTEN exhibits at least about 40%, or at least about 50%, or at least about 60%, or at least about 70%, or at least about 80%, or at least about 90% of the procoagulant activity of native FVIII after release of the XTEN by cleavage of the cleavage sequences.

[0231] In one embodiment, the A3 domain comprises an a3 acidic region or a portion thereof. In another embodiment, at least one XTEN is inserted within the a3 acidic region or the portion thereof, N-terminus of the a3 acidic region or the portion thereof, C-terminus of the a3 acidic region or the portion thereof, or a combination thereof. In certain embodiments, at least one XTEN is inserted within the C2 domain, N-terminus of C2 domain, C-terminus of C2 domain, or a combination thereof. In still other embodiments, the Factor VIII comprises all or portion of B domain. In yet other embodiments, at least one XTEN is inserted within all or a portion of B domain, N-terminus of B domain, C-terminus of B domain, or a combination thereof.

[0232] 2. CFXTEN Fusion Protein Configurations with Internal XTEN

[0233] In another aspect, the invention provides CFXTEN configured with one or more XTEN sequences located internal to the FVIII sequence. In one embodiment, invention provides CFXTEN configured with one or more XTEN sequences located internal to the FVIII sequence to confer properties such as, but not limited to, increased stability, increased resistance to proteases, increased resistance to clearance mechanisms including but not limiting to interaction with clearance receptors or FVIII inhibitors, and increased hydrophilicity, compared to FVIII without the incorporated XTEN.

[0234] The invention contemplates that different configurations or sequence variants of FVIII can be utilized as the platform into which one or more XTEN are inserted. These configurations include, but are not limited to, native FVIII, FVIII BDD, and single chain FVIII (scFVIII), and variants of those configurations. In the case of scFVIII, the invention provides CFXTEN that can be constructed by replacing one or multiple amino acids of the processing site of FVIII. In one embodiment, the scFVIII utilized in the CFXTEN is created by replacing the R1648 in the FVIII sequence RHQREITR (SEQ ID NO: 1698) with glycine or alanine to prevent proteolytic processing to the heterodimer form. It is specifically contemplated that any of the CFXTEN embodiments disclosed herein with a 1648 FVIII residue can have a glycine or alanine substitution for the arginine at position 1648. In some embodiments, the invention provides CFXTEN comprising scFVIII wherein parts of the sequence surrounding the R1648 processing site are replaced with XTEN, as illustrated in FIGS. 10A and 10B. In one embodiment, at least about 60%, or about 70%, or about 80%, or about 90%, or about 95%, or about 97% or more of the B-domain is replaced with an XTEN sequence disclosed herein, including one or more of the R740, R1648, or R1689 cleavage sites. In another embodiment, the CFXTEN has the FVIII sequence of the B-domain between the FXIa cleavage sites at R740 and R1689 (with at least 1-5 adjacent B-domain amino acids also retained between the cut site and the start of the XTEN to permit the protease to access the cut site) replaced with XTEN. In another embodiment, the CFXTEN has the FVIII sequence of the B-domain between the FXIa cleavage site at N745 and P1640 replaced with XTEN. In other embodiments, the invention provides CFXTEN FVIII BDD sequence variants in which portions of the B-domain are deleted but only one of the FXI R740 or R1689 activation sites (and 1-5 adjacent amino acids of the B-domain) are left within the construct, wherein the XTEN remains attached at one end to either the light or heavy chain after cleavage by FXIa, as illustrated in FIGS. 5B and 5D. In one embodiment of the foregoing, the CFXTEN comprises a FVIII BDD sequence in which the amino acids between N745 to P1640 or between S743 to Q1638 or between P747 to V1642 or between N745 and Q1656 or between N745 and S1657 or between N745 and T1667 or between N745 and Q1686 or between R747 and V1642 or between T751 and T1667 are deleted and an XTEN sequence is linked between these amino acids, connecting the heavy and light chains, and can further comprise additional XTEN inserted either in external surface loops, between FVIII domains, or at the N- or C-termini of the FVIII BDD sequence, such as one or more insertion sites from Table 5, Table 6, Table 7, Table 8, and Table 9 or those illustrated in FIGS. 8-9. In another embodiment of the foregoing, the CFXTEN comprises a FVIII BDD sequence in which the amino acids between K713 to Q1686 or between residues 741 and 1648 are deleted and an XTEN linked between the two amino acids, and additional XTEN can be inserted either in surface loops, between FVIII domains, or at the N- or C-termini of the FVIII BDD sequence, including but not limited to one or more insertion sites from Table 5, Table 6, Table 7, Table 8, and Table 9 or those illustrated in FIGS. 8-9. In some embodiments such CFXTEN sequences can have one or more XTEN exhibiting at least about 80%, or at least about 90%, or at least about 95%, or at least about 96%, or at least about 97%, or at least about 98%, or at least about 99%, or 100% sequence identity to an XTEN sequence from any one of Tables 4 and 13-17.

[0235] The invention contemplates other CFXTEN with internal XTEN in various configurations; schematics of exemplary configurations are illustrated in FIGS. 5 and 10. The regions suitable for XTEN insertion sites include the known domain boundaries of FVIII, exon boundaries, known surface (external) loops and solvent accessible surface area sites identified by X-ray crystallography analysis, and structure models derived from molecular dynamic simulations of FVIII, regions with a low degree of order (assessed by programs described in FIG. 7 legend), regions of low homology/lack of conservation across different species, and hydrophilic regions. In another embodiment, XTEN insertion sites were selected based on FVIII putative clearance receptor binding sites. In another embodiment, CFXTEN comprises XTEN inserted at locations not within close proximity to mutations implicated in hemophilia A listed in the Haemophilia A Mutation, Search, Test and Resource Site (HAMSTeRS) database were eliminated (Kemball-Cook G, et al. The factor VIII Structure and Mutation Resource Site: HAMSTeRS version 4. Nucleic Acids Res. (1998) 26(1):216-219). In another embodiment, potential sites for XTEN insertion include residues within FVIII epitopes that are capable of being bound by anti-FVIII antibodies occurring in sensitized hemophiliacs and that do not otherwise serve as protein interactive sites. Regions and/or sites that are considered for exclusion as XTEN insertion sites include residues/regions of factor VIII that are important in various interactions including other clotting proteins, residues surrounding each arginine activating/inactivating cleavage site acted on by the proteases thrombin, factor Xa, activated protein C, residues surrounding the signal peptide processing site (residue 1) if the construct contains the signal peptide, regions known to interact with other proteins such as FIXa, FX/FXa, thrombin, activated protein C, protein S cofactor to Protein C, von Willebrand factor, sites known to interact with phospholipid cofactors in coagulation, residues involved in domain interactions, residues coordinating C⁺⁺ or Cu⁺⁺ ions, cysteine residues involved in S—S intramolecular bonds, documented amino acid insertion and point mutation sites in FVIII produced in hemophilia A subjects affecting procoagulant activity, and mutation sites in FVIII made in a research lab that affect procoagulant activity. Sites considered for either insertion (to prolong half-life) or for exclusion (needed to remove spent FVIIIa or FXa) include regions known to interact with heparin sulfate proteoglycan (HSPG) or low-density lipoprotein receptor-related protein (LPR).

[0236] By analysis of the foregoing criteria, as described in Example 34, different insertion sites or ranges of insertions sites across the FVIII BDD sequence have been identified and/or confirmed as candidates for insertion of XTEN, non-limiting examples of which are listed in Table 5, Table 6, Table 7, Table 8, and Table 9 and are shown schematically in FIGS. 8 and 9. In one embodiment, CFXTEN comprise XTEN insertions between the individual domains of FVIII, i.e., between the A1 and A2, or between the A2 and the B, or between the B and the A3, or between the A3 and the C1, or between the C1 and the C2 domains. In another embodiment, CFXTEN comprises XTEN inserted within the B domain or between remnant residues of the BDD sequence. In another embodiment, CFXTEN comprises XTEN inserted at known exon boundaries of the encoding FVIII gene as exons represent evolutionary conserved sequence modules that have a high probability of functioning in the context of other protein sequences. In another embodiment, CFXTEN comprise XTEN inserted within surface loops identified by the x-ray structure of FVIII. In another embodiment, CFXTEN comprise XTEN inserted within regions of low order identified as having low or no detected electron density by X-ray structure analysis. In another embodiment, CFXTEN comprise XTEN inserted within regions of low order, predicted by structure prediction algorithms such as, but not limited to FoldIndex, RONN, and Kyte & Doolitlle algorithms. In another embodiment, CFXTEN comprise XTEN inserted within sequence areas of high frequency of hydrophilic amino acids. In another embodiment, CFXTEN comprise XTEN inserted within epitopes capable of being bound by naturally-occurring anti-FVIII antibodies in sensitized hemophiliacs. In another embodiment, CFXTEN comprise XTEN inserted within sequence areas of low sequence conservation and/or differences in sequence segment length across FVIII sequences from different species. In another embodiment, CFXTEN comprise XTEN linked to the N-terminus and/or C-terminus. In another embodiment, the invention provides CFXTEN configurations with inserted XTEN selected from two or more of the criteria from the embodiments listed above. In another embodiment, the invention provides CFXTEN configurations with at least one, alternatively at least two, alternatively at least three, alternatively at least four, alternatively at least five or more XTEN inserted into a factor VIII sequence wherein the points of insertion are at or proximal to the N- or C-terminus side of the at least one, two, three, four, or five, or six or more amino acids selected from the insertion residue amino acids of Table 5, Table 6, Table 7, Table 8, and Table 9 or those illustrated in FIGS. 8-9, or alternatively within one, or within two, or within three, or within four, or within five, or within six amino acids of the insertion residue amino acids from Table 5, Table 6, Table 7, Table 8, and Table 9, or within the various spans of the insertion residue amino acids schematically portrayed for an exemplary FVIII BDD sequence in FIG. 9.

[0237] As described above, the one or more internally-located XTEN or a fragment of XTEN can have a sequence length of 6 to 1000 or more amino acid residues. In some embodiments, wherein the CFXTEN have one or two or three or four or five or more XTEN sequences internal to the FVIII, the XTEN sequences can be identical or can be different. In one embodiment, each internally-located XTEN has at least about 80% sequence identity, or alternatively 81%, 82%, 83%, 84%, 85%, 86%, 87%, 88%, 89%, 90%, 91%, 92%, 93%, 94%, 95%, 96%, 97%, 98%, 99%, or 100% sequence identity compared to comparable lengths or fragments of XTEN or motifs selected from any one of Tables 3, 4, and 13-17, when optimally aligned. In another embodiment, the invention provides a CFXTEN configured with one or more XTEN inserted internal to a FVIII BDD sequence with at least about 80% sequence identity, or alternatively 81%, 82%, 83%, 84%, 85%, 86%, 87%, 88%, 89%, 90%, 91%, 92%, 93%, 94%, 95%, 96%, 97%, 98%, 99%, or 100% sequence identity compared to a sequence of Table 1, wherein the insertions are located at the insertion points or range of insertion points indicated in Table 5, Table 6, Table 7, Table 8, and Table 9, FIG. 8 or within the range of insertions as illustrated in FIG. 9. It will be understood by those of skill in the art that an XTEN inserted within the FVIII sequence at an insertion point of Table 5, Table 6, Table 7, Table 8, and Table 9 is linked by its N- and C-termini to flanking FVIII amino acids (or via a linking spacer or cleavage sequences, as described above), while an XTEN linked to the N- or C-terminus of FVIII would only be linked to a single FVIII amino acid (or to a linking spacer or cleavage sequence amino acid, as described above). By way of example only, variations of CFXTEN with three internal XTEN could have: XTEN (as described herein) incorporated between FVIII BDD residues 741 and 1640, residues 18 and 19, and residues 1656 and 1657; or XTEN incorporated between FVIII BDD residues 741 and 1640, residues 1900 and 1901, and at the C-terminus at residue 2332; or XTEN incorporated between FVIII BDD residues 26 and 27, residues 1656 and 1657, and residues 1900 and 1901; or XTEN incorporated between FVIII BDD residues 741 and 1640, residues 1900 and 1901, and at the C-terminus at residue 2332.

[0238] In evaluating the CFXTEN fusion proteins with XTEN inserted in the locations from Table 5, it was discovered that insertions in certain regions of the FVIII sequence resulted in CFXTEN with good expression and retention of procoagulant activity. Accordingly, in preferred embodiments, the invention provides CFXTEN fusion proteins configured with one, or two, or three, or four, or five, or six or more XTEN, each having at least about 80% sequence identity, or alternatively 81%, 82%, 83%, 84%, 85%, 86%, 87%, 88%, 89%, 90%, 91%, 92%, 93%, 94%, 95%, 96%, 97%, 98%, 99%, or 100% sequence identity compared to an XTEN selected from any one of Tables 4, and 13-17 inserted internal or linked to a FVIII BDD sequence with at least about 80% sequence identity, or alternatively 81%, 82%, 83%, 84%, 85%, 86%, 87%, 88%, 89%, 90%, 91%, 92%, 93%, 94%, 95%, 96%, 97%, 98%, 99%, or 100% sequence identity compared to a sequence of Table 1, wherein the insertions are located at an insertion point within one, or two, or three, or four, or five, or six or more ranges set forth in Table 7. In the foregoing embodiments, the CFXTEN fusion proteins with the XTEN insertions retain at least about 10%, 20%, 30%, 40%, 50%, 60%, 70%, 80%, or 90% or more of the procoagulant activity compared to the corresponding FVIII not linked to XTEN.

[0239] In evaluating the CFXTEN fusion proteins with XTEN inserted in one or more locations from Table 5, it was surprisingly discovered that a high percentage of fusion proteins with the XTEN insertions retained procoagulant activity, as described in Example 25. Accordingly, the invention provides CFXTEN fusion proteins configured with one, two, three, four, five, six or more XTEN wherein the resulting fusion protein exhibits at least about 10%, or 20%, or 30%, or 40%, or 50%, or 60%, or 70%, or 80%, or 90% or more of the procoagulant activity compared to the corresponding FVIII not linked to XTEN when assayed by a coagulation assay described herein. In a preferred embodiment, the invention provides CFXTEN fusion proteins comprising one, or two, or three, or four, or five, or six or more XTEN, each having at least about 80% sequence identity, or alternatively 81%, 82%, 83%, 84%, 85%, 86%, 87%, 88%, 89%, 90%, 91%, 92%, 93%, 94%, 95%, 96%, 97%, 98%, 99%, or 100% sequence identity compared to an XTEN selected from any one of Tables 4, and 13-17 linked to a FVIII BDD sequence with at least about 80% sequence identity, or alternatively 81%, 82%, 83%, 84%, 85%, 86%, 87%, 88%, 89%, 90%, 91%, 92%, 93%, 94%, 95%, 96%, 97%, 98%, 99%, or 100% sequence identity compared to a sequence of Table 1, wherein the insertions are located at one or more insertion points selected from Table 5, Table 6, Table 7, Table 8, and Table 9, and wherein the resulting fusion protein exhibits at least about 30%, or at least about 40%, or at least about 50%, or at least about 60%, or at least about 70% or more procoagulant activity compared to the corresponding FVIII not linked to XTEN, when assayed in vitro by an assay described herein (e.g., a chromogenic assay). As the subject CFXTEN fusion proteins typically exhibit increased terminal half-life compared to native FVIII, it will be appreciated by one of skill in the art that a CFXTEN with lower procoagulant activity relative to an equimolar amount of native FVIII would nevertheless be acceptable when administered as a therapeutic composition to a subject in need thereof. In another embodiment, the CFXTEN fusion proteins comprising one, or two, or three, or four, or five or more XTEN, each having at least about 80% sequence identity, or alternatively 81%, 82%, 83%, 84%, 85%, 86%, 87%, 88%, 89%, 90%, 91%, 92%, 93%, 94%, 95%, 96%, 97%, 98%, 99%, or 100% sequence identity compared to an XTEN selected from any one of Tables 4, and 13-17 linked to a FVIII BDD sequence with at least about 80% sequence identity, or alternatively 81%, 82%, 83%, 84%, 85%, 86%, 87%, 88%, 89%, 90%, 91%, 92%, 93%, 94%, 95%, 96%, 97%, 98%, 99%, or 100% sequence identity compared to a sequence of Table 1, wherein the insertions are located at one or more insertion points or the range of insertion points selected from Table 5, Table 6, Table 7, Table 8, and Table 9, wherein the resulting fusion protein exhibits at least about 0.5 IU/ml, or at least about 0.75 IU/ml, or at least about 1.0 IU/ml, or at least about 1.5 IU/ml, or at least about 2.0 IU/ml, or at least about 2.5 IU/ml, or at least about 3 IU/ml, or at least about 4 IU/ml, or at least about 5 IU/ml, or at least about 7 IU/ml, or at least about 10 IU/ml, or at least about 20 IU/ml, or at least about 30 IU/ml FVIII activity when expressed in cell culture medium and assayed in a chromogenic assay, wherein the culture and expression are according to methods described herein; e.g., the methods of Example 25.

[0240] It is believed that the discovery of the insertions sites wherein the FVIII retains at least a portion of its procoagulant activity would also permit the insertion of other peptides and polypeptides with either unstructured or structured characteristics that are associated with the prolongation of half-life when fused to a FVIII protein in one or more of those same sites. Non-limiting examples include albumin, albumin fragments, Fc fragments of immunoglobulins, the β subunit of the C-terminal peptide (CTP) of human chorionic gonadotropin, a HAP sequence, a transferrin, the PAS polypeptides of U.S. Pat Application No. 20100292130, polyglycine linkers, polyserine linkers, peptides and short polypeptides of 6-40 amino acids of two types of amino acids selected from glycine (G), alanine (A), serine (S), threonine (T), glutamate (E) and proline (P) with varying degrees of secondary structure from less than 50% to greater than 50%, amongst others, would be suitable for insertion in the identified active insertions sites of FVIII.

[0241] In the fusion protein embodiments described herein, the CFXTEN fusion protein can further comprise one or more cleavage sequence from Table 12 or other sequences known in the art, the cleavage sequence being located between or within 6 amino acid residues of the intersection of the FVIII and the XTEN sequences, which may include two cleavage sequences in a given internal XTEN sequence. In one embodiment, the CFXTEN comprising cleavage sequences has two identical cleavage sequences, each located at or near the respective ends of one or more internal XTEN such that the XTEN is released from the fusion protein when cleaved by the protease that binds to and cleaves that sequence. The sequences that can be cleaved are described more fully below and exemplary sequences are provided in Table 12.

TABLE 5
Insertion locations for XTEN linked
to the FVIII BDD sequence

| | XTEN | | FVIII BDD | |
|---|---|---|---|---|
| | Insertion | Insertion | Downstream | FVIII |
| No. | Point | Residue | Sequence | Domain |
| 1 | 0 | (N- | ATR | A1 |
| | | terminus) | | |
| 2 | 3 | R | RYY | A1 |
| 3 | 17 | M | QSD | A1 |
| 4 | 18 | Q | SDL | A1 |
| 5 | 22 | G | ELP | A1 |
| 6 | 24 | L | PVD | A1 |
| 7 | 26 | V | DAR | A1 |
| 8 | 28 | A | RFP | A1 |
| 9 | 32 | P | RVP | A1 |
| 10 | 38 | F | PFN | A1 |
| 11 | 40 | F | NTS | A1 |
| 12 | 41 | N | TSV | A1 |
| 13 | 60 | N | IAK | A1 |
| 14 | 61 | I | AKP | A1 |
| 15 | 65 | R | PPW | A1 |
| 16 | 81 | Y | DTV | A1 |
| 17 | 111 | G | AEY | A1 |
| 18 | 116 | D | QTS | A1 |
| 19 | 119 | S | QRE | A1 |
| 20 | 120 | Q | REK | A1 |
| 21 | 128 | V | FPG | A1 |
| 22 | 129 | F | PGG | A1 |
| 23 | 130 | P | GGS | A1 |
| 24 | 182 | G | SLA | A1 |
| 25 | 185 | A | KEK | A1 |
| 26 | 188 | K | TQT | A1 |
| 27 | 205 | G | KSW | A1 |
| 28 | 210 | S | ETK | A1 |
| 29 | 211 | E | TKN | A1 |
| 30 | 216 | L | MQD | A1 |
| 31 | 220 | R | DAA | A1 |
| 32 | 222 | A | ASA | A1 |
| 33 | 223 | A | SAR | A1 |
| 34 | 224 | S | ARA | A1 |
| 35 | 230 | K | MHT | A1 |
| 36 | 243 | P | GLI | A1 |
| 37 | 244 | G | LIG | A1 |
| 38 | 250 | R | KSV | A1 |
| 39 | 318 | D | GME | A1 |
| 40 | 333 | P | QLR | A1 |
| 42 | 334 | Q | LRM | A1 |
| 43 | 336 | R | MKN | a1 |
| 44 | 339 | N | NEE | a1 |
| 45 | 345 | D | YDD | a1 |
| 46 | 357 | V | VRF | a1 |
| 47 | 367 | S | FIQ | a1 |
| 48 | 370 | S | RPY | a1 |
| 49 | 375 | A | KKH | A2 |
| 50 | 376 | K | KHP | A2 |
| 51 | 378 | H | PKT | A2 |
| 52 | 399 | V | LAP | A2 |
| 53 | 403 | D | DRS | A2 |
| 54 | 405 | R | SYK | A2 |
| 55 | 409 | S | QYL | A2 |
| 56 | 416 | P | QRI | A2 |
| 57 | 434 | E | TFK | A2 |
| 58 | 438 | T | REA | A2 |
| 59 | 441 | A | IQH | A2 |
| 60 | 442 | I | QHE | A2 |
| 61 | 463 | I | IFK | A2 |
| 62 | 487 | Y | SRR | A2 |
| 63 | 490 | R | LPK | A2 |
| 64 | 492 | P | KGV | A2 |
| 65 | 493 | K | GVK | A2 |
| 66 | 494 | G | VKH | A2 |
| 67 | 500 | D | FPI | A2 |
| 68 | 506 | G | EIF | A2 |
| 69 | 518 | E | DGP | A2 |
| 70 | 556 | K | ESV | A2 |
| 71 | 565 | Q | IMS | A2 |
| 72 | 566 | I | MSD | A2 |
| 73 | 598 | P | AGV | A2 |
| 74 | 599 | A | GVQ | A2 |
| 75 | 603 | L | EDP | A2 |
| 76 | 616 | S | ING | A2 |
| 77 | 686 | G | LWI | A2 |
| 78 | 713 | K | NTG | A2 |
| 79 | 719 | Y | EDS | A2 |
| 80 | 730 | L | LSK | A2 |
| 81 | 733 | K | NNA | A2 |
| 82 | 745 | N | PPV | B |
| 83 | 1640 | P | PVL | B |
| 84 | 1652 | R | TTL | B |
| 85 | 1656 | Q | SDQ | A3 |
| 86 | 1685 | N | QSP | A3 |
| 87 | 1711 | M | SSS | A3 |
| 88 | 1713 | S | SPH | A3 |
| 89 | 1720 | N | RAQ | A3 |
| 90 | 1724 | S | GSV | A3 |
| 91 | 1725 | G | SVP | A3 |
| 92 | 1726 | S | VPQ | A3 |
| 93 | 1741 | G | SFT | A3 |
| 94 | 1744 | T | QPL | A3 |
| 95 | 1749 | R | GEL | A3 |
| 96 | 1773 | V | TFR | A3 |
| 97 | 1792 | Y | EED | A3 |
| 98 | 1793 | E | EDQ | A3 |
| 99 | 1796 | Q | RQG | A3 |
| 100 | 1798 | Q | GAE | A3 |
| 101 | 1799 | G | AEP | A3 |
| 102 | 1802 | P | RKN | A3 |
| 103 | 1803 | R | KNF | A3 |
| 104 | 1807 | V | KPN | A3 |
| 105 | 1808 | K | PNE | A3 |
| 106 | 1827 | K | DEF | A3 |
| 107 | 1844 | E | KDV | A3 |
| 108 | 1861 | N | TLN | A3 |
| 109 | 1863 | L | NPA | A3 |
| 110 | 1896 | E | RNC | A3 |
| 111 | 1900 | R | APC | A3 |
| 112 | 1904 | N | IQM | A3 |
| 113 | 1905 | I | QME | A3 |
| 114 | 1910 | P | TFK | A3 |
| 115 | 1920 | A | ING | A3 |
| 116 | 1937 | D | QRI | A3 |
| 117 | 1981 | G | VFE | A3 |
| 118 | 2019 | N | KCQ | A3 |
| 119 | 2020 | K | CQT | C1 |
| 120 | 2044 | G | QWA | C1 |
| 121 | 2068 | F | SWI | C1 |
| 122 | 2073 | V | DLL | C1 |
| 123 | 2090 | R | QKF | C1 |
| 124 | 2092 | K | FSS | C1 |
| 125 | 2093 | F | SSL | C1 |
| 126 | 2111 | K | WQT | C1 |
| 127 | 2115 | Y | RGN | C1 |
| 128 | 2120 | T | GTL | C1 |
| 129 | 2125 | V | FFG | C1 |
| 130 | 2171 | L | NSC | C1 |
| 131 | 2173 | S | CSM | C2 |
| 132 | 2188 | A | QIT | C2 |
| 133 | 2223 | V | NNP | C2 |
| 134 | 2224 | N | NPK | C2 |
| 135 | 2227 | K | EWL | C2 |
| 136 | 2268 | G | HQW | C2 |
| 137 | 2277 | N | GKV | C2 |
| 138 | 2278 | G | KVK | C2 |
| 139 | 2290 | F | TPV | C2 |
| 140 | 2332 | Y | C terminus | CT |
| | | | of FVIII | |

Indicates an insertion point for XTEN based on the amino acid number of mature full-length human FVIII, wherein the insertion could be either on the N- or C-terminal side of the indicated amino acid Downstream sequence in FVIII BDD with 746-1639 deletion

TABLE 6
Exemplary insertion locations for XTEN linked to a FVIII polypeptide

| | XTEN | | FVIII BDD | | Distance from |
|---|---|---|---|---|---|
| | Insertion | Insertion | Downstream | FVIII | insertion |
| No. | Point | Residue | Sequence | Domain | residue |
| 9 | 32 | P | RVP | A1 | −3, +6 |
| 31 | 220 | R | DAA | A1 | — |
| 34 | 224 | S | ARA | A1 | +5 |
| 43 | 336 | R | MKN | a1 | −1, +6 |
| 44 | 339 | N | NEE | a1 | −4, +5 |
| 52 | 399 | V | LAP | A2 | −6, +3 |
| 56 | 416 | P | QRI | A2 | +6 |
| 75 | 603 | L | EDP | A2 | _6, +6 |
| 85 | 1656 | Q | SDQ | B | −3, +6 |
| 87 | 1711 | M | SSS | A3 | −6, +1 |
| 91 | 1725 | G | SVP | A3 | +6 |
| 113 | 1905 | I | QME | A3 | +6 |
| 114 | 1910 | P | TFK | A3 | −5, +6 |

Distance from insertion residue refers to the relative number of amino acids away from the N-terminus (negative numbers) or C-terminus (positive numbers) of the designated insertion residue (residue “0”) where an insertion may be made. The designation “−x” refers to an insertion site which is x amino acids away on the N-terminal side of the designated insertion residue. Similarly, the designation “+x” refers to an insertion site which is x amino acids away on the C-terminal side of the designated insertion residue.
For example, “−1, +2” indicates that the insertion is made at the N-terminus or C-terminus of amino acid residues denoted −1, 0, +1 or +2.

TABLE 7
Further exemplary insertion locations for XTEN
linked to a FVIII polypeptide

| | XTEN Insertion | First Insertion | FVIII |
|---|---|---|---|
| No. | Point Range | Residue | Domain |
| 3 | 18-32 | Q | A1 |
| 8 | 40 | F | A1 |
| 18 | 211-224 | E | A1 |
| 27 | 336-403 | R | A1, A2 |
| 43 | 599 | A | A2 |
| 47 | 745-1640 | N | B |
| 50 | 1656-1728 | Q | B, A3 |
| 57 | 1796-1804 | R | A3 |
| 65 | 1900-1912 | R | A3 |
| 81 | 2171-2332 | L | C1, C2 |

indicates range of insertion sites numbered relative to the amino acid number of mature human FVIII

TABLE 8
Exemplary XTEN insertion
locations within B-domain deleted
variants of a FVIII polypeptide

| XTEN | First | Second |
|---|---|---|
| Insertion | Insertion | Insertion |
| Point Range | Residue | Residue |
| 740-1640 | R | P |
| 740-1690 | R | S |
| 741-1648 | S | R |
| 743-1638 | S | Q |
| 745-1638 | N | Q |
| 745-1640 | N | P |
| 745-1656 | N | Q |
| 745-1657 | N | S |
| 745-1667 | N | T |
| 745-1686 | N | Q |
| 747-1642 | R | V |
| 751-1667 | T | T |

indicates the amino acids linked within the B-domain deleted variant and adjacent A3 domain, with the amino acids numbered relative to the amino acid number of mature human FVIII indicates the amino acids linked by an XTEN inserted in the BDD-FVIII

TABLE 9
Exemplary insertion locations for
XTEN linked to a FVIII polypeptide
resulting in procoagulant activity

| | XTEN | | FVIII BDD | |
|---|---|---|---|---|
| | Insertion | Insertion | Downstream | FVIII |
| No. | Point | Residue | Sequence | Domain |
| 2 | 3 | R | RYY | A1 |
| 4 | 18 | Q | SDL | A1 |
| 5 | 22 | G | ELP | A1 |
| 7 | 26 | V | DAR | A1 |
| 9 | 32 | P | RVP | A1 |
| 11 | 40 | F | NTS | A1 |
| 18 | 116 | D | QTS | A1 |
| 19 | 119 | S | QRE | A1 |
| 26 | 188 | K | TQT | A1 |
| 29 | 211 | E | TKN | A1 |
| 30 | 216 | L | MQD | A1 |
| 31 | 220 | R | DAA | A1 |
| 34 | 224 | S | ARA | A1 |
| 35 | 230 | K | MHT | A1 |
| 40 | 333 | P | QLR | A1 |
| 43 | 336 | R | MKN | a1 |
| 44 | 339 | N | NEE | a1 |
| 52 | 399 | V | LAP | A2 |
| 53 | 403 | D | DRS | A2 |
| 55 | 409 | S | QYL | A2 |
| 56 | 416 | P | QRI | A2 |
| 60 | 442 | I | QHE | A2 |
| 62 | 487 | Y | SRR | A2 |
| 63 | 490 | R | LPK | A2 |
| 66 | 494 | G | VKH | A2 |
| 69 | 518 | E | DGP | A2 |
| 74 | 599 | A | GVQ | A2 |
| 75 | 603 | L | EDP | A2 |
| 78 | 713 | K | NTG | A2 |
| 82 | 745 | N | PPV | B |
| 85 | 1656 | Q | SDQ | A3 |
| 87 | 1711 | M | SSS | A3 |
| 89 | 1720 | N | RAQ | A3 |
| 91 | 1725 | G | SVP | A3 |
| 99 | 1796 | Q | RQG | A3 |
| 102 | 1802 | P | RKN | A3 |
| 110 | 1896 | E | RNC | A3 |
| 111 | 1900 | R | APC | A3 |
| 112 | 1904 | N | IQM | A3 |
| 113 | 1905 | I | QME | A3 |
| 114 | 1910 | P | TFK | A3 |
| 121 | 2068 | F | SWI | C1 |
| 130 | 2171 | L | NSC | C1 |
| 135 | 2227 | K | EWL | C2 |
| 137 | 2277 | N | GKV | C2 |
| 140 | 2332 | Y | C terminus | C2 |
| | | | of FVIII | |

Downstream sequence in FVIII BDD with 746-1639 deletion

[0242] In another aspect, the invention provides libraries of components and methods to create the libraries derived from nucleotides encoding FVIII segments, XTEN, and FVIII segments linked to XTEN that are useful in the preparation of genes encoding the subject CFXTEN. In a first step, a library of genes encoding FVIII and XTEN inserted into the various single sites at or within 1-6 amino acids of an insertion site identified in Table 5 or illustrated in FIGS. 8-9 are created, expressed, and the CFXTEN recovered and evaluated for activity and pharmacokinetics as illustrated in FIG. 15. Those CFXTEN showing enhanced properties are then used to create genes encoding a FVIII segment and the insertion site plus an XTEN, with components from each enhanced insertion represented in the library, as illustrated in FIG. 11. In one embodiment, the library components are assembled using standard recombinant techniques in combinatorial fashion, as illustrated in FIG. 11, resulting in permutations of CFXTEN with multiple internal and N- and C-terminus XTEN, that can include the insertion sites of or proximal to those Table 5, Table 6, Table 7, Table 8 and Table 9, or as illustrated in FIGS. 8-9. The resulting constructs would then be evaluated for activity and enhanced pharmacokinetics, and those candidates resulting in CFXTEN with enhanced properties, e.g., reduced active clearance, resistance to proteases, reduced immunogenicity, and enhance pharmacokinetics, compared to FVIII not linked to XTEN, are evaluated further.

[0243] 3. XTEN Permissive Loops

[0244] As described in detail elsewhere herein and as illustrated in FIGS. 33-36, the inventors have recognized that each FVIII “A” domain comprise at least two “XTEN permissive loops” into which XTEN sequences can be inserted without eliminating procoagulant activity of the recombinant protein, or the ability of the recombinant proteins to be expressed in vivo or in vitro in a host cell. The inventors have identified the XTEN permissive loops as regions with, among other attributes, high surface or solvent exposure and high conformational flexibility. The A1 domain comprises an XTEN permissive loop-1 (A1-1) region and an XTEN permissive loop-2 (A1-2) region, the A2 domain comprises an XTEN permissive loop-1 (A2-1) region and an XTEN permissive loop-2 (A2-2) region, the A3 domain comprises an XTEN permissive loop-1 (A3-1) region and an XTEN permissive loop-2 (A3-2) region.

[0245] In certain aspects a recombinant FVIII protein as described above comprises at least one XTEN sequence inserted into at least one of the XTEN permissive loops A1-1, A1-2, A2-1, A2-2, A3-1, or A3-2, wherein the recombinant FVIII protein has procoagulant activity and can be expressed in vivo or in vitro in a host cell. In certain aspects a recombinant FVIII protein as described above comprises at least two XTEN sequences inserted into FVIII, e.g., into two different XTEN permissive loops A1-1, A1-2, A2-1, A2-2, A3-1, or A3-2, wherein the recombinant FVIII protein has procoagulant activity and can be expressed in vivo or in vitro in a host cell. Alternatively, a recombinant FVIII protein as described above can comprise two or more XTEN sequences inserted into a single XTEN permissive loop either with our without XTEN sequences inserted into other XTEN permissive loops, wherein the recombinant FVIII protein has procoagulant activity and can be expressed in vivo or in vitro in a host cell. In certain aspects a recombinant FVIII protein as described above can comprise at least one XTEN sequence inserted into at least one of the XTEN permissive loops as described above, and can further comprise one or more XTEN sequences inserted into a3, wherein the recombinant FVIII protein has procoagulant activity and can be expressed in vivo or in vitro in a host cell. In certain aspects, a recombinant FVIII protein of the invention can comprise three, four, five, six or more XTEN sequences inserted into one or more XTEN permissive loops or into a3, wherein the recombinant FVIII protein has procoagulant activity and can be expressed in vivo or in vitro in a host cell.

[0246] In certain aspects a recombinant FVIII protein as described above comprises at least one XTEN sequence inserted into a3, wherein the recombinant FVIII protein has procoagulant activity and can be expressed in vivo or in vitro in a host cell. In certain aspects a recombinant FVIII protein of the invention comprises at least one XTEN sequence inserted into a3, and further comprises one or more XTEN sequences inserted into one or more XTEN permissive loops as described above, wherein the recombinant FVIII protein has procoagulant activity and can be expressed in vivo or in vitro in a host cell.

[0247] The inventors have recognized that a recombinant FVIII protein of the invention comprises at least two XTEN permissive loops in each of the FVIII A domain regions which allows for insertion of an XTEN sequence while having procoagulant activity and still being able to be expressed in vivo or in vitro by a host cell. Various crystal structures of FVIII have been determined, of varying degrees of resolution. These structures of FVIII and FVIIIa, determined by X-ray crystallography and molecular dynamic simulation, were used to generate models of accessible surface area and conformational flexibility for FVIII. For example, the crystal structure of human FVIII has been determined by Shen et al. Blood 111: 1240-1247 (2008) and Ngo et al. Structure 16: 597-606 (2008). The data for these structures is available from the Protein Data Bank (pdb.org) under Accession Numbers 2R7E and 3CDZ, respectively.

[0248] The predicted secondary structure of the heavy and light chains of human FVIII according to the Shen et al. crystal structure is reproduced in FIGS. 37A and 37B. The various beta strands predicted from the Shen et al. crystal structure are numbered consecutively in FIGS. 8A and 8B. In certain embodiments, the XTEN permissive loops A1-1, A1-2, A2-1, A2-2, A3-1, and A3-2 are contained within surface-exposed, flexible loop structures in the A domains of FVIII. A1-1 is located between beta strand 1 and beta strand 2, A1-2 is located between beta strand 11 and beta strand 12, A2-1 is located between beta strand 22 and beta strand 23, A2-2 is located between beta strand 32 and beta strand 33, A3-1 is located between beta strand 38 and beta strand 39 and A3-2 is located between beta strand 45 and beta strand 46, according to the secondary structure of mature FVIII stored as Accession Number 2R7E of the PDB database (PDB:2R7E) and as shown in FIGS. 8A and 8B. The secondary structure of PDB Accession Number 2R7E shown in FIGS. 8A and 8B corresponds to the standardized secondary structure assignment according to the DSSP program (Kabsch and Sander, Biopolymers, 22:2577-2637 (1983)). The DSSP secondary structure of the mature FVIII stored as PDB Accession Number 2R7E can be accessed at the DSSP database, available at the world wide web site swift.cmbi.ru.nl/gv/dssp/(last accessed Feb. 9, 2012) (Joosten et al., 39(Suppl. 1): D411-D419 (2010)).

[0249] In certain aspects, a surface-exposed, flexible loop structure comprising A1-1 corresponds to a region in native mature human FVIII from about amino acid 15 to about amino acid 45 of FIG. 30. In certain aspects, A1-1 corresponds to a region in native mature human FVIII from about amino acid 18 to about amino acid 41 of FIG. 30. In certain aspects, the surface-exposed, flexible loop structure comprising A1-2 corresponds to a region in native mature human FVIII from about amino acid 201 to about amino acid 232 of FIG. 30. In certain aspects, A1-2 corresponds to a region in native mature human FVIII from about amino acid 218 to about amino acid 229 of FIG. 30. In certain aspects, the surface-exposed, flexible loop structure comprising A2-1 corresponds to a region in native mature human FVIII from about amino acid 395 to about amino acid 421 of FIG. 30. In certain aspects, A2-1 corresponds to a region in native mature human FVIII from about amino acid 397 to about amino acid 418 of FIG. 30. In certain aspects, the surface-exposed, flexible loop structure comprising A2-2 corresponds to a region in native mature human FVIII from about amino acid 577 to about amino acid 635 of FIG. 30. In certain aspects, A2-2 corresponds to a region in native mature human FVIII from about amino acid 595 to about amino acid 607 of FIG. 30. In certain aspects, the surface-exposed, flexible loop structure comprising A3-1 corresponds to a region in native mature human FVIII from about amino acid 1705 to about amino acid 1732 of FIG. 30. In certain aspects, A3-1 corresponds to a region in native mature human FVIII from about amino acid 1711 to about amino acid 1725 of FIG. 30. In certain aspects, the surface-exposed, flexible loop structure comprising A3-2 corresponds to a region in native mature human FVIII from about amino acid 1884 to about amino acid 1917 of FIG. 3. In certain aspects, A3-2 corresponds to a region in native mature human FVIII from about amino acid 1899 to about amino acid 1911 of FIG. 30.

[0250] In certain aspects a recombinant FVIII protein of the invention comprises one or more XTEN sequences inserted into one or more XTEN permissive loops of FVIII, or into the a3 region, wherein the recombinant FVIII protein has procoagulant activity and can be expressed in vivo or in vitro in a host cell. XTEN sequences to be inserted include those that increase the in vivo half-life or the in vivo or in vitro stability of FVIII.

[0251] In certain aspects, a recombinant FVIII protein of the invention comprises an XTEN sequences inserted immediately downstream of one or more amino acids corresponding to one or more amino acids in mature native human FVIII including, but not limited to: amino acid 18 of FIG. 30, amino acid 26 of FIG. 30, amino acid 40 of FIG. 30, amino acid 220 of FIG. 30, amino acid 224 of FIG. 30, amino acid 399 of FIG. 30, amino acid 403 of FIG. 30, amino acid 599 of FIG. 30, amino acid 603 of FIG. 30, amino acid 1711 of FIG. 30, amino acid 1720 of FIG. 30, amino acid 1725 of FIG. 30, amino acid 1900 of FIG. 30, amino acid 1905 of FIG. 30, amino acid 1910 of FIG. 30, or any combination thereof, including corresponding insertions in BDD-variants of FVIII described herein.

[0252] In certain aspects, a recombinant FVIII protein of the invention comprises at least one XTEN sequence inserted into the a3 region of FVIII, either alone or in combination with one or more XTEN sequences being inserted into the XTEN permissive loops of the A domains (e.g., A1-1, A1-2, A2-1, A2-2, A3-1, or A3-2 as described above), wherein the recombinant FVIII protein has procoagulant activity and can be expressed in vivo or in vitro in a host cell. In certain aspects, at least one XTEN sequence is inserted into the a3 region immediately downstream of an amino acid which corresponds to amino acid 1656 of FIG. 30. In certain aspects, a recombinant FVIII protein of the invention comprises an XTEN sequence inserted into the a3 region as described, and further includes one or more XTEN sequences inserted immediately downstream of one or more amino acids corresponding to one or more amino acids in mature native human FVIII including, but not limited to: amino acid 18 of FIG. 30, amino acid 26 of FIG. 30, amino acid 40 of FIG. 30, amino acid 220 of FIG. 30, amino acid 224 of FIG. 30, amino acid 399 of FIG. 30, amino acid 403 of FIG. 30, amino acid 599 of FIG. 30, amino acid 603 of FIG. 30, amino acid 1711 of FIG. 30, amino acid 1720 of FIG. 30, amino acid 1725 of FIG. 30, amino acid 1900 of FIG. 30, amino acid 1905 of FIG. 30, amino acid 1910 of FIG. 30, or any combination thereof.

[0253] It will be understood by one of skill in the art that the foregoing aspects of permissive loops of a native FVIII protein into which a heterologous protein can be inserted are also applicable to the B-domain deleted FVIII variants described herein; e.g., sequences set forth in Table 1. In practicing the present invention, it will be understood that a BDD-FVIII sequence of Table 1 can be substituted for the recombinant FVIII protein of the various embodiments described above, and it is believed that the resulting constructs will similarly retain procoagulant activity.

[0254] 4. Interference with FVIII Binding Agents

[0255] It is an object of the present invention to provide procoagulant CFXTEN fusion protein compositions for use in human patients suffering from coagulopathies, such as haemophilia A, who have native or acquired antibodies, inhibitors, or other proteins or molecules that bind to FVIII that affect the activity or half-life of CFXTEN fusion proteins, wherein the CFXTEN retain a greater amount of procoagulant activity compared to the corresponding FVIII not linked to XTEN. As used herein, “FVIII binding agent” means any molecule capable of binding to native FVIII or to a recombinant factor VIII fusion protein of the invention comprising factor VIII or a fragment thereof, whether native, derived, or produced recombinantly. It is specifically contemplated that FVIII binding agent includes anti-FVIII antibodies and FVIII inhibitors, amongst other proteins capable of specifically binding to FVIII. In one aspect, the invention provides procoagulant CFXTEN fusion proteins that exhibit reduced binding to an anti-FVIII antibody or FVIII inhibitor that interferes with the procoagulant activity of FVIII. As used herein, “anti-FVIII antibody” or “anti-factor VIII antibody” means an antibody capable of binding FVIII or a FVIII component of a CFXTEN of the invention, said antibody including but not limited to the antibodies of Table 10 or polyclonal antibody from a hemophilia A patient with FVIII inhibitors. The term antibody includes monoclonal antibodies, polyclonal antibodies, antibody fragments and antibody fragment clones. As used herein, “FVIII inhibitor” or “anti-FVIII inhibitor antibody” means an antibody capable of binding FVIII or a FVIII component of a CFXTEN of the invention and that reduces by any means the procoagulant activity of FVIII or the FVIII component of a CFXTEN. In another aspect, the invention provides CFXTEN fusion proteins that retain procoagulant activity in the presence of a FVIII inhibitor. In another aspect, the invention provides CFXTEN fusion proteins comprising FVIII that exhibit increased terminal half-life in the presence of a FVIII binding agent compared to the FVIII not linked to XTEN.

[0256] The majority of inhibitory antibodies to human factor VIII act by binding to epitopes located in the A2 domain or the C2 domain of factor VIII, disrupting specific functions associated with these domains, (U.S. Pat. No. 6,770,744; Fulcher et al. Localization of human factor FVIII inhibitor epitopes to two polypeptide fragments. Proc. Natl. Acad. Sci. USA (1985) 82:7728-7732; Scandella et al. Epitope mapping of human factor VIII inhibitor antibodies by deletion analysis of fVIII fragments expressed in Escherichia coli. Proc. Natl. Acad. Sci. USA (1988) 85:6152-6156). While 68% percent of inhibitory antibodies are reported to be directed against the A2 and/or C2 domain, 3% act against the A1 domain and 46% against the a3 acidic region (Lavigne-Lissalde, G., et al. Characteristics, mechanisms of action, and epitope mapping of anti-factor VIII antibodies. Clin Rev Allergy Immunol (2009) 37:67-79). For example, certain heavy chain-specific inhibitors react with the 18.3-kD amino-terminal segment of the A2 domain (Scandella D, et al. 1988); Lollar P et al. Inhibition of human factor VIIIa by anti-A2 subunit antibodies. J Clin Invest 1994; 93:2497). FVIII contains a phospholipid binding site in the C2 domain between amino acids 2302 and 2332, and there is also a von Willebrand factor binding site in the C2 domain that acts in conjunction with amino acids 1649-1689 in the A3 domain. The C2 domain also has epitopes that, when bound by inhibitors, block the activation of FVIII by thrombin or factor Xa. Inhibitors binding specifically to the light chain recognize epitopes in the A3 domain or a major antigenic region in the C2 domain and can result in reduced procoagulant activity by preventing the binding of FVIII to phospholipid or reducing the dissociation rate of FVIII from von Willebrand factor (Gilles J G, et al. Anti-factor VIII antibodies of hemophiliac patients are frequently directed towards nonfunctional determinants and do not exhibit isotypic restriction. Blood (1993) 82:2452; Shima M, et al. A factor VIII neutralizing monoclonal antibody and a human inhibitor alloantibody recognizing epitopes in the C2 domain inhibit factor VIII binding to von Willebrand factor and to phosphatidylserine. Thromb Haemost (1993) 69:240). Non-limiting examples of monoclonal FVIII inhibitors are listed in Table 9. In patients with high-titer inhibitors, there is an increased risk of developing recurrent bleeding in particular joints, which may ultimately result in decreased quality of life, disability, or death from excessive blood loss (U.S. Pat. Application No. 20120065077; Zhang et al., Clinic. Rev. Allerg. Immunol., 37:114-124 (2009); Gouw and van den Berg, Semin. Thromb. Hemost., 35:723-734 (2009))

[0257] While not intending to be bound by any particular theory, it is believed that the unstructured characteristic of the XTEN incorporated into the CFXTEN fusion proteins permits the XTEN to adopt conformations that result in steric hindrance to inhibitors that would otherwise bind to FVIII epitopes. As illustrated in FIG. 6, as the incorporated XTEN assumes various random coil conformations, it spatially covers regions of the FVIII component of the fusion protein and sterically interferes with the ability of an inhibitor to bind to a FVIII epitope.

[0258] In one embodiment, the invention provides CFXTEN exhibiting procoagulant activity and reduced binding in the presence of an antibody binding to the C2 domain of factor VIII compared to the corresponding factor VIII not linked to XTEN and/or to native FVIII. In another embodiment, the invention provides CFXTEN exhibiting procoagulant activity and reduced binding in the presence of an antibody binding to the A2 domain of Factor VIII compared to the corresponding factor VIII not linked to XTEN or to native FVIII. In another embodiment, the invention provides CFXTEN exhibiting procoagulant activity and reduced binding in the presence of antibodies binding to the A2 and the C2 domain of Factor VIII, compared to the corresponding factor VIII not linked to XTEN or to native FVIII. In one embodiment, the invention provides CFXTEN exhibiting procoagulant activity and reduced binding, compared to the corresponding FVIII not linked to XTEN, in the presence of an antibody selected from the group consisting of the antibodies of Table 10. In one embodiment, the CFXTEN fusion protein exhibits reduced binding to the antibody GMA8021. In another embodiment, the CFXTEN fusion protein exhibits reduced binding to the antibody GMA8008. In another embodiment, the CFXTEN fusion protein exhibits reduced binding to the antibody ESH4. In another embodiment, the CFXTEN fusion protein exhibits reduced binding to the antibody ESH8. In another embodiment, the CFXTEN fusion protein exhibits reduced binding to the antibody B02C11. In another embodiment, the CFXTEN fusion protein exhibits reduced binding and a greater degree of procoagulant activity, compared to the corresponding FVIII not linked to XTEN, in the presence of plasma from a hemophilia A subject with polyclonal antibody FVIII inhibitors, wherein the greater degree of procoagulant activity is determined by an in vitro assay such as a Bethesda assay or other assay described herein.

[0259] The CFXTEN exhibiting reduced binding by FVIII inhibitors can have one, or two, or three, or four, or five, or six or more individual XTEN, embodiments of which are disclosed herein. In the foregoing embodiments of this paragraph, a CFXTEN exhibits at least 5%, or 10%, or 15%, or 20%, or 30%, or 40%, or 50%, or 60%, or 70% or less binding to the antibody when assessed in vitro in an assay capable of assaying the binding of an antibody to FVIII, such as assays described herein below or those known in the art. Alternatively, the reduced binding of the subject CFXTEN to the FVIII-binding antibodies can be assessed by retention of a higher degree of procoagulant activity in the presence of the antibody compared to FVIII not linked to XTEN, as described in the Examples. Thus, in the embodiments pertaining to reduced binding by FVIII inhibitors described herein, a CFXTEN exhibits, when reacted with the anti-FVIII antibody, at least 5%, or 10%, or 15%, or 20%, or 30%, or 40%, or 50%, or 60%, or 70%, or 80%, or 100%, or 200%, or 300%, or 400%, or 500% or more activity in a coagulation assay (such as described herein below) compared to the corresponding FVIII not linked to XTEN and reacted with the antibody. In the foregoing, the anti-FVIII antibody can be an antibody from Table 9 or a circulating anti-FVIII antibody from a hemophilia A subject. In another embodiment, the invention provides CFXTEN in which the assayed fusion protein, when assayed utilizing the Bethesda assay and an anti-FVIII antibody selected from Table 10 or a polyclonal anti-FVIII antibody preparation such as, but not limited to, plasma from a hemophilia A subject with FVIII inhibitors, results in a Bethesda titer with at least about 2, 4, 6, 8, 10, 12, 15, 20, 30, 40, 50, 60, 70, 80, 100, or 200 fewer Bethesda units compared to a FVIII not linked to XTEN and assayed under comparable conditions. In another embodiment, the invention provides CFXTEN in which the assayed fusion protein results in less than 50%, or less than 40%, or less than 30%, or less than 25%, or less than 20%, or less than 15%, or less than 14%, or less than 13%, or less than 12%, or less than 11%, or less than 10% of the Bethesda Units compared to a FVIII not linked to XTEN when assayed under comparable conditions utilizing the Bethesda assay and a polyclonal anti-FVIII antibody preparation such as, but not limited to, plasma from a hemophilia A subject with FVIII inhibitors.

TABLE 10
Anti-factor VIII antibodies

| Antibody | | Inhibitor Titer | |
|---|---|---|---|
| Designation | Epitope | BU/mg | Reference |
| BO2C11 | C2 Domain | 20000 | U.S. Pat. No. 6,770,744 |
| | Met2199/Phe2200 | | Blood (2007) 110: 4234-4242 |
| NMC VIII-5 | C2 Domain | | U.S. Pat. No. 6,770,744 |
| | Glu2181-Val2243 | | |
| ESH2 | Light Chain | | ADI |
| ESH4 | Light Chain | 39 | U.S. Pat. No. 6,770,744 |
| | 2303-2332 | | Blood (2007) 110: 4234-4242 |
| ESH8 | C2 Domain | 10000 | U.S. Pat. No. 6,770,744 |
| | 2248-2285 | | Blood (2007) 110: 4234-4242 |
| RHD5 | C1 Domain | | WO 2005/016455 |
| (LMBP | | | US Pat. Application 20090263380 |
| 6165CB) | | | |
| LE2E9 | C1 Domain | | US Pat. Application 20090263380 |
| | | | Blood (2000) 95: 156-163 |
| I54 | C2 Domain | 1300 | Blood (2007) 110: 4234-4242 |
| F85 | C2 Domain | 6 | Blood (2007) 110: 4234-4242 |
| F100 | C2 Domain | 5 | Blood (2007) 110: 4234-4242 |
| F137 | C2 Domain | 6 | Blood (2007) 110: 4234-4242 |
| I89 | C2 Domain | 1900 | Blood (2007) 110: 4234-4242 |
| I117 | C2 Domain | 1800 | Blood (2007) 110: 4234-4242 |
| I109 | C2 Domain | 1500 | Blood (2007) 110: 4234-4242 |
| | Met2199/Phe2200 | | |
| 1B5 | C2 Domain | 930 | Blood (2007) 110: 4234-4242 |
| 3C6 | C2 Domain | 71 | Blood (2007) 110: 4234-4242 |
| 3D12 | C2 Domain | 2600 | Blood (2007) 110: 4234-4242 |
| | Phe2196 | | |
| D102 | C2 Domain | 3800 | Blood (2007) 110: 4234-4242 |
| 3G6 | C2 Domain | 25000 | Blood (2007) 110: 4234-4242 |
| 2-77 | C2 Domain | 25000 | Blood (2007) 110: 4234-4242 |
| B45 | C2 Domain | 21000 | Blood (2007) 110: 4234-4242 |
| B9 | C2 Domain | 31000 | Blood (2007) 110: 4234-4242 |
| B11 | C2 Domain | 3300 | Blood (2007) 110: 4234-4242 |
| B75 | C2 Domain | Indeterminate | Blood (2007) 110: 4234-4242 |
| D105 | C2 Domain | 0.8 | Blood (2007) 110: 4234-4242 |
| | Val2223/Lys2227 | | |
| F77 | C2 Domain | 26000 | Blood (2007) 110: 4234-4242 |
| F178 | C2 Domain | 18000 | Blood (2007) 110: 4234-4242 |
| F67 | C2 Domain | 21000 | Blood (2007) 110: 4234-4242 |
| G99 | C2 Domain | 15000 | Blood (2007) 110: 4234-4242 |
| | Val2223/Lys2227 | | |
| G86 | C2 Domain | 4300 | Blood (2007) 110: 4234-4242 |
| I14 | C2 Domain | 44000 | Blood (2007) 110: 4234-4242 |
| I55 | C2 Domain | 10000 | Blood (2007) 110: 4234-4242 |
| 2-117 | C2 Domain | >0.4 | Blood (2007) 110: 4234-4242 |
| GMA012 | A2 domain | | GMA |
| | 497-510; 584-593 | | |
| GMA8001 | A3 Domain | 156 | GMA |
| GMA8002 | A1 Domain | <1 | GMA |
| GMA8003 | C2 Domain | | GMA |
| GMA8004 | A1 Domain | | GMA |
| GMA8005 | A1A3/A1 Domain | | GMA |
| GMA8006 | C2 Domain | | GMA |
| GMA8008 | C2 Domain | 1047 | GMA |
| GMA8009 | A2 Domain | 7923 | GMA |
| GMA8010 | LC Domain | | GMA |
| GMA8011 | C1 Domain | 97 | GMA |
| GMA8012 | A1A3 Domain | 204 | GMA |
| GMA8013 | A3C2 Domain | 30 | GMA |
| GMA8014 | C2 Domain | 7799 | GMA |
| GMA8015 | A2 Domain | 17079 | GMA |
| GMA8016 | A2 Domain | <1 | GMA |
| GMA8017 | A2 Domain | 334 | GMA |
| GMA8018 | LC Domain | 242 | GMA |
| GMA8019 | CR-LC Domain | | GMA |
| GMA8020 | A1A3 Domain | 196 | GMA |
| GMA8021 | A2 Domain | 33928 | GMA |
| 4A4 | A2 Domain | 40000 | J Thromb Haemost (2009) 7: 658-664 |
| 3E6 | C2 Domain | 41 | Blood (2007) 110: 4234-4242 |

American Diagnostica Inc. internet site, URL located on the World Wide Web at americandiagnostica.com/html/Product_Detail.asp?idCategory=5&idSubCategory=104&idpro=ESH-8 as it existed on Jan. 12, 2012
Green Mountain Antibodies internet site, URL located on the World Wide Web at greenmoab.com/product_details/16316/21582.html as it existed on Jan. 12, 2012

[0260] Assays for Inhibitor and Antibody Binding

[0261] The fusion proteins of the invention may be assayed to confirm reduced binding by FVIII inhibitors using methods known in the art. The assays that can be used include, but are not limited to, competitive and non-competitive assay systems using techniques such as Western blots, radioimmunoassays, ELISA, “sandwich” immunoassays, immunoprecipitation assays, precipitin reactions, gel diffusion precipitin reactions, immunodiffusion assays, agglutination assays, immunoradiometric assays, fluorescent immunoassays, clotting assays, factor VIII inhibitor assays to name but a few. Such assays are routine and well known in the art (see, e.g., Ausubel et al, eds, 1994, Current Protocols in Molecular Biology, Vol. 1, John Wiley & Sons, Inc., New York, which is incorporated by reference herein in its entirety). Exemplary are described briefly below but are not intended by way of limitation.

[0262] The Bethesda assay and the Nijmegen modification of the Bethesda assay are factor VIII inhibitor assays well-known as methods to detect FVIII inhibitors (Kasper C K, et al. Proceedings: A more uniform measurement of factor VIII inhibitors. Thromb Diath Haemorrh. (1975) 34(2):612). However, the assays can be modified to assay binding of inhibitors to FVIII compositions using inhibitors such as polyclonal or monoclonal anti-FVIII antibodies, including the antibodies of Table 10, and methods such as described in Example 52. Briefly, the modified Bethesda assay involves mixing titered volumes of the test sample with an equal volume of an inhibitor at a set concentration. The mixtures are incubated for 2 hours at 37° C. prior to analysis of the factor concentration by a coagulation assay such as a chromogenic assay. Similarly, a reference plasma with native factor VIII level is incubated that then assayed as the positive control. The endpoint is the titer resulting in 50% of the FVIII activity of the positive control, reported as Bethesda units. In the Nijimegen modification of the Bethesda assay, the assay samples are stabilized with imidazole buffer and the control sample is mixed with deficient plasma instead of buffer (Verbruggen B, et al. The Nijmegen modification of the Bethesda assay for factor VIII:C inhibitors: improved specificity and reliability. Thromb Haemost. (1995) 73(2):247-251).

[0263] Western blot analysis generally comprises preparing protein samples, electrophoresis of the protein samples in a polyacrylamide gel (e.g., 8%-20% SDS-PAGE depending on the molecular weight of the antigen), transferring the protein sample from the polyacrylamide gel to a membrane such as nitrocellulose, PVDF or nylon, blocking the membrane in blocking solution (e.g., PBS with 3% BSA or non-fat milk), washing the membrane in washing buffer (e.g., PBS-Tween 20), blocking the membrane with primary antibody (the antibody of interest) diluted in blocking buffer, washing the membrane in washing buffer, blocking the membrane with a secondary antibody (which recognizes the primary antibody, e.g., an anti-human antibody) conjugated to an enzymatic substrate (e.g., horseradish peroxidase or alkaline phosphatase) or radioactive molecule (e.g., 32 P or 125 I) diluted in blocking buffer, washing the membrane in wash buffer, and detecting the presence of the antigen. One of skill in the art would be knowledgeable as to the parameters that can be modified to increase the signal detected and to reduce the background noise. For further discussion regarding western blot protocols see, e.g., Ausubel et al, eds, 1994, Current Protocols in Molecular Biology, Vol. 1, John Wiley & Sons, Inc., New York at 10.8.1.

[0264] ELISA assays can detect antibodies to FVIII independent of their ability to block the procoagulant activity of FVIII, and have been utilized for the detection of anti-FVIII developing in hemophilia A patients. In a population of 131 patients with hemophilia A with inhibitors, the ELISA technique resulted in 97.7% sensitivity and 78.8% specificity, and had a high negative predictive value (98.6%) [Martin, P. G., et al. Evaluation of a novel ELISA screening test for detection of factor VIII inhibitory antibodies in haemophiliacs. Clin Lab Haematol (1999) 21:125-128]. Other investigators have found a highly significant correlation between the Bethesda titer and the absorbance values in an ELISA assay for detecting anti-FVIII Abs (Towfighi, F., et al. Comparative measurement of anti-factor VIII antibody by Bethesda assay and ELISA reveals restricted isotype profile and epitope specificity. Acta Haematol (2005) 114:84-90), with the added advantage of the ability to detect non-inhibitory anti-FVIII antibodies. Assay protocols comprise preparing the binding ligand, which may include a sample comprising either factor VIII polypeptide or the CFXTEN fusion protein, coating the well of a 96 well microtiter plate with the antibody, adding the ligand test sample and incubating, then adding a detection antibody and incubating prior to washing and adding a alkaline phosphatase- or peroxidase-conjugated secondary antibody and incubating for an additional period before the addition of TMB substrate and processing for reading by spectrophotometer at 450 nm. In ELISAs the antibody or inhibitor of interest does not have to be conjugated to a detectable compound; instead, a second antibody (which recognizes the antibody or inhibitor of interest) conjugated to a detectable compound may be added to the well. Further, instead of coating the well with the antibody, the ligand may be coated to the well. One of skill in the art would be knowledgeable as to the parameters that can be modified to increase the signal detected as well as other variations of ELISAs known in the art (see, e.g., Ausubel et al, eds, 1994, Current Protocols in Molecular Biology, Vol. 1, John Wiley & Sons, Inc., New York at 11.2.1).

[0265] Standard or modified coagulation assays are used to measure reduced binding of FVIII binding agents. In one exemplary method (further described in Example 28), the optimal concentration of a given FVIII inhibitor to utilize in the assay is first determined by a titration experiment using varying amounts of the inhibitory antibody incubated at 37° C. for 2 hrs with the base vector expressing wild-type FVIII containing a His/Myc double tag. The FVIII activity is measured by the Coatest assay procedure described herein. The lowest concentration that results in optimal inhibition of FVIII activity is employed in the assay. In the assay, the FVIII inhibitor antibody at the optimal concentration is mixed with individual test samples and incubated at 37° C. for 2 hrs. The resulting test samples are then collected and utilized in the Coatest activity assay, along with untreated aliquots of the CFXTEN and positive control in order to assess the residual and baseline FVIII activity for each test sample.

[0266] The invention provides methods of making CFXTEN that exhibit reduced binding to FVIII binding agents, including FVIII inhibitors, and retention of procoagulant activity. In one embodiment, the method to make a CFXTEN with reduced binding to FVIII inhibitors comprises the steps of selecting a FVIII sequence with at least 90% sequence identity to a sequence of Table 1, selecting one, two, three, four, five, or six or more XTEN each with at least 70%, or at least 80%, or at least 90%, or at least 95-99% sequence identity to XTEN sequences of comparable length from Table 4, creating expression constructs designed to locate said XTEN at or proximal to locations selected from Table 5, Table 6, Table 7, Table 8, and Table 9, expressing and recovering the resulting CFXTEN, and assaying the resulting fusion proteins in an assay described herein in order to confirm the reduced binding of the CFXTEN fusion protein. By the inventive method, a CFXTEN exhibits at least 5% reduced, or at least 10% reduced, or at least 15% reduced, or at least 20% reduced, or at least 25% reduced, or at least 40% reduced, or at least 50% reduced, or at least 60% reduced, or at least 70% reduced, or at least 80% reduced binding to a FVIII binding agent including, but not limited to the antibodies of Table 10 or anti-FVIII antibodies from a hemophilia A subject, and retains at least about 10%, or at least about 20%, or at least about 30%, or at least about 40%, or at least about 50%, or at least about 60%, or at least about 70% procoagulant activity compared to the corresponding FVIII not linked to XTEN.

[0267] Up to 8-10% of hemophilia A patients have antibodies that bind FVIII without affecting its procoagulant properties; they are not, therefore categorized as FVIII inhibitors. However, the binding of antibodies to FVIII is believed to lead to immune complexes that are cleared by the innate immune response or are more susceptible to proteolytic degradation (Kazatchkine M D. Circulating immune complexes containing anti-VIII antibodies in multi-transfused patients with haemophilia A. Clin Exp Immunol. (1980) 39(2):315-320). Accordingly, it is an object of the invention to provide CFXTEN fusion proteins comprising one or more XTEN that exhibit reduced binding of antibodies to FVIII that are not inhibitors, wherein the degradation or clearance of the CFXTEN is reduced at least 5%, or 10%, or 15%, or 20%, or 30%, or 40%, or 50%, or 60%, or 70% or less compared to a corresponding FVIII not linked to XTEN or to native FVIII bound by such antibodies. The reduced binding of antibodies to CFXTEN compared to FVIII not linked to XTEN or to native FVIII can be assayed by in vitro and in vivo methods. In vitro methods include the aforementioned ELISA and Western blot methods. The reduced degradation or clearance of CFXTEN can be assessed in vivo by use of animal models or in human clinical trials. In one type of trial, factor VIII or CFXTEN are administered separately, preferably by intravenous infusion, to cohorts of patients having factor VIII deficiency who have antibodies that promote degradation or clearance of therapeutic human factor VIII. The dosage of the administered test article is in a range between 5 and 50 IU/kg body weight, preferably 10-45 IU/kg, and most preferably 40 IU/kg body weight. Approximately 1 hour after each administration, the recovery of factor VIII or CFXTEN from blood samples is measured in a functional one-stage or chromogenic coagulation assay to assess activity and by ELISA, HPLC, or similar assay to qualify the amount of intact factor VIII equivalent. Samples are taken again approximately 5-10 hours after infusion, and recovery is measured. Total recovery and the rate of disappearance of factor VIII from the samples is predictive of the antibody titer, and the comparison of results from the factor VIII and CFXTEN indicates the degree of reduced clearance and/or degradation of the CFXTEN. In one embodiment, the CFXTEN fusion protein exhibits at least 5% reduced, or at least 10% reduced, or at least 15% reduced, or at least 20% reduced, or at least 25% reduced, or at least 40% reduced, or at least 50% reduced, or at least 60% reduced, or at least 70% reduced, or at least 80% reduced binding to an anti-FVIII antibody that promotes clearance but does not otherwise inhibit the procoagulant activity of intact native FVIII. In another embodiment, the CFXTEN fusion protein exhibits at least 5% reduced, or at least 10% reduced, or at least 15% reduced, or at least 20% reduced, or at least 25% reduced, or at least 40% reduced, or at least 50% reduced, or at least 60% reduced, or at least 70% reduced, or at least 80% reduced binding to an anti-FVIII antibody that promotes the degradation of FVIII. In the foregoing embodiments of this paragraph, the reduced binding of the anti-FVIII antibody is alternatively characterized by an increased K_{D} value of the FVIII antibody to the fusion protein compared to the FVIII of at least two-fold, or three-fold, or four-fold, or five-fold, or 10-fold, or 33-fold, or 100-fold, or 330-fold, or at least 1000-fold compared to the binding to the corresponding FVIII not linked to XTEN. In one embodiment, the CFXTEN fusion proteins comprising one or more XTEN exhibiting reduced reactivity to an anti-FVIII antibody exhibits an increased terminal half-life when administered to a subject with anti-FVIII antibodies of at least 48 h, or at least 72 h, or at least 96 h, or at least 120 h, or at least 144 h, or at least 14 days, or at least 21 days compared to FVIII not linked to XTEN. In the foregoing embodiment, the subject can be a human hemophilia A subject or it can be a mouse hemophilia A subject with circulating anti-FVIII antibodies.

[0268] Another aspect of the present invention is the use of CFXTEN fusion protein for a specific therapy of a coagulopathy in a subject with a FVIII inhibitor. The invention provides a method of treating a subject with circulating FVIII inhibitor(s) comprising the step of administering a clotting-effective amount of a CFXTEN fusion protein to the subject wherein the fusion protein exhibits greater procoagulant activity and/or clotting-effective concentrations of longer duration compared to either a corresponding factor VIII not linked to XTEN or compared to native factor VIII administered to the subject using a comparable amount and route of administration. In one embodiment of the method, the FVIII inhibitor in the subject is an anti-FVIII antibody. In another embodiment, the FVIII inhibitor is a neutralizing anti-FVIII antibody. In one embodiment, the FVIII inhibitor is an anti-FVIII antibody that binds to the A1 domain of FVIII. In another embodiment, the FVIII inhibitor is an anti-FVIII antibody that binds to the A2 domain of FVIII. In another embodiment, the FVIII inhibitor is an anti-FVIII antibody that binds to the A3 domain of FVIII. In another embodiment, the FVIII inhibitor is an anti-FVIII antibody that binds to the C1 domain of FVIII. In another embodiment, the FVIII inhibitor is an anti-FVIII antibody that binds to the C2 domain of FVIII. In another embodiment, the FVIII inhibitor is an anti-FVIII antibody that binds to both the C2 and A2 domain of FVIII. In another embodiment, the FVIII inhibitor binds to a FVIII epitope capable of being bound by one or more antibodies of Table 10. In another embodiment, the FVIII inhibitor is a polyclonal antibody from a hemophilia A subject with FVIII inhibitor antibodies.

[0269] An object of the present invention is the creation of CFXTEN with XTEN inserted to maximize the steric interference of FVIII binding agents that would otherwise bind to FVIII and neutralize procoagulant activity or result in the clearance or degradation of FVIII. Accordingly, in one approach the invention provides CFXTEN comprising one or more XTEN wherein the XTEN are inserted proximal to a binding site of a FVIII inhibitor or anti-FVIII antibody. In one embodiment, an XTEN is linked to the FVIII at a location selected from Table 5, Table 6, Table 7, Table 8, and Table 9 that is within about 50, or about 100, or about 150, or about 200, or about 250, or about 300 amino acids of a FVIII epitope that is bound by an antibody of Table 10. In another embodiment, the XTEN is linked to the FVIII within about 50, or about 100, or about 150, or about 200, or about 250, or about 300 amino acids of a FVIII epitope in the A2 or C2 domain that is bound by an antibody of Table 10. Accordingly, the invention provides CFXTEN fusion proteins comprising one or more XTEN wherein binding by FVIII inhibitors to the FVIII component of the fusion protein is reduced compared to the corresponding FVIII not linked to XTEN or to native FVIII and the CFXTEN retains procoagulant activity. In the foregoing embodiments hereinabove described in this paragraph, the fusion proteins can be assayed by the assays described herein below, the assays of the Examples, or other assays known in the art, and the inhibitors can be an antibody of Table 10, can be polyclonal anti-FVIII, or can be blood or plasma from a hemophilia A subject with FVIII inhibitors.

[0270] In another aspect, CFXTEN are designed to maximize the regions over which XTEN can adopt random coil conformations covering the fusion protein, thereby resulting in steric hindrance for anti-FVIII antibodies that would otherwise bind epitopes on the FVIII component of the fusion protein. It is believed that the incorporation of multiple XTEN into a CFXTEN provides a higher total hydrodynamic radius of the XTEN component compared to CFXTEN with fewer XTEN yet having approximately the same total of XTEN amino acids. Empirically, the hydrodynamic radius for a protein can be calculated based on size exclusion chromatography, and results of several fusion proteins using such methods are described in the Examples. Alternatively, the radius for XTEN polypeptides, such as those incorporated in the embodiments disclosed herein, can be approximated by mathematical formulae because the limited types of amino acids utilized have known characteristics that can be quantified. In one embodiment, the maximum radius of a single XTEN polypeptide is calculated (hereinafter “XTEN Radius”) according to the formula given by Equation II:

XTEN Radius=(√XTEN length 0.2037)+3.4627 II

[0271] In another embodiment, the sum of the maximum of the XTEN Radii for all XTEN segments in a CFXTEN is calculated (hereinafter “Sum XTEN Radii”) according to the formula given by Equation III:

$$Sum XTEN Radii = {\sum }_{i = 1}^{n} XTEN {Radius}_{i} \qquad III$$

[0272] wherein: n=the number of XTEN segments
[0273] and i is an iterator

[0274] In another embodiment, the ratio of the SUM XTEN Radii of a CFXTEN comprising multiple XTEN to that of an XTEN Radius for a single XTEN of an equivalent length (in total amino acid residues to that of the CFXTEN) is calculated (hereinafter “Ratio XTEN Radii”) according to the formula given by Equation IV:

$$Ratio XTEN Radii = \frac{{\sum }_{i = 1}^{n} XTEN {Radius}_{i}}{( \sqrt{{\sum }_{i = 1}^{n} XTEN {Length}_{i}} * 0.2037 ) + 3.4627} \qquad IV$$

[0275] wherein: n=the number of XTEN segments
[0276] and i is an iterator

[0277] In applying the Equations to the XTEN, it will be understood by one of skill in the art that the calculated values represent maximum values that could vary or be reduced depending on the host cell utilized for expression of the XTEN polypeptide. It is believed that while E. coli expression would result in XTEN that achieves the calculated values, expression in eukaryotic host cells in which XTEN may be glycosylated could result in a radius of the polypeptide less than the maximum calculated value. Such differences can be quantified by methods such as size exclusion chromatography, the methods of which are detailed in the Examples.

[0278] In order to design CFTEN that maximize the area over which XTEN can adopt random coil conformations, it was discovered that CFXTEN designs with Ratio XTEN Radii above 2 provide greater coverage over the fusion protein than designs with values <2. Accordingly, in one embodiment the invention provides CFXTEN in which the Ratio XTEN Radii is at least 2.0, or 2.1, or 2.2, or 2.3, or 2.4, or 2.5, or 2.6, or 2.7, or 2.8, or 2.9, or 3.0, or 3.1, or 3.2, or 3.3, or 3.4, or 3.5 or greater. In some embodiments, the invention provides CFXTEN in which the Ratio XTEN Radii is at least 2.0-3.5 or greater comprise at least three XTEN with each XTEN having at least 42 to about 288 amino acids and wherein at least two of the XTEN are linked to the fusion protein with no less than about 100, or about 200, or about 300, or about 400, or about 500 amino acids of separation between the two XTEN. In other embodiments, the invention provides CFXTEN in which the Ratio XTEN Radii is at least 2.0-3.5 or greater comprise at least four XTEN with each XTEN having at least 42 to about 288 amino acids and wherein at least three of the XTEN are linked to the fusion protein with no less than about 100, or about 200, or about 300, or about 400 amino acids of separation between any two of the three XTEN.

[0279] In another embodiment, the invention provides a CFXTEN in which the Ratio XTEN Radii is at least 2.0-3.5 or greater, the CFXTEN comprises at least three XTEN with each XTEN having at least 42 to about 288 amino acids and wherein at least two of the three of the XTEN linked to the fusion protein are separated by an amino acid sequence of at least 100, or about 200, or about 300 to about 400 amino acids, and the third XTEN is linked within the B domain (or fragment thereof) or within the C domain (or the terminus thereof). In another embodiment, the invention provides a CFXTEN in which the Ratio XTEN Radii is at least 2.0-3.5 or greater, the CFXTEN comprises at least four XTEN with each XTEN having at least 42 to about 288 amino acids and wherein at least three of the four of the XTEN linked to the fusion protein are separated by an amino acid sequence of at least 300 to about 400 amino acids and the fourth XTEN is linked within the B domain (or fragment thereof) or within the C domain (or the terminus thereof).

[0280] In yet other embodiments, the invention provides CFXTEN in which the Ratio XTEN Radii is at least 2.0-3.5 or greater, the CFXTEN comprises at least five XTEN with four XTEN having at least 42 to about 144 amino acids wherein at least four of the XTEN are linked to the fusion protein with no less than about 100, 200, or about 300, or about 400 amino acids of separation between any two of the four XTEN and a fifth XTEN is linked within the B domain (or fragment thereof) or within the C domain (or the terminus thereof). In one embodiment, the invention provides a CFXTEN in which the Ratio XTEN Radii is at least 2.0-3.5 or greater, the CFXTEN comprises at least five XTEN with four XTEN having at least 42 to about 144 amino acids wherein at least three of the XTEN linked to the fusion protein are separated by an amino acid sequence of at least 300 to about 400 amino acids, the fourth XTEN is linked within the B domain (or fragment thereof) and a fifth XTEN is linked within the C domain (or the terminus thereof).

[0281] In one aspect, the invention provides CFXTEN in which the Ratio XTEN Radii is at least 2.0, or 2.1, or 2.2, or 2.3, or 2.4, or 2.5, or 2.6, or 2.7, or 2.8, or 2.9, or 3.0, or 3.1, or 3.2, or 3.3, or 3.4, or 3.5 or greater, and the composition does not comprise certain sequences. In one embodiment of the foregoing, the invention provides CFXTEN in which the Ratio XTEN Radii is at least 2.0-3.5 or greater with the proviso that the fusion protein does not comprise a sequence from any one of Table 50 or Table 51. In another embodiment of the foregoing, the invention provides CFXTEN in which the Ratio XTEN Radii is at least 2.0-3.5 or greater with the proviso that the fusion protein does not comprise a sequence having an AG family XTEN sequence. In another embodiment of the foregoing, the invention provides CFXTEN in which the Ratio XTEN Radii is at least 2.0-3.5 or greater with the proviso that the fusion protein does not comprise a sequence selected from GTPGSGTASSSP (SEQ ID NO: 31), GSSTPSGATGSP (SEQ ID NO: 32), GSSPSASTGTGP (SEQ ID NO: 33), GASPGTSSTGSP (SEQ ID NO: 34). In another embodiment of the foregoing, the invention provides CFXTEN in which the Ratio XTEN Radii is at least 2.0-3.5 or greater with the proviso that the fusion protein does not comprise any one of the sequences selected from GTPGSGTASSSP (SEQ ID NO: 31), GSSTPSGATGSP (SEQ ID NO: 32), GSSPSASTGTGP (SEQ ID NO: 33), GASPGTSSTGSP (SEQ ID NO: 34) and GSEPATSGSETPGTSESATPESGPGSEPATSGSETPGSPAGSPTSTEEGTSTEPSEGSAPGSEPATSG SETPGSEPATSGSETPGSEPATSGSETPGTSTEPSEGSAPGTSESATPESGPGSEPATSGSETPGTST EPSEGSAP (SEQ ID NO: 59). In another embodiment of the foregoing, the invention provides CFXTEN in which the Ratio XTEN Radii is at least 2.0-3.5 or greater with the proviso that the fusion protein does not comprise a sequence selected from GSEPATSGSETPGTSESATPESGPGSEPATSGSETPGSPAGSPTSTEEGTSTEPSEGSAPGSEPATSG SETPGSEPATSGSETPGSEPATSGSETPGTSTEPSEGSAPGTSESATPESGPGSEPATSGSETPGTST EPSEGSAP (SEQ ID NO: 59), PGSSPSASTGTGPGSSPSASTGTGPGTPGSGTASSSPGSSTPSGATGSPGSSPSASTGTGPGASPGTS STGSPGTPGSGTASSSPGSSTPSGATGSPGTPGSGTASSSPGASPGTSSTGSPGASPGTSSTGSPGTP GSGTASSS (SEQ ID NO: 71), or PGASPGTSSTGSPGASPGTSSTGSPGTPGSGTASSSPGSSTPSGATGSPGTPGSGTASSSPGSSTPSG ATGSPGTPGSGTASSSPGSSTPSGATGSPGSSTPSGATGSPGSSPSASTGTGPGSSPSASTGTGPGA SPGTSSTGSPGTPGSGTASSSPGSSTPSGATGSPGSSPSASTGTGPGSSPSASTGTGPGASPGTSSTG SPGASPGTSSTGSPGSSTPSGATGSPGSSPSASTGTGPGASPGTSSTGSPGSSPSASTGTGPGTPGSG TASSSPGSSTPSGATGS (SEQ ID NO: 80). In another embodiment of the foregoing, the invention provides CFXTEN in which the Ratio XTEN Radii is at least 2.0-3.5 or greater with the proviso that the fusion protein does not comprise an XTEN sequence consisting of

(SEQ ID NO: 59)
GSEPATSGSETPGTSESATPESGPGSEPATSGSETPGSPAGSPTSTEEGTS
TEPSEGSAPGSEPATSGSETPGSEPATSGSETPGSEPATSGSETPGTSTEP
SEGSAPGTSESATPESGPGSEPATSGSETPGTSTEPSEGSAP,
(SEQ ID NO: 71)
PGSSPSASTGTGPGSSPSASTGTGPGTPGSGTASSSPGSSTPSGATGSPGS
SPSASTGTGPGASPGTSSTGSPGTPGSGTASSSPGSSTPSGATGSPGTPGS
GTASSSPGASPGTSSTGSPGASPGTSSTGSPGTPGSGTASSS,
or
(SEQ ID NO: 80)
PGASPGTSSTGSPGASPGTSSTGSPGTPGSGTASSSPGSSTPSGATGSPGT
PGSGTASSSPGSSTPSGATGSPGTPGSGTASSSPGSSTPSGATGSPGSSTP
SGATGSPGSSPSASTGTGPGSSPSASTGTGPGASPGTSSTGSPGTPGSGTA
SSSPGSSTPSGATGSPGSSPSASTGTGPGSSPSASTGTGPGASPGTSSTGS
PGASPGTSSTGSPGSSTPSGATGSPGSSPSASTGTGPGASPGTSSTGSPGS
SPSASTGTGPGTPGSGTASSSPGSSTPSGATGS.

[0282] In one aspect, the present invention provides methods to create CFXTEN with XTEN inserted to maximize the steric interference of FVIII binding agents that would otherwise bind to FVIII and neutralize procoagulant activity or result in the clearance or degradation of FVIII. Accordingly, in one embodiment, the invention provides a method comprising the steps of selecting a FVIII sequence with at least 90% sequence identity to a sequence of Table 1, selecting three or more XTEN from Table 4 in which the Ratio XTEN Radii is at least 2.0, or 2.1, or 2.2, or 2.3, or 2.4, or 2.5, or 2.6, or 2.7, or 2.8, or 2.9, or 3.0, or 3.1, or 3.2, or 3.3, or 3.4, or 3.5 or greater, creating expression constructs designed to locate said XTEN at or proximal to locations selected from Table 5, Table 6, Table 7, Table 8, and Table 9, wherein the three or more XTEN are at least 300 to 400 amino acids, expressing and recovering the resulting CFXTEN, and assaying the resulting fusion proteins in an assay described herein in order to confirm the reduced binding of the CFXTEN fusion protein. By the inventive method, a CFXTEN exhibits at least 5% reduced, or at least 10% reduced, or at least 15% reduced, or at least 20% reduced, or at least 25% reduced, or at least 40% reduced, or at least 50% reduced, or at least 60% reduced, or at least 70% reduced, or at least 80% reduced binding to a FVIII binding agent including, but not limited to the antibodies of Table 10, and exhibits procoagulant activity.

[0283] 5. CFXTEN Fusion Protein Configurations with Spacer and Cleavage Sequences

[0284] In another aspect, the invention provides CFXTEN configured with one or more spacer sequences incorporated into or adjacent to the XTEN that are designed to incorporate or enhance a functionality or property to the composition, or as an aid in the assembly or manufacture of the fusion protein compositions. Such properties include, but are not limited to, inclusion of cleavage sequence(s) to permit release of components, inclusion of amino acids compatible with nucleotide restrictions sites to permit linkage of XTEN-encoding nucleotides to FVIII-encoding nucleotides or that facilitate construction of expression vectors, and linkers designed to reduce steric hindrance in regions of CFXTEN fusion proteins.

[0285] In an embodiment, a spacer sequence can be introduced between an XTEN sequence and a FVIII component to decrease steric hindrance such that the FVIII component may assume its desired tertiary structure and/or interact appropriately with its target substrate or processing enzyme. For spacers and methods of identifying desirable spacers, see, for example, George, et al. (2003) Protein Engineering 15:871-879, specifically incorporated by reference herein. In one embodiment, the spacer comprises one or more peptide sequences that are between 1-50 amino acid residues in length, or about 1-25 residues, or about 1-10 residues in length. Spacer sequences, exclusive of cleavage sites, can comprise any of the 20 natural L amino acids, and will preferably have XTEN-like properties in that the majority of residues will be hydrophilic amino acids that are sterically unhindered such as, but not limited to, glycine (G), alanine (A), serine (S), threonine (T), glutamate (E), proline (P) and aspartate (D). The spacer can be a single glycine residue, polyglycines or polyalanines, or is predominately a mixture of combinations of glycine, serine and alanine residues. In one embodiment, a spacer sequence, exclusive of cleavage site amino acids, has about 1 to 10 amino acids that consist of amino acids selected from glycine (G), alanine (A), serine (S), threonine (T), glutamate (E), and proline (P) and are substantially devoid of secondary structure; e.g., less than about 10%, or less than about 5% as determined by the Chou-Fasman and/or GOR algorithms. In one embodiment, the spacer sequence is GPEGPS (SEQ ID NO: 1612). In another embodiment, the spacer sequence is GPEGPS (SEQ ID NO: 1612) linked to a cleavage sequence of Table 12. In addition, spacer sequences are designed to avoid the introduction of T-cell epitopes which can, in part, be achieved by avoiding or limiting the number of hydrophobic amino acids utilized in the spacer; the determination of epitopes is described above and in the Examples.

[0286] In a particular embodiment, the CFXTEN fusion protein comprises one or more spacer sequences linked at the junction(s) between the payload FVIII sequence and the one or more XTEN incorporated into the fusion protein, wherein the spacer sequences comprise amino acids that are compatible with nucleotides encoding restriction sites. In another embodiment, the CFXTEN fusion protein comprises one or more spacer sequences linked at the junction(s) between the payload FVIII sequence and the one more XTEN incorporated into the fusion protein wherein the spacer sequences comprise amino acids that are compatible with nucleotides encoding restriction sites and the amino acids and the one more spacer sequence amino acids are chosen from glycine (G), alanine (A), serine (S), threonine (T), glutamate (E), and proline (P). In another embodiment, the CFXTEN fusion protein comprises one or more spacer sequences linked at the junction(s) between the payload FVIII sequence and one more XTEN incorporated into the fusion protein wherein the spacer sequences comprise amino acids that are compatible with nucleotides encoding restriction sites and the one more spacer sequences are chosen from the sequences of Table 11. The exact sequence of each spacer sequence is chosen to be compatible with cloning sites in expression vectors that are used for a particular CFXTEN construct. In one embodiment, the spacer sequence has properties compatible with XTEN. In one embodiment, the spacer sequence is GAGSPGAETA (SEQ ID NO: 178). For XTEN sequences that are incorporated internal to the FVIII sequence, each XTEN would generally be flanked by two spacer sequences comprising amino acids compatible with restriction sites, while XTEN attached to the N- or C-terminus would only require a single spacer sequence at the junction of the two components and another at the opposite end for incorporation into the vector. As would be apparent to one of ordinary skill in the art, the spacer sequences comprising amino acids compatible with restriction sites that are internal to FVIII could be omitted from the construct when an entire CFXTEN gene is synthetically generated.

TABLE 11
Spacer Sequences Compatible with Restriction Sites

| Spacer Sequence | Restriction Enzyme |
|---|---|
| GSPG (SEQ ID NO: 174) | BsaI |
| ETET (SEQ ID NO: 175) | BsaI |
| PGSSS (SEQ ID NO: 176) | BbsI |
| GAP | AscI |
| GPA | FseI |
| GPSGP (SEQ ID NO: 177) | SfiI |
| AAA | SacII |
| TG | AgeI |
| GT | KpnI |
| GAGSPGAETA (SEQ ID | SfiI |
| NO: 178) | |
| ASS | XhoI |

[0287] In another aspect, the present invention provides CFXTEN configurations with cleavage sequences incorporated into the spacer sequences. In some embodiments, spacer sequences in a CFXTEN fusion protein composition comprise one or more cleavage sequences, which are identical or different, wherein the cleavage sequence may be acted on by a protease, as shown in FIG. 12, to release FVIII, a FVIII component (e.g., the B domain) or XTEN sequence(s) from the fusion protein. In one embodiment, the incorporation of the cleavage sequence into the CFXTEN is designed to permit release of the FVIII component that becomes active or more active (with respect to its ability serve as a membrane binding site for factors IXa and X) upon its release from the XTEN. In the foregoing embodiment, the procoagulant activity of FVIII component of the CFXTEN is increased after cleavage by at least 30%, or at least 40%, or at least 50%, or at least 60%, or at least 70%, or at least 80%, or at least 90% compared to the intact CFXTEN. The cleavage sequences are located sufficiently close to the FVIII sequences, generally within 18, or within 12, or within 6, or within 2 amino acids of the FVIII sequence, such that any remaining residues attached to the FVIII after cleavage do not appreciably interfere with the activity (e.g., such as binding to a clotting protein) of the FVIII, yet provide sufficient access to the protease to be able to effect cleavage of the cleavage sequence. In some cases, the CFXTEN comprising the cleavage sequences will also have one or more spacer sequence amino acids between the FVIII and the cleavage sequence or the XTEN and the cleavage sequence to facilitate access of the protease; the spacer amino acids comprising any natural amino acid, including glycine, serine and alanine as preferred amino acids. In one embodiment, the cleavage site is a sequence that can be cleaved by a protease endogenous to the mammalian subject such that the CFXTEN can be cleaved after administration to a subject. In such case, the CFXTEN can serve as a prodrug or a circulating depot for the FVIII. In a particular construct of the foregoing, the CFXTEN would have one or two XTEN linked to the N- and/or the C-terminus of a FVIII-BDD via a cleavage sequence that can be acted upon by an activated coagulation factor, and would have an additional XTEN located between the processing amino acids at position R740 and R1689 such that the XTEN could be released, leaving a form of FVIII similar to native activated FVIII. In one embodiment of the foregoing construct, the FVIII that is released from the fusion protein by cleavage of the cleavage sequence exhibits at least about a two-fold, or at least about a three-fold, or at least about a four-fold, or at least about a five-fold, or at least about a six-fold, or at least about a eight-fold, or at least about a ten-fold, or at least about a 20-fold increase in activity compared to the intact CFXTEN fusion protein.

[0288] Examples of cleavage sites contemplated by the invention include, but are not limited to, a polypeptide sequence cleavable by a mammalian endogenous protease selected from FXIa, FXIIa, kallikrein, FVIIIa, FVIIIa, FXa, FIIa (thrombin), Elastase-2, granzyme B, MMP-12, MMP-13, MMP-17 or MMP-20, or by non-mammalian proteases such as TEV, enterokinase, PreScission™ protease (rhinovirus 3C protease), and sortase A. Sequences known to be cleaved by the foregoing proteases and others are known in the art. Exemplary cleavage sequences contemplated by the invention and the respective cut sites within the sequences are presented in Table 12, as well as sequence variants thereof. For CFXTEN comprising incorporated cleavage sequence(s), it is generally preferred that the one or more cleavage sequences are substrates for activated clotting proteins. For example, thrombin (activated clotting factor II) acts on the sequence LTPRSLLV (SEQ ID NO: 1618) [Rawlings N. D., et al. (2008) Nucleic Acids Res., 36: D320], which is cut after the arginine at position 4 in the sequence. Active FIIa is produced by cleavage of FIT by FXa in the presence of phospholipids and calcium and is down stream from factor VIII in the coagulation pathway. Once activated, its natural role in coagulation is to cleave fibrinogen, which then in turn, begins clot formation. FIIa activity is tightly controlled and only occurs when coagulation is necessary for proper hemostasis. By incorporation of the LTPRSLLV sequence (SEQ ID NO: 1618) into the CFXTEN between and linking the FVIII and the XTEN components, the XTEN is removed from the adjoining FVIII concurrent with activation of either the extrinsic or intrinsic coagulation pathways when coagulation is required physiologically, thereby selectively releasing FVIII. In another embodiment, the invention provides CFXTEN with incorporated FXIa cleavage sequences between the FVIII and XTEN component(s) that are acted upon only by initiation of the intrinsic coagulation system, wherein a procoagulant form of FVIII is released from XTEN by FXIa to participate in the coagulation cascade. While not intending to be bound by any particular theory, it is believed that the CFXTEN of the foregoing embodiment would sequester the FVIII away from the other coagulation factors except at the site of active clotting, thus allowing for larger doses (and therefore longer dosing intervals) with minimal safety concerns.

[0289] Thus, cleavage sequences, particularly those susceptible to the procoagulant activated clotting proteins listed in Table 12, would provide for sustained release of FVIII that, in certain embodiments of the CFXTEN, can provide a higher degree of activity for the FVIII component released from the intact form of the CFXTEN, as well as additional safety margin for high doses of CFXTEN administered to a subject. In one embodiment, the invention provides CFXTEN comprising one or more cleavage sequences operably positioned to release the FVIII from the fusion protein upon cleavage, wherein the one or more cleavage sequences has at least about 86%, or at least about 92%, or 100% sequence identity to a sequence selected from Table 12.

[0290] In some embodiments, only the two or three amino acids flanking both sides of the cut site (four to six amino acids total) are incorporated into the cleavage sequence that, in turn, is incorporated into the CFXTEN of the embodiments, providing, e.g., XTEN release sites. In other embodiments, the incorporated cleavage sequence of Table 12 can have one or more deletions or insertions or one or two or three amino acid substitutions for any one or two or three amino acids in the known sequence, wherein the deletions, insertions or substitutions result in reduced or enhanced susceptibility but not an absence of susceptibility to the protease, resulting in an ability to tailor the rate of release of the FVIII from the XTEN. Exemplary substitutions within cleavage sequences that are utilized in the CFXTEN of the invention are shown in Table 12.

TABLE 12
Protease Cleavage Sequences

| Protease | Exemplary | | | |
|---|---|---|---|---|
| Acting | Cleavage | SEQ ID | | SEQ ID |
| Upon Sequence | Sequence | NO: | Minimal Cut Site | NO: |
| FXIa | KLTR↓AET | 179 | KD/FL/T/R↓VA/VE/GT/GV | |
| FXIa | DFTR↓VVG | 180 | KD/FL/T/R↓VA/VE/GT/GV | |
| FXIIa | TMTR↓IVGG | 181 | NA | |
| Kallikrein | SPFR↓STGG | 182 | -/-/FL/RY↓SR/RT/-/- | |
| FVIIa | LQVR↓IVGG | 183 | NA | |
| FIXa | PLGR↓IVGG | 184 | -/-/G/R↓-/-/-/- | |
| FXa | IEGR↓TVGG | 185 | IA/E/GFP/R↓STI/VFS/-/G | |
| FIIa (thrombin) | LTPR↓SLLV | 186 | -/-/PLA/R↓SAG/-/-/- | |
| Elastase-2 | LGPV↓SGVP | 187 | -/-/-/VIAT↓-/-/-/- | |
| Granzyme-B | VAGD↓SLEE | 188 | V/-/-/D↓-/-/-/- | |
| MMP-12 | GPAG↓LGGA | 189 | G/PA/-/G↓L/-/G/- | 190 |
| MMP-13 | GPAG↓LRGA | 191 | G/P/-/G↓L/-/GA/- | 192 |
| MMP-17 | APLG↓LRLR | 193 | -/PS/-/-↓LQ/-/LT/- | |
| MMP-20 | PALP↓LVAQ | 194 | NA | |
| TEV | ENLYFQ↓G | 195 | ENLYFQ↓G/S | 196 |
| Enterokinase | DDDK↓IVGG | 197 | DDDK↓IVGG | 198 |
| Protease 3C | LEVLFQ↓GP | 199 | LEVLFQ↓GP | 200 |
| (PreScission ™) | | | | |
| Sortase A | LPKT↓GSES | 201 | L/P/KEAD/T↓G/-/EKS/S | 202 |

↓indicates cleavage site
NA: not applicable
the listing of multiple amino acids before, between, or after a slash indicate alternative amino acids that can be substituted at the position;
“-” indicates that any amino acid may be substituted for the corresponding amino acid indicated in the middle column

[0291] 6. Exemplary CFXTEN Fusion Protein Sequences

[0292] Non-limiting examples of sequences of fusion proteins containing a single FVIII linked to one or more XTEN are presented in Table 21. The exemplary amino acid sequences of Table 21 (and the DNA sequences that encode them) contain his tags for purification purposes that, as would be apparent to one of skill in the art, can be deleted from the sequence without having an effect on the procoagulant activity of the CFXTEN fusion protein. In one embodiment, the CFXTEN of Table 21 further comprise amino acids on the N-terminus corresponding to that of native human FVIII (namely, the sequence MQIELSTCFFLCLLRFCFS (SEQ ID NO: 1611)) to aid in the expression and secretion of the CFXTEN fusion protein. In one embodiment, a CFXTEN composition comprises a fusion protein having at least about 80% sequence identity compared to a CFXTEN from Table 21, alternatively at least about 81%, 82%, 83%, 84%, 85%, 86%, 87%, 88%, 89%, 90%, 91%, 92%, 93%, 94%, 95%, 96%, 97%, 98%, 99%, or about 100% sequence identity as compared to a CFXTEN from Table 21, when optimally aligned. In another embodiment, a CFXTEN composition comprises a fusion protein from Table 21 in which the C-terminal his-his-his-his-his-his sequence (SEQ ID NO: 1700) deleted. However, the invention also contemplates substitution of any of the FVIII sequences of Table 1 for a FVIII component of the CFXTEN of Table 21, and/or substitution of any sequence of any one of Tables 3, 4, and 13-17 for an XTEN component of the CFXTEN of Table 21. Generally, the resulting CFXTEN of the foregoing examples retain at least a portion of the procoagulant activity of the corresponding FVIII not linked to the XTEN. In the foregoing fusion proteins hereinabove described in this paragraph, the CFXTEN fusion protein can further comprise one or more cleavage sequences; e.g., a sequence from Table 12, the cleavage sequence being located between the FVIII and the XTEN sequences or between adjacent FVIII domains linked by XTEN. In some embodiments comprising cleavage sequence(s), the intact CFXTEN composition has less activity but a longer half-life in its intact form compared to a corresponding FVIII not linked to the XTEN, but is designed such that upon administration to a subject, the FVIII component is gradually released from the fusion protein by cleavage at the cleavage sequence(s) by endogenous proteases, whereupon the FVIII component exhibits procoagulant activity.

[0293] The CFXTEN compositions of the embodiments can be evaluated for activity using assays or in vivo parameters as described herein (e.g., in vitro coagulation assays, assays of Table 49, or a pharmacodynamic effect in a preclinical hemophilia model or in clinical trials in humans, using methods as described in the Examples or other methods known in the art for assessing FVIII activity) to determine the suitability of the configuration or the FVIII sequence variant, and those CFXTEN compositions (including after cleavage of any incorporated XTEN-releasing cleavage sites) that retain at least about 30%, or about 40%, or about 50%, or about 55%, or about 60%, or about 70%, or about 80%, or about 90%, or about 95% or more activity compared to native FVIII sequence are considered suitable for use in the treatment of FVIII-related conditions.

### V). Properties of the CFXTEN Compositions of the Invention

[0294] (a) Pharmacokinetic Properties of CFXTEN

[0295] It is an object of the present invention to provide CFXTEN fusion proteins and pharmaceutical compositions comprising CFXTEN with enhanced pharmacokinetics compared to FVIII not linked to XTEN. The pharmacokinetic properties of a FVIII enhanced by linking a given XTEN to the FVIII include, but are not limited to, terminal half-life, area under the curve (AUC), Cₘₐₓ, volume of distribution, maintaining the biologically active CFXTEN above a minimum effective blood unit concentration for a longer period of time compared to the FVIII not linked to XTEN. The enhanced properties permit less frequent dosing and/or a longer-lived procoagulant effect compared to a comparable dose of FVIII not linked to XTEN. Enhancement of one or more of these properties can resulting benefits in the treatment of factor VIII-related conditions.

[0296] Exogenously administered factor VIII has been reported to have a terminal half-life in humans of approximately 12-14 hours when complexed with normal von Willebrand factor protein, whereas in the absence of von Willebrand factor, the half-life of factor VIII is reduced to 2 hours (Tuddenham E G, et al., Br J Haematol. (1982) 52(2):259-267; Bjorkman, S., et al. Clin Pharmacokinet. (2001) 40:815). As a result of the enhanced properties conferred by XTEN, the CFXTEN, when used at the dose and dose regimen determined to be appropriate for the subject and its underlying condition, can achieve a circulating concentration resulting in a desired procoagulant or clinical effect for an extended period of time compared to a comparable dose of the corresponding FVIII not linked to XTEN. As used herein, a “comparable dose” means a dose with an equivalent moles/kg or International Units/kg (IU/kg) for the composition that is administered to a subject. It will be understood in the art that a “comparable dose” of FVIII not linked to XTEN would represent a lesser weight of drug but would have essentially the same IUs or mole-equivalents of CFXTEN in the dose.

[0297] An international unit (“IU”) of factor VIII is defined in the art as the coagulant activity present in 1 ml of normal human plasma. A normal, non-hemophilic individual human is expected to have about 100 IU/dL factor VIII activity. In hemophilia A, the doses required to treat are dependent on the condition. For minor bleeding, doses of native or recombinant factor VIII of 20 to 40 IU/kg are typically administered, as necessary. For moderate bleeding, doses of 30 to 60 IU/kg are administered as necessary, and for major bleeding, doses of 80 to 100 IU/kg may be required, with repeat doses of 20 to 25 IU/kg given every 8 to 12 hours until the bleeding is resolved. For prophylaxis against bleeding in patients with severe hemophilia A, the usual doses of native or recombinant FVIII preparations are 20 to 40 IU/kg body weight at intervals of about 2 to 3 days. A standard equation for estimating an appropriate dose of a composition comprising FVIII is:

Required units=body weight (kg)×desired factor VIII rise (IU/dL or % of normal)×0.5 (IU/kg per IU/dL).

[0298] In many cases, the therapeutic levels for FVIII in subjects of different ages or degree of disease have been established and are available in published literature or are stated on the drug label for approved products containing the FVIII. For example, the Subcommittee on Factor VIII and Factor IX of the Scientific and Standardization Committee of the International Society on Thrombosis and Haemostasis posted, on the ISTH Website 29 Nov. 2000, that the most widely used measure of hemophilia A is established by determining the circulating concentrations of plasma FVIII procoagulant levels, with persons with <1% (<0.01 IU/ml) factor VIII defined as severe; 1-5% (0.01-0.05 IU/ml) as moderately severe; and >5-40% (0.05-<0.40 IU/ml) as mild, where normal is 1 IU/ml of factor VIIIC (100%). The therapeutic levels can be established for new compositions, including those CFXTEN and pharmaceutical compositions comprising CFXTEN of the disclosure, using standard methods. In practicing the present invention, it will be understood that any dosage of CFXTEN that is effective may be used for treating bleeding episodes or maintaining hemostasis. The methods for establishing the therapeutic levels and dosing schedules for a given composition are known to those of skill in the art (see, e.g., Goodman & Gilman's The Pharmacological Basis of Therapeutics, 11^{th} Edition, McGraw-Hill (2005)). For example, by using dose-escalation studies in subjects with the target condition to determine efficacy or a desirable pharmacologic effect, appearance of adverse events, and determination of circulating blood levels, the therapeutic blood levels for a given subject or population of subjects can be determined for a given drug or biologic. The dose escalation studies would evaluate the activity of a CFXTEN through studies in a subject or group of hemophilia A subjects. The studies would monitor blood levels of procoagulant, as well as physiological or clinical parameters as known in the art or as described herein for one or more parameters associated with the factor VIII-related condition, or clinical parameters associated with a beneficial outcome, together with observations and/or measured parameters to determine the no effect dose, adverse events, minimum effective dose and the like, together with measurement of pharmacokinetic parameters that establish the determined or derived circulating blood levels. The results can then be correlated with the dose administered and the blood concentrations of the therapeutic that are coincident with the foregoing determined parameters or effect levels. By these methods, a range of doses and blood concentrations can be correlated to the minimum effective dose as well as the maximum dose and blood concentration at which a desired effect occurs or is maintained and the period for which it can be maintained, thereby establishing the therapeutic blood levels and dosing schedule for the composition. Thus, by the foregoing methods, a Cₘᵢₙ blood level is established, below which the CFXTEN fusion protein would not have the desired pharmacologic effect and a Cₘₐₓ blood level, above which side effects such as thrombosis may occur (Brobrow, R S, JABFP (2005) 18(2):147-149), establishing the therapeutic window for the composition.

[0299] One of skill in the art can, by the means disclosed herein or by other methods known in the art, confirm that the administered CFXTEN remains at therapeutic blood levels to maintain hemostasis for the desired interval or requires adjustment in dose or length or sequence of XTEN. Further, the determination of the appropriate dose and dose frequency to keep the CFXTEN within the therapeutic window establishes the therapeutically effective dose regimen; the schedule for administration of multiple consecutive doses using a therapeutically effective dose of the fusion protein to a subject in need thereof resulting in consecutive Cₘₐₓ peaks and/or Cₘᵢₙ troughs that remain above therapeutically-effective concentrations and result in an improvement in at least one measured parameter relevant for the target condition. In one embodiment, the CFXTEN or a pharmaceutical compositions comprising CFXTEN administered at an appropriate dose to a subject results in blood concentrations of the CFXTEN fusion protein that remains above the minimum effective concentration to maintain hemostasis for a period at least about two-fold longer compared to the corresponding FVIII not linked to XTEN and administered at a comparable dose; alternatively at least about three-fold longer; alternatively at least about four-fold longer; alternatively at least about five-fold longer; alternatively at least about six-fold longer; alternatively at least about seven-fold longer; alternatively at least about eight-fold longer; alternatively at least about nine-fold longer, alternatively at least about ten-fold longer, or at least about twenty-fold longer or greater compared to the corresponding FVIII not linked to XTEN and administered at a comparable dose. As used herein, an “appropriate dose” means a dose of a drug or biologic that, when administered to a subject, would result in a desirable therapeutic or pharmacologic effect (e.g., hemostasis) and/or a blood concentration within the therapeutic window.

[0300] In practicing the invention, CFXTEN with longer terminal half-life are generally preferred, so as to improve patient convenience, to increase the interval between doses and to reduce the amount of drug required to achieve a sustained effect. The enhanced PK parameters allow for reduced dosing of the subject compositions, compared to FVIII not linked to XTEN, particularly for those hemophilia A subjects receiving routine prophylaxis.

[0301] As described more fully in the Examples pertaining to pharmacokinetic characteristics of fusion proteins comprising XTEN, it was observed that increasing the total length of the XTEN, singly or in combination, confers a disproportionate increase in the terminal half-life of a fusion protein comprising the XTEN. Accordingly, the invention provides CFXTEN fusion proteins and pharmaceutical compositions comprising CFXTEN wherein the CFXTEN exhibits an enhanced half-life when administered to a subject. In some embodiments, the invention provides monomeric CFXTEN fusion proteins comprising one or more XTEN wherein the number and location of the XTEN are selected to confer an increase in the terminal half-life for the CFXTEN administered to a subject compared to the corresponding FVIII not linked to the XTEN and administered at a comparable dose, wherein the increase is at least about two-fold longer, or at least about three-fold, or at least about four-fold, or at least about five-fold, or at least about six-fold, or at least about seven-fold, or at least about eight-fold, or at least about nine-fold, or at least about ten-fold, or at least about 15-fold, or at least a 20-fold, or at least a 40-fold or greater increase in terminal half-life compared to the FVIII not linked to the XTEN. In other embodiments, the invention provides CXTEN compositions and pharmaceutical compositions comprising CFXTEN wherein the administration of a composition to a subject in need thereof results in a terminal half-life that is at least 12 h greater, or at least about 24 h greater, or at least about 48 h greater, or at least about 96 h greater, or at least about 144 h greater, or at least about 7 days greater, or at least about 14 days greater, or at least about 21 days greater compared to a comparable dose of FVIII not linked to XTEN. In another embodiment, administration of a coagulation-effective dose of a CFXTEN fusion protein to a subject in need thereof can result in a gain in time between consecutive doses necessary to maintain blood levels of about 0.1 IU/ml of at least 48 h, or at least 72 h, or at least about 96 h, or at least about 120 h, or at least about 7 days, or at least about 14 days, or at least about 21 days between consecutive doses compared to a FVIII not linked to XTEN and administered at a comparable dose.

[0302] In one embodiment, the present invention provides CFXTEN fusion proteins and pharmaceutical compositions comprising CFXTEN that exhibit, when administered to a subject in need thereof, an increase in AUC of at least about 50%, or at least about 60%, or at least about 70%, or at least about 80%, or at least about 90%, or at least about a 100%, or at least about 150%, or at least about 200%, or at least about 300%, or at least about 500%, or at least about 1000%, or at least about a 2000% compared to the corresponding FVIII not linked to the XTEN and administered to a subject at a comparable dose. The pharmacokinetic parameters of a CFXTEN can be determined by standard methods involving dosing, the taking of blood samples at timed intervals, and the assaying of the protein using ELISA, HPLC, radioassay, clotting assays, the assays of Table 49, or other methods known in the art or as described herein, followed by standard calculations of the data to derive the half-life and other PK parameters.

[0303] In one embodiment, a smaller IU amount of about two-fold less, or about three-fold less, or about four-fold less, or about five-fold less, or about six-fold less, or about eight-fold less, or about 10-fold less or greater of the fusion protein is administered in comparison to the corresponding FVIII not linked to the XTEN under a dose regimen needed to maintain hemostasis and the fusion protein achieves a comparable area under the curve as the corresponding IU amount of the FVIII not linked to the XTEN needed to maintain hemostasis. In another embodiment, the CFXTEN fusion protein or a pharmaceutical compositions comprising CFXTEN requires less frequent administration for routine prophylaxis of a hemophilia A subject, wherein the dose of fusion protein is administered about every four days, about every seven days, about every 10 days, about every 14 days, about every 21 days, or about monthly to the subject, and the fusion protein achieves a comparable area under the curve as the corresponding FVIII not linked to the XTEN and administered to the subject. In yet other embodiments, an accumulative smaller IU amount of about 5%, or about 10%, or about 20%, or about 40%, or about 50%, or about 60%, or about 70%, or about 80%, or about 90% less of the fusion protein is administered to a subject in comparison to the corresponding IU amount of the FVIII not linked to the XTEN under a dose regimen needed to maintain a blood concentration of 0.1 IU/ml, yet the fusion protein achieves at least a comparable area under the curve as the corresponding FVIII not linked to the XTEN. The accumulative smaller IU amount is measure for a period of at least about one week, or about 14 days, or about 21 days, or about one month.

[0304] In one aspect, the invention provides CFXTEN compositions designed to reduce binding by FVIII binding agents, thereby increasing the terminal half-life of CFXTEN administered to a subject, while still retaining procoagulant activity. It is believed that the CFXTEN of the present invention have comparatively higher and/or sustained activity achieved by reduced active clearance of the molecule by the addition of unstructured XTEN to the FVIII coagulation factor. The clearance mechanisms to remove FVIII from the circulation have yet to be fully elucidated. Uptake, elimination, and inactivation of coagulation proteins can occur in the circulatory system as well as in the extravascular space. Coagulation factors are complex proteins that interact with a large number of other proteins, lipids, and receptors, and many of these interactions can contribute to the elimination of CFs from the circulation. The protein von Willebrand factor is an example of a FVIII binding agent that binds to FVIII. Factor VIII and von Willebrand factor (VWF) circulate in the blood as a tight, non-covalently linked complex in which VWF serves as a carrier that likely contributes to the protection of FVIII from active cleavage mechanisms, yet nevertheless results in a limitation on the terminal half-life of FVIII. For example: (i) VWF stabilizes the heterodimeric structure of FVIII; (ii) VWF protects FVIII from proteolytic degradation by phospholipid-binding proteases like activated protein C and activated FX (FXa); (iii) VWF interferes with binding of FVIII to negatively charged phospholipid surfaces exposed within activated platelets; (iv) VWF inhibits binding of FVIII to activated FIX (FIXa), thereby denying FVIII access to the FX-activating complex; and (v) VWF prevents the cellular uptake of FVIII (Lenting, P. J., et al., J Thrombosis and Haemostasis (2007) 5(7):1353-1360). In addition, LDL receptor-related protein (LRP1, also known as α2-macrogobulin receptor or CD91) has been identified as a candidate clearance receptor for FVIII, with LRP1 binding sites identified on both chains of the heterodimer form of FVIII (Lenting P J, et al., J Biol Chem (1999) 274: 23734-23739; Saenko E L, et al., J Biol Chem (1999) 274: 37685-37692). LRPs are involved in the clearance of a diversity of ligands including proteases, inhibitors of the Kunitz type, protease serpin complexes, lipases and lipoproteins (Narita, et al., Blood (1998) 2:555-560). It has been shown that the light chain, but not the heavy chain, of factor VIII binds to surface-exposed LRP1 receptor protein (Lentig et al. (J Biol Chem (1999) 274(34):23734-23739; and U.S. Pat. No. 6,919,311), which suggests that LRP1 may play an essential role in the active clearance of proteins like FVIII. While the VWF-FVIII interaction is of high affinity (<1 nM), the complex is nevertheless in a dynamic equilibrium, such that a small but significant portion of the FVIII molecules (5-8%) circulate as a free protein (Leyte A, et al., Biochem J (1989) 257: 679-683; Noe D A. Haemostasis (1996) 26: 289-303). As such, a portion of native FVIII is unprotected by VWF, allowing active clearance mechanisms to remove the unprotected FVIII from the circulation.

[0305] In one embodiment, the invention provides CFXTEN that associate with VWF but have enhanced protection from active clearance receptors conferred by the incorporation of two more XTEN at one or more locations within the FVIII molecule (e.g., locations selected from Table 5, Table 6, Table 7, Table 8, and Table 9 or FIGS. 8-9), wherein the XTEN interfere with the interaction of the resulting CFXTEN with those clearance receptors with the result that the pharmacokinetic properties of the CFXTEN is enhanced compared to the corresponding FVIII not linked to XTEN. In another embodiment, the invention provides CFXTEN that have reduced binding affinity with VWF of at least 5% less, or about 10%, or about 20%, or about 40%, or about 50%, or about 60%, or about 70% less, but are nevertheless configured to have enhanced protection from active clearance receptors conferred by the incorporation of XTEN at one or more locations within the FVIII molecule, wherein the XTEN interfere with the interaction of factor VIII with those receptors. In the foregoing embodiments, the CFXTEN have an increased terminal half-life of at least about 12 h, or 24 h, or 48 h, or 72 h, or 96 h, or 120 h, or 144 h, or 7 days, or 10 days, or 14 days, or 21 days compared to the FVIII not linked to XTEN. The invention provides a method to create CFXTEN with reduced clearance wherein the CFXTEN fusion proteins created with the multiple insertions are evaluated for inhibition of binding to clearance receptors, compared to FVIII not linked to XTEN, using in vitro binding assays or in vivo pharmacokinetic models described herein or other assays known in the art, and selecting those that demonstrate reduced binding yet retain procoagulant FVIII activity. In addition, the foregoing fusion proteins can be optimized to have increased Ratio XTEN Radii of at least 2.0-3.5 in order to achieve pharmacokinetic properties that are further enhanced. Table 5, Table 6, Table 7, Table 8, and Table 9 and FIGS. 8-9 provide non-limiting examples of XTEN insertion points within the factor VIII sequence. Using such insertion points, the invention contemplates CFXTEN compositions that have configurations with multiple XTEN inserted with about 100, or about 200, or about 300, or about 400, or about 500 amino acids separating at least three XTEN to further increase the protection against active clearance mechanisms and, hence, increase the terminal half-life of the CFXTEN. Not to be bound by a particular theory, the XTEN of the CFXTEN compositions with high net charge (e.g., CFXTEN comprising AE family XTEN) are expected, as described above, to have less non-specific interactions with various negatively-charged surfaces such as blood vessels, tissues, or various receptors, which would further contribute to reduced active clearance. Conversely, the XTEN of the CFXTEN compositions with a low (or no) net charge (e.g., CFXTEN comprising AG family XTEN) are expected to have a higher degree of interaction with surfaces that, while contributing to active clearance, can potentiate the activity of the associated coagulation factor, given the known contribution of cell (e.g., platelets) and vascular surfaces to the coagulation process and the intensity of activation of coagulation factors (Zhou, R., et al., Biomaterials (2005) 26(16):2965-2973; London, F., et al. Biochemistry (2000) 39(32):9850-9858). The invention, in part, takes advantage of the fact that certain ligands wherein reduced binding to a clearance receptor, either as a result of a decreased on-rate or an increased off-rate, may be effected by the obstruction of a receptor site by an inserted XTEN forming random coil, resulting in the reduced binding. The choice of the particular configuration of the CFXTEN fusion protein can be tested by methods disclosed herein to confirm those configurations that reduce the degree of binding to a clearance receptor such that a reduced rate of active clearance is achieved. In one embodiment, the CFXTEN comprises a FVIII-XTEN sequence that has one or more XTEN inserted at locations selected from Table 5, Table 6, Table 7, Table 8, and Table 9 or FIGS. 8-9 wherein the terminal half-life of the CFXTEN is increased at least about two-fold, or at least about three-fold, or at least about four-fold, or at least about five-fold, or at least about six-fold, or at least about eight-fold, or at least about ten-fold, or at least about twenty-fold compared to a FVIII not linked to an XTEN. In another embodiment, the CFXTEN comprises a FVIII-XTEN sequence that has a first and at least a second XTEN inserted at a first and second location selected from Table 5, Table 6, Table 7, Table 8, and Table 9 or FIGS. 8-9 wherein the terminal half-life of the CFXTEN is increased at least about two-fold, or at least about three-fold, or at least about four-fold, or at least about five-fold, or at least about six-fold, or at least about eight-fold, or at least about ten-fold, or at least about twenty-fold compared to a FVIII not linked to an XTEN. In yet another embodiment, the CFXTEN comprises a FVIII-XTEN sequence that incorporates multiple XTEN sequences using three of more XTEN insertion locations selected from Table 5, Table 6, Table 7, Table 8, and Table 9 or FIGS. 8-9 separated by about 100, or about 200, or about 300, or about 400, or about 500 amino acids, wherein the terminal half-life of the CFXTEN is increased at least about two-fold, or at least about three-fold, or at least about four-fold, or at least about five-fold, or at least about six-fold, or at least about eight-fold, or at least about ten-fold, or at least about twenty-fold compared to a FVIII not linked to an XTEN. In the foregoing embodiments hereinabove described in this paragraph, the XTEN incorporated into the CFXTEN configurations can be identical or they can be different, and can have at least about 80%, or 90%, or 91%, or 92%, or 93%, or 94%, or 95%, or 96%, or 97%, or 98%, or 99%, sequence identity to a sequence from any one of Tables 3, 4, and 13-17, and can optionally include one or more cleavage sequences from Table 12, facilitating release of one or more of the XTEN from the CFXTEN fusion protein.

[0306] In one embodiment, the invention provides CFXTEN that enhance the pharmacokinetics of the fusion protein by linking one or more XTEN to the FVIII component of the fusion protein wherein the fusion protein has an increase in apparent molecular weight factor of at least about two-fold, or at least about three-fold, or at least about four-fold, or at least about five-fold, or at least about six-fold, or at least about seven-fold, or at least about eight-fold, or at least about ten-fold, or at least about twelve-fold, or at least about fifteen-fold, and wherein the terminal half-life of the CFXTEN when administered to a subject is increased at least about two-fold, or at least about four-fold, or at least about eight-fold, or at least about 10-fold or more compared to the corresponding FVIII not linked to XTEN. In the foregoing embodiment, wherein at least two XTEN molecules are incorporated into the CFXTEN, the XTEN can be identical or they can be of a different sequence composition, net charge, or length. The XTEN can have at least about 80%, or 90%, or 91%, or 92%, or 93%, or 94%, or 95%, or 96%, or 97%, or 98%, or 99%, sequence identity to a sequence from any one of Tables 3, 4, and 13-17, and can optionally include one or more cleavage sequences from Table 12, facilitating release of one or more of the XTEN from the CFXTEN fusion protein.

[0307] Thus, the invention provides CFXTEN compositions in which the degree of activity, bioavailability, half-life or physicochemical characteristic of the fusion protein can be tailored by the selection and placement of the type and length of the XTEN in the CFXTEN compositions. Accordingly, the invention contemplates compositions in which a FVIII from Table 1 and XTEN or XTEN fragment from any one of Tables 3, 4, or 13-17 are produced, for example, in a configuration selected from any one of formulae I-VIII or the XTEN are inserted at locations selected from Table 5, Table 6, Table 7, Table 8, and Table 9 or FIGS. 8-9 such that the construct has the desired property.

[0308] The invention provides methods to produce the CFXTEN compositions that can maintain the FVIII component at therapeutic levels in a subject in need thereof for at least a two-fold, or at least a three-fold, or at least a four-fold, or at least a five-fold greater period of time compared to comparable dosages of the corresponding FVIII not linked to XTEN. In one embodiment of the method, the subject is receiving routine prophylaxis to prevent bleeding episodes. In another embodiment of the method, the subject is receiving treatment for a bleeding episode. In another embodiment of the method, the subject is receiving treatment to raise the circulating blood concentration of procoagulant FVIII above 1%, or above 1-5%, or above 5-40% relative to FVIII concentrations in normal plasma. “Procoagulant” as used herein has its general meaning in the art and generally refers to an activity that promotes clot formation, either in an in vitro assay or in vivo. The method to produce the compositions that can maintain the FVIII component at therapeutic levels includes the steps of selecting one or more XTEN appropriate for conjugation to a FVIII to provide the desired pharmacokinetic properties in view of a given dose and dose regimen, creating a gene construct that encodes the CFXTEN in one of the configurations disclosed herein, transforming an appropriate host cell with an expression vector comprising the encoding gene, expressing the fusion protein under suitable culture conditions, recovering the CFXTEN, administration of the CFXTEN to a mammal followed by assays to verify the pharmacokinetic properties and the activity of the CFXTEN fusion protein (e.g., the ability to maintain hemostasis or serve as a procoagulant) and the safety of the administered composition. Those compositions exhibiting the desired properties are selected for further use. CFXTEN created by the methods provided herein can result in increased efficacy of the administered composition by, amongst other properties, maintaining the circulating concentrations of the procoagulant FVIII component at therapeutic levels for an enhanced period of time.

[0309] The invention provides methods to assay the CFXTEN fusion proteins of differing composition or configuration in order to provide CFXTEN with the desired degree of procoagulant and therapeutic activity and pharmacokinetic properties, as well as a sufficient safety profile. Specific in vitro and in vivo assays or animal models are used to assess the activity and functional characteristics of each configured CFXTEN and/or FVIII component to be incorporated into CFXTEN, including but not limited to the assays of the Examples, those assays of Table 49, as well as the following assays or other such assays known in the art for assaying the properties and effects of FVIII. Functional assays can be conducted that allow determination of coagulation activity, such as one-stage clotting assay and two-stage clotting assay (Barrowcliffe T W, Semin Thromb Hemost. (2002) 28(3):247-256), activated partial prothrombin (aPTT) assays (Belaaouaj A A et al., J. Biol. Chem. (2000) 275:27123-8; Diaz-Collier J A. Haemost (1994) 71:339-46), chromogenic FVIII assays (Lethagen, S., et al., Scandinavian J Haematology (1986) 37:448-453), or animal model pharmacodynamic assays including bleeding time or thrombelastography (TEG or ROTEM), among others. Other assays include determining the binding affinity of a CFXTEN for the target substrate using binding or competitive binding assays, such as Biacore assays with chip-bound receptors or binding proteins or ELISA assays, as described in U.S. Pat. No. 5,534,617, assays described in the Examples herein, radio-receptor assays, or other assays known in the art. Other assays to determine the binding of FVIII inhibitors to CFXTEN include the Bethesda assay or the Nijmegen modification of the Bethesda assay. The foregoing assays can also be used to assess FVIII sequence variants (assayed as single components or as CFXTEN fusion proteins) and can be compared to the native FVIII to determine whether they have the same degree of procoagulant activity as the native CF, or some fraction thereof such that they are suitable for inclusion in CFXTEN; e.g., at least about 10%, or at least about 20$, or about 30%, or at least about 40%, or at least about 50%, or at least about 60%, or at least about 70%, or at least about 80%, or at least about 90% of the activity compared to the native FVIII.

[0310] Dose optimization is important for all drugs. A therapeutically effective dose or amount of the CFXTEN varies according to factors such as the disease state, age, sex, and weight of the individual, and the ability of the administered fusion protein to elicit a desired response in the individual. For example, a standardized single dose of FVIII for all patients presenting with diverse bleeding conditions or abnormal clinical parameters (e.g., neutralizing antibodies) may not always be effective. Hemophilia A patients with trauma, who have undergone surgery, or that have high titers of FVIII inhibitory antibodies generally will require higher and more frequent dosing. Generally, dosage level is adjusted in frequency, duration, and units in keeping with the severity and duration of each patient's bleeding episode. Accordingly, the CFXTEN is included in the pharmaceutically acceptable carrier, delivery vehicle, or stabilizer in an amount sufficient to deliver to a patient a therapeutically effective amount of the fusion protein to stop bleeding, as measured by standard clotting assays. A consideration of these factors is well within the purview of the ordinarily skilled clinician for the purpose of determining the therapeutically or pharmacologically effective amount of the CFXTEN and the appropriated dosing schedule, versus that amount that would result in insufficient potency such that clinical improvement or the arrest of bleeding is not achieved.

[0311] The invention provides methods to establish a dose regimen for the CFXTEN pharmaceutical compositions of the invention. The methods include administration of consecutive doses of a therapeutically effective amount of the CFXTEN pharmaceutical composition using variable periods of time between doses to determine that interval of dosing sufficient to achieve and/or maintain the desired parameter, blood level or clinical effect; such consecutive doses of a therapeutically effective amount at the effective interval establishes the therapeutically effective dose regimen for the CFXTEN for a factor VIII-related disease state or condition. A prophylactically effective amount refers to an amount of CFXTEN required for the period of time necessary to prevent a physiologic or clinical result or event; e.g., delayed onset of a bleeding episode or maintaining blood concentrations of procoagulant FVIII or equivalent above a threshold level (e.g., 1-5% to 5-40% of normal). In the methods of treatment, the dosage amount of the CFXTEN that is administered to a subject ranges from about 5 to 300 IU/kg/dose, or from about 10 to 100 IU/kg/dose, or from about 20 to about 65 IU/kg/dose, or from about 20 to about 40 IU/kg/dose for a subject. A suitable dosage may also depend on other factors that may influence the response to the drug; e.g., bleeding episodes generally requiring higher doses at more frequent intervals compared to prophylaxis.

[0312] In some embodiments, the method comprises administering a therapeutically-effective amount of a pharmaceutical composition comprising a CFXTEN fusion protein composition and at least one pharmaceutically acceptable carrier to a subject in need thereof, wherein the administration results in a greater improvement in at least one parameter or physiologic condition associated with a FVIII deficiency or coagulopathy, or results in a more favorable clinical outcome mediated by the FVIII component of the CFXTEN compared to the effect on the parameter, condition or clinical outcome mediated by administration of a pharmaceutical composition comprising a FVIII not linked to XTEN and administered at a comparable dose. Non-limiting examples of parameters that are improved include blood concentration of procoagulant FVIII, a reduced activated partial prothrombin (aPTT) assay time, a reduced one-stage or two-stage clotting assay time, delayed onset of a bleeding episode, a reduced chromogenic FVIII assay time, a reduced bleeding time, resolution of a bleeding event, or a reduced Bethesda titer to the CFXTEN relative to native FVIII. In one embodiment of the foregoing, the improvement is achieved by administration of the CFXTEN pharmaceutical composition at a dose that achieves a circulating concentration of procoagulant FVIII (or equivalent) above a threshold level (e.g., 1-5% to 5-40% of normal FVIII levels), thereby establishing the therapeutically effective dose. In another embodiment of the foregoing, the improvement is achieved by administration of multiple consecutive doses of the CFXTEN pharmaceutical composition using a therapeutically effective dose regimen that maintains a circulating concentration of procoagulant FVIII (or equivalent) above a threshold level (e.g., 1-5% to 5-40% of normal FVIII levels) for the length of the dosing period. In another embodiment of the method, the administration of at least two consecutive doses of the CFXTEN pharmaceutical composition using a therapeutically effective dose regimen maintains a circulating concentration of procoagulant FVIII (or equivalent) above about 1%, 2%, 3%, 4%, 5%, 10%, 15%, 20%, 30%, or 40% of normal FVIII levels for a period that is at least about three-fold longer; alternatively at least about four-fold longer; alternatively at least about five-fold longer; alternatively at least about six-fold longer; alternatively at least about seven-fold longer; alternatively at least about eight-fold longer; alternatively at least about nine-fold longer or at least about ten-fold longer compared to a FVIII not linked to XTEN and administered using a therapeutically effective dose regimen

[0313] In one embodiment, the CFXTEN or a pharmaceutical compositions comprising CFXTEN administered at a therapeutically effective dose regimen results in a gain in time of at least about three-fold longer; alternatively at least about four-fold longer; alternatively at least about five-fold longer; alternatively at least about six-fold longer; alternatively at least about seven-fold longer; alternatively at least about eight-fold longer; alternatively at least about nine-fold longer or at least about ten-fold longer between at least two consecutive Cₘₐₓ peaks and/or Cₘᵢₙ troughs for blood levels of the fusion protein compared to the corresponding biologically active protein of the fusion protein not linked to the XTEN and administered at a comparable dose regimen to a subject. In another embodiment, the CFXTEN administered at a therapeutically effective dose regimen results in a comparable improvement in one, or two, or three or more measured parameters using less frequent dosing or a lower total dosage in IUs of the fusion protein of the pharmaceutical composition compared to the corresponding biologically active protein component(s) not linked to the XTEN and administered to a subject using a therapeutically effective dose regimen for the FVIII. The measured parameters include any of the clinical, biochemical, or physiological parameters disclosed herein, or others known in the art for assessing subjects with factor VIII-related conditions.

[0314] (b) Pharmacology and Pharmaceutical Properties of CFXTEN

[0315] The present invention provides CFXTEN compositions comprising FVIII covalently linked to XTEN that have enhanced pharmaceutical and pharmacology properties compared to FVIII not linked to XTEN, as well as methods to enhance the therapeutic and/or procoagulant effect of the FVIII components of the compositions. In addition, the invention provides CFXTEN compositions with enhanced properties compared to those art-known fusion proteins of factor VIII containing albumin, immunoglobulin polypeptide partners, polypeptides of shorter length and/or polypeptide partners with repetitive sequences. In addition, CFXTEN fusion proteins provide significant advantages over chemical conjugates, such as pegylated constructs of FVIII, notably the fact that recombinant CFXTEN fusion proteins can be made in host cell expression systems, which can reduce time and cost at both the research and development and manufacturing stages of a product, as well as result in a more homogeneous, defined product with less toxicity from both the product and metabolites of the CFXTEN compared to pegylated conjugates.

[0316] As therapeutic agents, the CFXTEN possesses a number of advantages over therapeutics not comprising XTEN, including one or more of the following non-limiting properties: increased solubility, increased thermal stability, reduced immunogenicity, increased apparent molecular weight, reduced renal clearance, reduced proteolysis, reduced metabolism, enhanced therapeutic efficiency, less frequent dosage regimen with increased time between doses capable of maintaining hemostasis in a subject with hemophilia A, the ability to administer the CFXTEN composition subcutaneously or intramuscularly, a “tailored” rate of absorption when administered subcutaneously or intramuscularly, enhanced lyophilization stability, enhanced serum/plasma stability, increased terminal half-life, increased solubility in blood stream, decreased binding by neutralizing antibodies, decreased active clearance, tailored substrate binding affinity, stability to degradation, stability to freeze-thaw, stability to proteases, stability to ubiquitination, ease of administration, compatibility with other pharmaceutical excipients or carriers, persistence in the subject, increased stability in storage (e.g., increased shelf-life), and the like. The net effect of the enhanced properties is that the use of a CFXTEN composition can result in an overall enhanced therapeutic effect compared to a FVIII not linked to XTEN, result in economic benefits associated with less frequent dosing, and/or result in improved patient compliance when administered to a subject with a factor VIII-related condition.

[0317] The invention provides CFXTEN compositions and pharmaceutical compositions comprising CFXTEN wherein the administration of the composition results in an improvement in at least one of the clinical or biochemical parameters disclosed herein as being useful for assessing the subject diseases, conditions or disorders. Non-limiting examples of parameters that are improved include blood concentrations of procoagulant FVIII, a reduced activated partial prothrombin (aPTT) assay time, a reduced one-stage or two-stage clotting assay time, delayed onset of a bleeding episode, a reduced chromogenic FVIII assay time, a reduced bleeding time, resolution of a bleeding event, or a reduced Bethesda titer to the CFXTEN relative to native FVIII. The enhanced pharmacokinetic properties of the subject CFXTEN permits using an accumulatively lower IU dose of fusion protein to maintain the parameter compared to the corresponding FVIII component not linked to the XTEN. In one embodiment, the total dose in IUs of an CFXTEN of the embodiments needed to achieve and maintain the improvement in the at least one parameter for about 2-7 days is at least about three-fold lower, or at least about four-fold, or at least about five-fold, or at least about six-fold, or at least about eight-fold, or at least about 10-fold lower compared to the corresponding FVIII component not linked to the XTEN. In another embodiment, the total dose in IUs of a subject CFXTEN needed to achieve and maintain the improvement in the at least one parameter over two, three or four consecutive doses is at least about three-fold lower, or at least about four-fold, or at least about five-fold, or at least about six-fold, or at least about eight-fold, or at least about 10-fold lower compared to the corresponding FVIII component not linked to the XTEN. Alternatively, the invention provides certain embodiments of CFXTEN wherein the period between consecutive administrations that results in achieving and maintaining the improvement in at least one parameter is at least about three-fold, or at least about four-fold, or at least about five-fold, or at least about six-fold, or at least about eight-fold, or at least about 10-fold longer compared to the corresponding FVIII component not linked to the XTEN and administered at a comparable IU dose. Alternatively, the invention provides certain embodiments of CFXTEN wherein administration of 25 IU/kg results in a 30% improvement in a aPTT assay (or similar coagulation assay) time in a hemophilia A subject compared to 25 IU/kg of the corresponding FVIII not linked to XTEN when assayed at about 2-7 days after administration. In yet another embodiment, the invention provides CFXTEN wherein administration of 25 IU/kg results in a 30% improvement in a bleeding time assay time in a hemophilia A subject compared to 25 IU/kg of the corresponding FVIII not linked to XTEN when assayed at about 2-7 days after administration.

[0318] In one embodiment, XTEN as a fusion partner increases the solubility of the FVIII payload. Accordingly, where enhancement of the pharmaceutical or physicochemical properties of the FVIII is desirable, such as the degree of aqueous solubility or stability, the length and/or the motif family composition of the XTEN sequences incorporated into the fusion protein may each be selected to confer a different degree of solubility and/or stability on the respective fusion proteins such that the overall pharmaceutical properties of the CFXTEN composition are enhanced. The CFXTEN fusion proteins can be constructed and assayed, using methods described herein, to confirm the physicochemical properties and the choice of the XTEN length sequence or location adjusted, as needed, to result in the desired properties. In one embodiment, the CFXTEN has an aqueous solubility that is at least about 25% greater compared to a FVIII not linked to the XTEN, or at least about 30%, or at least about 40%, or at least about 50%, or at least about 75%, or at least about 100%, or at least about 200%, or at least about 300%, or at least about 400%, or at least about 500%, or at least about 1000% greater than the corresponding FVIII not linked to XTEN.

[0319] The invention provides methods to produce and recover expressed CFXTEN from a host cell with enhanced solubility and ease of recovery compared to FVIII not linked to XTEN. In one embodiment, the method includes the steps of transforming a eukaryotic host cell with a polynucleotide encoding a CFXTEN with one or more XTEN components of cumulative sequence length greater than about 100, or greater than about 200, or greater than about 400, or greater than about 600, or greater than about 800, or greater than about 1000, or greater than about 2000, or greater than about 3000 amino acid residues, expressing the CFXTEN fusion protein in the host cell under suitable culture and induction conditions, and recovering the expressed fusion protein in soluble form. In one embodiment, the one or more XTEN of the CFXTEN fusion proteins each have at least about 80% sequence identity, or about 90%, or about 91%, or about 92%, or about 93%, or about 94%, or about 95%, or about 96%, or about 97%, or about 98%, or about 99%, to about 100% sequence identity compared to one or more XTEN selected from any one of Tables 4, and 13-17, or fragments thereof, and the FVIII have at least about 80% sequence identity, or about 90%, or about 91%, or about 92%, or about 93%, or about 94%, or about 95%, or about 96%, or about 97%, or about 98%, or about 99%, or 100% sequence identity compared to a FVIII selected from Table 1, and the CFXTEN components are in an N- to C-terminus configuration selected from any one of the configuration embodiments disclosed herein.

### VI). Uses of the CFXTEN Compositions

[0320] The invention provides methods and regimens for achieving a beneficial effect in a factor VIII-related condition by the administration of compositions comprising CFXTEN. As used herein, “factor VIII-related condition” is intended to include, but is not limited to factor VIII deficiencies, bleeding disorders related to factor VIII deficiency, hemophilia A, neutralization of factor VIII by anti-FVIII antibodies or other factor VIII inhibitors, and bleeding episodes resulting from trauma or surgery or vascular injury and other such conditions that can be ameliorated or corrected by administration of FVIII to a subject. The inventive methods achieve a beneficial effect while addressing disadvantages and/or limitations of other methods of treatment using factor VIII preparations that have a relatively short terminal half-life, require frequent administrations, are neutralized by inhibitors or have unfavorable pharmacoeconomics.

[0321] Hemostasis is regulated by multiple protein factors, and such proteins, as well as analogues thereof, have found utility in the treatment of factor VIII-related conditions. However, the use of commercially-available FVIII has met with less than optimal success in the management of subjects afflicted with such conditions. In particular, dose optimization and frequency of dosing is important for FVIII used in maintaining circulating FVIII concentrations above threshold levels needed for hemostasis, as well as the treatment or prevention of bleeding episodes in hemophilia A subjects. The fact that commercially-available FVIII products have a short half-life necessitates frequent dosing in order to achieve clinical benefit, which results in difficulties in the management of such patients.

[0322] As established by the Subcommittee on Factor VIII and Factor IX of the Scientific and Standardization Committee of the International Society on Thrombosis and Haemostasis (posted on the ISTH Website 29 Nov. 2000), the most widely used measure of the severity of hemophilia A is established by determining the circulating concentrations of plasma FVIII procoagulant levels, with persons with <1% (<0.01 IU/ml) factor VIII defined as severe; 1-5% (0.01-0.05 IU/ml) as moderately severe; and >5-40% (0.05-<0.40 IU/ml) as mild, where normal is 1 IU/ml of factor VIIIC (100%).

[0323] The invention provides methods of treating a subject suffering from or at risk of developing a factor VIII-related condition. More particularly, the invention provides methods for treating or preventing controlling bleeding in subject. The subject can be any animal but preferably is a human. In one embodiment, the method comprises administering a coagulation-effective amount of a CFXTEN composition to the subject in need thereof. In another embodiment, the method comprises the step of administering to the subject with a bleed a coagulation-effective amount of a pharmaceutical composition that includes a CFXTEN, wherein the administration results in an arrest or attenuation of the bleeding. As used herein, “coagulation-effective amount” is an amount of a FVIII composition that, when administered to a subject, is sufficient to effect hemostasis or other beneficial or desired therapeutic (including preventative) result. In practicing the present invention, it will be understood that a coagulation-effective amount can be administered in one or more administrations. Precise coagulation-effective amounts of the pharmaceutical composition to be administered will be guided by the judgment of the practitioner, however, the unit dose will generally depend on the severity or cause of the bleeding and the amount of pre-existing FVIII in the subject. In a particular embodiment of the method of treating a bleed, a coagulation-effective amount of a pharmaceutical compositions comprising CFXTEN is administered to a subject suffering from a bleeding episode, wherein the administration results in the resolution of the bleeding for a duration at least two-fold, or at least three-fold, or at least four-fold longer compared to a FVIII not linked to XTEN and administered to a comparable subject with a comparable bleed at a comparable dose.

[0324] In another embodiment, the administration of a coagulation-effective amount of a CFXTEN composition to a subject with a factor VIII-related condition results in a 10%, or 20%, or 30%, or 40%, or 50%, or 60%, or 70% or greater improvement of one or more biochemical, physiological or clinical parameters associated with the FVIII condition, compared to the FVIII not linked to XTEN, when measured at between 2 and 7 days after administration. In another embodiment, the administration of a coagulation-effective amount of a CFXTEN composition to the subject in need thereof results in an improvement of one or more biochemical, physiological or clinical parameters associated with the FVIII condition for a period at least two-fold longer, or at least four-fold longer, or at least five-fold longer, or at least six-fold longer compared to period achieved by a FVIII not linked to XTEN and administered at a comparable dose. Non-limiting examples of parameters that are improved for a longer duration include blood concentrations of procoagulant FVIII, a reduced activated partial prothrombin (aPTT) assay time, a reduced one-stage or two-stage clotting assay time, delayed onset of a bleeding episode, a reduced chromogenic FVIII assay time, a reduced bleeding time, among other FVIII-related parameters known in the art. In the foregoing embodiments of the paragraph, the administered CFXTEN comprises a FVIII with at least about 80%, or at least about 90%, or at least about 95%, or at least about 97%, or at least about 99% sequence identity to a factor VIII of Table 1 and one or more XTEN sequences with at least about 80%, or at least about 90%, or at least about 95%, or at least about 97%, or at least about 99% sequence identity to an XTEN of Table 4 inserted into the FVIII at one or more locations selected from Table 5, Table 6, Table 7, Table 8, and Table 9, or as depicted in FIGS. 8-9. In certain embodiments, at least one XTEN insertion site of the CFXTEN is selected from amino acids 32, 220, 224, 336, 339, 390, 399, 416, 603, 1656, 1711, 1725, 1905 and 1910 (numbered relative to mature native human FVIII).

[0325] In a particular embodiment of the method of treatment, a coagulation-effective amount of CFXTEN fusion protein administered to a subject suffering from hemophilia A is sufficient to increase the circulating FVIII procoagulant concentration to greater than 0.05 IU/ml and to maintain hemostasis for at least about 24 h, or at least about 48 h, or at least about 72 h, or at least about 96 h, or at least about 120 h, or at least about 144 h, or at least about 168 h, or greater. In another embodiment, the administration of a coagulation-effective amount of a pharmaceutical composition comprising CFXTEN to a subject in need thereof results in a greater reduction in a one-stage clotting assay time of at least about 5%, or about 10%, or about 20%, or about 30%, or about 40%, or about 50%, or about 60%, or about 70%, or more in a blood sample from the subject at 2-7 days after the administration compared to the assay time in a subject after administration of a comparable amount of the corresponding FVIII not linked to XTEN. In another embodiment, the administration of a therapeutically effective amount of a CFXTEN or a pharmaceutical compositions comprising CFXTEN to a subject in need thereof results in a greater reduction in the activated partial prothrombin time of at least about 5%, or about 10%, or about 20%, or about 30%, or about 40%, or about 50%, or about 60%, or about 70%, or more in a blood sample from the subject 2-7 days after administration compared to the activated partial prothrombin time in a subject after administration of a comparable amount of the corresponding FVIII not linked to XTEN. In another embodiment, the administration of a CFXTEN or a pharmaceutical compositions comprising CFXTEN to a subject in need thereof using a therapeutically effective amount results in maintenance of activated partial prothrombin times within 30% of normal in a blood sample from the subject for a period of time that is at least two-fold, or at least about three-fold, or at least about four-fold longer compared to that of a FVIII not linked to XTEN and administered to a subject using a comparable dose.

[0326] In one embodiment of the method of treatment, the CFXTEN fusion protein is formulated and administered as a pharmaceutical composition comprising the CFXTEN in admixture with a pharmaceutically acceptable excipient. Methods for making pharmaceutical formulations are well known in the art. Techniques and formulations generally may be found in Remington's Pharmaceutical Sciences, 18th Edition, Mack Publishing Co., Easton, Pa. 1990 (See, also, Wang and Hanson, Parenteral Formulations of Proteins and Peptides: Stability and Stabilizers, Journal of Parenteral Science and Technology, Technical Report No. 10, Supp. 42-2S (1988)).

[0327] In another aspect, the invention provides a regimen for treating a hemophilia A patient, said regimen comprising a composition comprising a CFXTEN fusion protein. In one embodiment of the regimen for treating a hemophilia A patient, the regimen further comprises the step of determining the amount of pharmaceutical composition comprising the CFXTEN needed to achieve hemostasis in the patient. In some embodiments of the regimen, (i) a smaller IU amount of about two-fold less, or about three-fold less, or about four-fold less, or about five-fold less, or about six-fold less, or about eight-fold less, or about 10-fold less of the pharmaceutical composition comprising CFXTEN is administered to a subject in need thereof in comparison to the corresponding coagulation factor not linked to the XTEN under an otherwise same dose regimen, and the fusion protein achieves a comparable area under the curve (based on IU/ml) and/or a comparable therapeutic effect as the corresponding FVIII not linked to the XTEN; (ii) the pharmaceutical composition is administered less frequently (e.g., every three days, about every seven days, about every 10 days, about every 14 days, about every 21 days, or about monthly) in comparison to the corresponding FVIII not linked to the XTEN under an otherwise same dose amount, and the fusion protein achieves a comparable area under the curve and/or a comparable therapeutic effect as the corresponding coagulation factor not linked to the XTEN; or (iii) an accumulative smaller IU amount of at least about 20%, or about 30%, or about 40%, or about 50%, or about 60%, or about 70%, or about 80%, or about 90% less of the pharmaceutical composition is administered in comparison to the corresponding FVIII not linked to the XTEN under an otherwise same dose schedule and the CFXTEN fusion protein achieves a comparable therapeutic effect as the corresponding FVIII not linked to the XTEN. The accumulative smaller IU amount is measured for a period of at least about one week, or about 14 days, or about 21 days, or about one month. In the foregoing embodiments, the therapeutic effect can be determined by any of the measured parameters described herein, including but not limited to blood concentration of procoagulant FVIII, a reduced activated partial prothrombin (aPTT) assay time, a reduced one-stage or two-stage clotting assay time, delayed onset of a bleeding episode, a reduced chromogenic FVIII assay time, a reduced bleeding time, resolution of a bleeding event, or a reduced Bethesda titer to the CFXTEN relative to native FVIII, fibrinogen levels, or other assays known in the art for assessing coagulopathies of FVIII. In another embodiment, the invention provides CFXTEN for use in a regimen for a treating a hemophilia A subject comprising administering an CFXTEN composition in two or more successive doses to the subject at an effective amount, wherein the administration results in at least a 10%, or 20%, or 30%, or 40%, or 50%, or 60%, or 70%, or 80%, or 90% greater improvement of at least one, two, or three parameters associated with the disease compared to a FVIII not linked to XTEN and administered using a comparable dose.

[0328] In one aspect, the present invention relates to a method of preventing or treating the bleeding in a patient, optionally a haemophilia A patient, having pre-existing inhibitor(s) against FVIII. Inhibitory antibodies against FVIII commonly develop in hemophiliacs, where the overall incidence of developing an inhibitor is 15-30%, particularly in hemophiliacs who are heavily exposed to FVIII concentrates (Algiman et al. Natural antibodies to factor VIII (anti-hemophilic factor) in healthy individuals. PNAS USA (1992) 89: 3795-3799). However, inhibitory antibodies also occur in patients in auto-immune disorders, malignancies (such as lymphoproliferative disorders, lymphomas and solid tumors), during pregnancy and in the post-partum state. Inhibition can also occur when antibodies interfere with the binding of FVIII to FIX and FX. Simultaneously or alternatively, anti-FVIII antibodies can interfere with the binding of von Willebrand factor and/or phospholipids to FVIII, affecting coagulation and/or half-life of FVIII. The presence of inhibitory antibodies is often first detected with symptoms such as easy bruising and uncontrolled bleeding, and is usually referred to as acquired hemophilia. Anti-FVIII antibodies can be determined by different methods including quantitation of anti-FVIII activity in coagulation assays, ELISA for FVIII inhibitors and purification using chromatography and immunoadsorption (Algiman et al., 1992). Accordingly, the inventive methods are used in the treatment or prevention of any condition associated with or characterized by the presence of inhibitory antibodies to FVIII. In one embodiment, the invention provides a method of treating a patient having a pre-existing inhibitor against FVIII, the method comprising the step of administering to the patient a coagulation-effective amount of a CFXTEN fusion protein that must be administered to achieve hemostasis, wherein the coagulation-effective amount of fusion protein administered is reduced in comparison to the amount of FVIII not linked to XTEN (or native FVIII) that must be administered to achieve hemostasis. In the method, the reduced amount of CFXTEN is about two-fold, or three-fold, or four-fold, or five-fold less in IU/kg compared to the corresponding FVIII not linked to XTEN. In another embodiment of the method, the amount of CFXTEN that is administered as a dose to achieve hemostasis is at least 20 to 40 IU/kg less, or 30 to 60 IU/kg less, or 40 to 80 IU/kg less, or 60 to 100 IU/kg less, or 100 to 140 IU/kg less, or 120 to 180 IU/kg less, or 140 to 200 IU/kg less compared to the corresponding FVIII not linked to XTEN or to native FVIII required to achieve hemostasis. In another embodiment, the invention provides a method of treating a bleeding episode in a hemophilia A subject having a titer of at least 10, or 20, or 30, or 40, or 50, or 75, or 100, or 150, or 200 or more Bethesda units against a FVIII not linked to XTEN, wherein the dose of CFXTEN fusion protein required to arrest the bleeding episode is at least two-fold, or three-fold, or four-fold, or five-fold, or six-fold, or seven-fold, or eight-fold, or nine-fold, or 10-fold less in comparison to the amount of FVIII not linked to XTEN (or native FVIII) that must be administered to achieve hemostasis in a comparable subject. It will be understood by one of skill in the art that the amount of procoagulant administered to maintain hemostasis will depend on the severity of FVIII deficiency and/or the frequency or duration of bleeding.

[0329] A particular object of the present invention relates to use of CFXTEN with reduced binding by FVIII inhibitors that bind the A2 and/or C2 domains of Factor VIII as a drug. Such a drug is advantageously used for maintaining hemostasis in a patient suffering from haemophilia, wherein such patient has circulating FVIII inhibitors directed against the A2 domain and/or C2 domain of Factor VIII. In one embodiment, the invention provides a method of treatment, the method comprising the step of administering to the patient with a A2 domain-binding inhibitor a coagulation-effective amount of a CFXTEN fusion protein, wherein the CFXTEN exhibits at least 10%, or 20%, or 30%, or 40%, or 50%, or 60%, or 70%, or 80% or less binding to an inhibitor that binds the A2 domain of FVIII, compared to the FVIII not linked to XTEN or to native FVIII, and wherein the administration results in hemostasis. In another embodiment, the invention provides a method of treatment, the method comprising the step of administering to the patient with a C2 domain-binding inhibitor a coagulation-effective amount of a CFXTEN fusion protein, wherein the CFXTEN exhibits at least 10%, or 20%, or 30%, or 40%, or 50%, or 60%, or 70%, or 80% or less binding to an inhibitor that binds the C2 domain of FVIII, compared to the FVIII not linked to XTEN or to native FVIII, and wherein the administration results in hemostasis. The reduced binding of the subject CFXTEN can be assayed directly by ELISA that detects FVIII inhibitors, or measured indirectly by demonstration of reduced inhibition of FVIII activity of the CFXTEN compared to native FVIII in the presence of an inhibitor as measured by a factor VIII chromogenic test or one-step assay as described herein, or other suitable coagulation methods known in the art. Alternatively, the subject CFXTEN can be measured for reduced (or absence of) inhibition in the presence of known inhibitors by use of a modified Bethesda assay. According to a particular aspect of the present invention, a CFXTEN useful in the methods has reduced reactivity to one or more antibodies from Table 10, as well as naturally-occurring antibodies found in hemophilia patients. For testing purposes, such and other inhibitory antibodies can be obtained from humans (i.e. from the serum of patients which have inhibitory antibodies) or can be obtained from mice, guinea pigs, horses, goats, non-human primates and other mammals by immunization with FVIII, or fragments thereof, more particularly with a fragment comprising the all or part of the A2 or C2 domain, whether in polyclonal or monoclonal form.

[0330] The invention further contemplates that the CFXTEN used in accordance with the methods provided herein can be administered in conjunction with other treatment methods and compositions (e.g., other coagulation proteins) useful for treating factor VIII-related conditions, or conditions for which coagulation factor is adjunctive therapy; e.g., bleeding episodes due to injury or surgery.

[0331] In another aspect, the invention provides methods of preparing a drug for a factor VIII-related condition, comprising combining a factor VIII sequence selected from Table 1 with one or more XTEN selected from Table 4 inserted in one or more insertion sites selected from Table 5, Table 6, Table 7, Table 8, and Table 9 to result in a drug that retains at least a portion of the activity of the native FVIII. The invention provides a method of preparing a pharmaceutical composition, comprising the step of combining the drug of the foregoing embodiment with at least one pharmaceutically acceptable carrier. In one embodiment of the method of preparing a drug for a factor VIII-related condition, the factor VIII has a sequence with at least about 80%, or at least about 90%, or at least about 95%, or at least about 97%, or at least about 99% sequence identity compared to a sequence selected from Table 1 and the one or more XTEN has a sequence with at least about 80%, or at least about 90%, or at least about 95%, or at least about 97%, or at least about 99% sequence identity compared to a sequence selected from any one of Tables 3, 4, and 13-17, or a fragment thereof, wherein the one or more XTEN are inserted in one or more locations selected from Table 5, Table 6, Table 7, Table 8, and Table 9. In a particular embodiment of the foregoing, at least one XTEN insertion site is selected from amino acids 32, 220, 224, 336, 339, 390, 399, 416, 603, 1656, 1711, 1725, 1905 and 1910 (numbered relative to mature native human FVIII). In another embodiment of the method, the CFXTEN comprises a sequence with at least about 80%, or at least about 90%, or at least about 95%, or at least about 97%, or at least about 99% sequence identity compared to a sequence selected from any one of Table 21.

[0332] In another aspect, the invention provides a method of making the CFXTEN compositions to achieve desired pharmacokinetic, pharmacologic or pharmaceutical properties. In general, the steps in the design and production of the inventive fusion protein compositions, as illustrated in FIGS. 11-13, include: (1) the selection of a FVIII (e.g., native proteins, sequences of Table 1, analogs or derivatives with activity) to treat the particular condition; (2) selecting one or more XTEN (e.g., sequences with at least 80% identity to sequences set forth in Table 4) that will confer the desired pharmacokinetic and physicochemical characteristics on the resulting CFXTEN (e.g., the administration of the CFXTEN composition to a subject results in the fusion protein being maintained above 0.05-0.4 IU/ml for a greater period compared to FVIII not linked to XTEN); (3) establishing a desired N- to C-terminus configuration of the CFXTEN to achieve the desired efficacy or PK parameters (e.g., selecting one or more insertion sites from Table 5, Table 6, Table 7, Table 8, and Table 9); (4) establishing the design of the expression vector encoding the configured CFXTEN; (5) transforming a suitable host with the expression vector; and (6) expressing and recovering the resultant isolated CFXTEN fusion protein. In one embodiment of the method of making CFXTEN, the XTEN for insertion are evaluated by the application of Equation IV to maximize the Ratio XTEN Radii for the fusion protein construct, with the XTEN resulting in values greater than 2.0, or 2.1, or 2.2, or 2.3, or 2.4, or 2.5, or 2.6, or 2.7, or 2.8, or 2.9. or 3.0 being preferred. For those CFXTEN for which an increase in half-life or an increased period of time spent above the minimum coagulation-effective concentration is desired, the XTEN chosen for incorporation generally have at least about 144, or about 288, or about 432, or about 576, or about 864, or about 875, or about 912, or about 923 amino acid residues where a single XTEN is to be incorporated into the CFXTEN. In another embodiment, the CFXTEN comprises a first XTEN of the foregoing lengths, and at least a second XTEN of about 36, or about 42, or about 72, or about 144, or about 288, or about 576, or about 864, or about 875, or about 912, or about 923, or about 1000 or more amino acid residues. The location of the XTEN within the fusion protein can include one, two, three, four, five or more locations selected from Table 5, Table 6, Table 7, Table 8, and Table 9 or FIGS. 8-9. In one embodiment, the method of design includes an insertion of XTEN into the FVIII of at least one site selected from amino acids 32, 220, 224, 336, 339, 390, 399, 416, 603, 1656, 1711, 1725, 1905 and 1910 (numbered relative to mature native human FVIII).

[0333] In another aspect, the invention provides methods of making CFXTEN compositions to improve ease of manufacture, result in increased stability, increased water solubility, and/or ease of formulation, as compared to the native FVIII. In one embodiment, the invention includes a method of increasing the water solubility of a FVIII comprising the step of linking the FVIII with at least about 80%, or about 90%, or about 95% identity to a sequence from Table 1 to one or more XTEN at one, two, three, four, five or more locations selected from Table 5, Table 6, Table 7, Table 8, and Table 9 or FIGS. 8-9 wherein the XTEN is a sequence with at least about 80%, or about 90%, or about 95% sequence identity compared to a sequence from any one of Tables 3, 4, and 13-17 such that a higher concentration in soluble form of the resulting CFXTEN can be achieved, under physiologic conditions, compared to the FVIII in an un-fused state. In a particular embodiment, the CFXTEN comprises a FVIII linked to two, three, four, or five XTEN having at least about 24, or about 36, or about 48, or about 60, or about 72, or about 84, or about 96, or about 144, or about 288 amino acid residues inserted at sites selected from Table 5, Table 6, Table 7, Table 8, and Table 9 or FIGS. 8-9, in which the solubility of the fusion protein under physiologic conditions is at least three-fold greater than the corresponding FVIII not linked to XTEN, or alternatively, at least four-fold, or five-fold, or six-fold, or seven-fold, or eight-fold, or nine-fold, or at least 10-fold, or at least 20-fold, or at least 30-fold, or at least 50-fold, or at least 60-fold or greater than FVIII not linked to XTEN. Factors that contribute to the property of XTEN to confer increased water solubility of CFs when incorporated into a fusion protein include the high solubility of the XTEN fusion partner and the low degree of self-aggregation between molecules of XTEN in solution, as well as expanding the hydrophilicity of FVIII external loops into which the XTEN is inserted. In some embodiments, the method results in a CFXTEN fusion protein wherein the water solubility is at least about 20%, or at least about 30% greater, or at least about 50% greater, or at least about 75% greater, or at least about 90% greater, or at least about 100% greater, or at least about 150% greater, or at least about 200% greater, or at least about 400% greater, or at least about 600% greater, or at least about 800% greater, or at least about 1000% greater, or at least about 2000% greater under physiologic conditions, compared to the un-fused FVIII. In one embodiment, the XTEN of the CFXTEN fusion protein is a sequence with at least about 80%, or about 90%, or about 95% sequence identity compared to a sequence from any one of Tables 3, 4, and 13-17. In another embodiment, the invention includes a method of increasing the shelf-life of a FVIII comprising the step of linking the FVIII with one or more XTEN at one or more sites selected from Table 5, Table 6, Table 7, Table 8, and Table 9, wherein the shelf-life of the resulting CFXTEN is extended compared to the FVIII in an un-fused state. As used herein, shelf-life refers to the period of time over which the procoagulant activity of a FVIII or CFXTEN that is in solution, lyophilized or in some other storage formulation remains stable without undue loss of activity or that remains within release specifications established for the pharmaceutical composition. A FVIII that degrades or aggregates generally has reduced functional activity or reduced bioavailability compared to one that remains in solution. Factors that contribute to the ability of the method to extend the shelf life of FVIII when incorporated into a fusion protein include increased water solubility, reduced self-aggregation in solution, and increased heat stability of the XTEN fusion partner. In particular, the low tendency of XTEN to aggregate facilitates methods of formulating pharmaceutical preparations containing higher drug concentrations of CFs, and the heat-stability of XTEN contributes to the property of CFXTEN fusion proteins to remain soluble and functionally active for extended periods. The method results in CFXTEN fusion proteins with prolonged or extended shelf-life that exhibit greater activity relative to a FVIII standard that has been subjected to the same storage and handling conditions. The standard may be the un-fused full-length FVIII or a commercially-available FVIII pharmaceutical composition. In one embodiment, the method includes the step of formulating the isolated CFXTEN with one or more pharmaceutically acceptable excipients that enhance the ability of the XTEN to retain its unstructured conformation and for the CFXTEN to remain soluble in the formulation for a time that is greater than that of the corresponding un-fused FVIII. In one embodiment, the method comprises linking a FVIII selected from Table 1 to one or more XTEN selected from any one of Tables 3, 4, and 13-17 inserted at one or more sites selected from Table 5, Table 6, Table 7, Table 8, and Table 9 and admixing with at least one pharmaceutically acceptable excipient to create a pharmaceutical composition that retains greater than about 100% of the procoagulant activity, or greater than about 105%, 110%, 120%, 130%, 150% or 200% of the procoagulant activity of a FVIII standard subjected to the same storage and handling conditions when compared at a time point of at least 90 days, or at least 6 months, or at least 12 months. Shelf-life may also be assessed in terms of functional activity remaining after storage, normalized to functional activity when storage began. In some embodiments, CFXTEN pharmaceutical compositions of the invention retain about 50% more procoagulant activity, or about 60%, 70%, 80%, or 90% more of the procoagulant activity of a FVIII standard when subjected to the same conditions for the same period of up to 2 weeks, or 4 weeks, or 6 weeks or longer under various temperature conditions. In one embodiment, the CFXTEN pharmaceutical composition retains at least about 50%, or about 60%, or at least about 70%, or at least about 80%, and most preferably at least about 90% or more of its original activity in solution when heated at 80° C. for 10 min. In another embodiment, the CFXTEN pharmaceutical composition retains at least about 50%, preferably at least about 60%, or at least about 70%, or at least about 80%, or alternatively at least about 90% or more of its original activity in solution when heated or maintained at 37° C. for about 7 days. In another embodiment, CFXTEN pharmaceutical composition retains at least about 80% or more of its functional activity after exposure to a temperature of about 30° C. to about 70° C. over a period of time of about one hour to about 18 hours. In the foregoing embodiments hereinabove described in this paragraph, the retained activity of the CFXTEN pharmaceutical compositions is at least about two-fold, or at least about three-fold, or at least about four-fold, or at least about five-fold, or at least about six-fold greater at a given time point than that of a corresponding pharmaceutical composition comprising FVIII not linked to the XTEN.

### VII). The Nucleic Acids Sequences of the Invention

[0334] The present invention provides isolated polynucleic acids encoding CFXTEN chimeric fusion proteins and sequences complementary to polynucleic acid molecules encoding CFXTEN chimeric fusion proteins, including homologous variants thereof. In another aspect, the invention encompasses methods to produce polynucleic acids encoding CFXTEN chimeric fusion proteins and sequences complementary to polynucleic acid molecules encoding CFXTEN chimeric fusion protein, including homologous variants thereof. In general, and as illustrated in FIGS. 11-13, the methods of producing a polynucleotide sequence coding for a CFXTEN fusion protein and expressing the resulting gene product include assembling nucleotides encoding FVIII and XTEN, ligating the components in frame, incorporating the encoding gene into an expression vector appropriate for a host cell, transforming the appropriate host cell with the expression vector, and culturing the host cell under conditions causing or permitting the fusion protein to be expressed in the transformed host cell, thereby producing the biologically-active CFXTEN polypeptide, which is recovered as an isolated fusion protein by standard protein purification methods known in the art. Standard recombinant techniques in molecular biology is used to make the polynucleotides and expression vectors of the present invention.

[0335] In accordance with the invention, nucleic acid sequences that encode CFXTEN (or its complement) are used to generate recombinant DNA molecules that direct the expression of CFXTEN fusion proteins in appropriate host cells. For the purposes of the invention, nucleic acid encoding a signal peptide corresponding to that of native human FVIII (encoding MQIELSTCFFLCLLRFCFS (SEQ ID NO: 1611)) can be added to any of the encoding constructs described herein to aid in the expression and secretion of the CFXTEN fusion protein. In one embodiment, the nucleic acid add is ATGCAAATAGAGCTCTCCACCTGCTTCTTTCTGTGCCTTTTGCGATTCTGCTTTAGT (SEQ ID NO: 1613), or the complement thereof.

[0336] Several cloning strategies are suitable for performing the present invention, many of which is used to generate a construct that comprises a gene coding for a fusion protein of the CFXTEN composition of the present invention, or its complement. In some embodiments, the cloning strategy is used to create a gene that encodes a monomeric CFXTEN that comprises at least a first FVIII and at least a first XTEN polypeptide, or their complement. In one embodiment of the foregoing, the gene comprises a sequence encoding a FVIII or sequence variant. In other embodiments, the cloning strategy is used to create a gene that encodes a monomeric CFXTEN that comprises nucleotides encoding at least a first molecule of FVIII or its complement and a first and at least a second XTEN or their complement that is used to transform a host cell for expression of the fusion protein of the CFXTEN composition. In the foregoing embodiments hereinabove described in this paragraph, the genes can further comprise nucleotides encoding spacer sequences that also encode cleavage sequence(s).

[0337] In designing a desired XTEN sequences, it was discovered that the non-repetitive nature of the XTEN of the inventive compositions is achieved despite use of a “building block” molecular approach in the creation of the XTEN-encoding sequences. This was achieved by the use of a library of polynucleotides encoding peptide sequence motifs, described above, that are then ligated and/or multimerized to create the genes encoding the XTEN sequences (see FIGS. 11 and 12 and Examples). Thus, while the XTEN(s) of the expressed fusion protein may consist of multiple units of as few as four different sequence motifs, because the motifs themselves consist of non-repetitive amino acid sequences, the overall XTEN sequence is rendered non-repetitive. Accordingly, in one embodiment, the XTEN-encoding polynucleotides comprise multiple polynucleotides that encode non-repetitive sequences, or motifs, operably linked in frame and in which the resulting expressed XTEN amino acid sequences are non-repetitive.

[0338] In one approach, a construct is first prepared containing the DNA sequence corresponding to CFXTEN fusion protein. DNA encoding the FVIII of the compositions is obtained synthetically, from a commercial source, or from a cDNA library prepared using standard methods from tissue or isolated cells believed to possess FVIII mRNA and to express it at a detectable level. If necessary, the coding sequence can be obtained using conventional primer extension procedures as described in Sambrook, et al., supra, to detect precursors and processing intermediates of mRNA that may not have been reverse-transcribed into cDNA. One can then use polymerase chain reaction (PCR) methodology to amplify the target DNA or RNA coding sequence to obtain sufficient material for the preparation of the CFXTEN constructs containing the FVIII gene. Assays can then be conducted to confirm that the hybridizing full-length genes are the desired FVIII gene(s). By these conventional methods, DNA can be conveniently obtained from a cDNA library prepared from such sources. The FVIII encoding gene(s) can also created by standard synthetic procedures known in the art (e.g., automated nucleic acid synthesis using, for example one of the methods described in Engels et al. (Agnew. Chem. Int. Ed. Engl., 28:716-734 1989)), using DNA sequences obtained from publicly available databases, patents, or literature references. Such procedures are well known in the art and well described in the scientific and patent literature. For example, sequences can be obtained from Chemical Abstracts Services (CAS) Registry Numbers (published by the American Chemical Society) and/or GenBank Accession Numbers (e.g., Locus I D, NP_XXXXX, and XP_XXXXX) Model Protein identifiers available through the National Center for Biotechnology Information (NCBI) webpage, available on the world wide web at ncbi.nlm.nih.gov that correspond to entries in the CAS Registry or GenBank database that contain an amino acid sequence of the protein of interest or of a fragment or variant of the protein. In one embodiment, the FVIII encoding gene encodes a protein sequence from Table 1, or a fragment or variant thereof.

[0339] A gene or polynucleotide encoding the FVIII portion of the subject CFXTEN protein, in the case of an expressed fusion protein that comprises a single FVIII, is then cloned into a construct, which is a plasmid or other vector under control of appropriate transcription and translation sequences for high level protein expression in a biological system. In a later step, a second gene or polynucleotide coding for the XTEN is genetically fused to the nucleotides encoding the N- and/or C-terminus of the FVIII gene by cloning it into the construct adjacent and in frame with the gene(s) coding for the FVIII. This second step occurs through a ligation or multimerization step. In the foregoing embodiments hereinabove described in this paragraph, it is to be understood that the gene constructs that are created can alternatively be the complement of the respective genes that encode the respective fusion proteins.

[0340] The gene encoding for the XTEN can be made in one or more steps, either fully synthetically or by synthesis combined with enzymatic processes, such as restriction enzyme-mediated cloning, PCR and overlap extension, including methods more fully described in the Examples. The methods disclosed herein can be used, for example, to ligate short sequences of polynucleotides encoding XTEN into longer XTEN genes of a desired length and sequence. In one embodiment, the method ligates two or more codon-optimized oligonucleotides encoding XTEN motif or segment sequences of about 9 to 14 amino acids, or about 12 to 20 amino acids, or about 18 to 42 amino acids, or about 42 to about 144 amino acids, or about 144 to about 288 amino acids, or 288 to about 864 amino acids or longer, or any combination of the foregoing ranges of motif or segment lengths.

[0341] Alternatively, the disclosed method is used to multimerize XTEN-encoding sequences into longer sequences of a desired length; e.g., a gene encoding 36 amino acids of XTEN can be dimerized into a gene encoding 72 amino acids, then 144, then 288, etc. Even with multimerization, XTEN polypeptides can be constructed such that the XTEN-encoding gene has low or virtually no repetitiveness through design of the codons selected for the motifs of the shortest unit being used, which can reduce recombination and increase stability of the encoding gene in the transformed host.

[0342] Genes encoding XTEN with non-repetitive sequences are assembled from oligonucleotides using standard techniques of gene synthesis. The gene design can be performed using algorithms that optimize codon usage and amino acid composition. In one method of the invention, a library of relatively short XTEN-encoding polynucleotide constructs is created and then assembled, as described above. The resulting genes are then assembled with genes encoding FVIII or regions of FVIII, as illustrated in FIGS. 11 and 12, and the resulting genes used to transform a host cell and produce and recover the CFXTEN for evaluation of its properties, as described herein.

[0343] In another aspect, the invention provides isolated nucleic acids comprising a polynucleotide sequence encoding the CFXTEN fusion protein embodiments described herein. In one embodiment, the isolated nucleic acid comprises a polynucleotide sequence selected from (a) a sequence having at least about 80% sequence identity, or about 90%, or about 91%, or about 92%, or about 93%, or about 94%, or about 95%, or about 96%, or about 97%, or about 98%, or about 99%, to about 100% sequence identity compared to a sequence of comparable length selected from Table 21, when optimally aligned, or (b) the complement of the polynucleotide of (a). In another embodiment, the isolated nucleic acid comprises the sequence ATGCAAATAGAGCTCTCCACCTGCTTCTTTCTGTGCCTTTTGCGATTCTGCTTTAGT (SEQ ID NO: 1613) linked to the 5′ end of the nucleic acid of (a) or the complement of the sequence linked to the 3′ end of (b).

[0344] Polynucleotide Libraries

[0345] In another aspect, the invention provides libraries of polynucleotides that encode XTEN sequences that are used to assemble genes that encode XTEN of a desired length and sequence.

[0346] In certain embodiments, the XTEN-encoding library constructs comprise polynucleotides that encode polypeptide segments of a fixed length. As an initial step, a library of oligonucleotides that encode motifs of 9-14 amino acid residues can be assembled. In a preferred embodiment, libraries of oligonucleotides that encode motifs of 12 amino acids are assembled.

[0347] The XTEN-encoding sequence segments can be dimerized or multimerized into longer encoding sequences, as depicted schematically in FIG. 13. Dimerization or multimerization can be performed by ligation, overlap extension, PCR assembly or similar cloning techniques known in the art. This process of can be repeated multiple times until the resulting XTEN-encoding sequences have reached the organization of sequence and desired length, providing the XTEN-encoding genes. As will be appreciated, a library of polynucleotides that encodes, e.g., 12 amino acid motifs can be dimerized and/or ligated into a library of polynucleotides that encode 36 amino acids. Libraries encoding motifs of different lengths; e.g., 9-14 amino acid motifs leading to libraries encoding 27 to 42 amino acids are contemplated by the invention. In turn, the library of polynucleotides that encode 27 to 42 amino acids, and preferably 36 amino acids (as described in the Examples) can be serially dimerized into a library containing successively longer lengths of polynucleotides that encode XTEN sequences of a desired length for incorporation into the gene encoding the CFXTEN fusion protein, as disclosed herein.

[0348] A more efficient way to optimize the DNA sequence encoding XTEN is based on combinatorial libraries. The gene encoding XTEN can be designed and synthesized in segment such that multiple codon versions are obtained for each segment. These segments can be randomly assembled into a library of genes such that each library member encodes the same amino acid sequences but library members comprise a large number of codon versions. Such libraries can be screened for genes that result in high-level expression and/or a low abundance of truncation products. The process of combinatorial gene assembly is illustrated in FIG. 18. The genes in FIG. 18 are assembled from 6 base fragments and each fragment is available in 4 different codon versions. This allows for a theoretical diversity of 4096.

[0349] In some embodiments, libraries are assembled of polynucleotides that encode amino acids that are limited to specific sequence XTEN families; e.g., the AD, AE, AF, AG, AM, or AQ sequences of Table 4. In other embodiments, libraries comprise sequences that encode two or more of the motif family sequences from Table 3. The names and sequences of representative, non-limiting polynucleotide sequences of libraries that encode 36mers are presented in Tables 13-17, and the methods used to create them are described more fully in the respective Examples. In other embodiments, libraries that encode XTEN are constructed from segments of polynucleotide codons linked in a randomized sequence that encode amino acids wherein at least about 80%, or at least about 90%, or at least about 91%, or at least about 92%, or at least about 93%, or at least about 94%, or at least about 95%, or at least about 97%, or at least about 98%, or at least about 99% of the codons are selected from the group consisting of condons for glycine (G), alanine (A), serine (S), threonine (T), glutamate (E) and proline (P) amino acids. The libraries can be used, in turn, for serial dimerization or ligation to achieve polynucleotide sequence libraries that encode XTEN sequences, for example, of 42, 48, 72, 144, 288, 576, 864, 875, 912, 923, 1318 amino acids, or up to a total length of about 3000 amino acids, as well as intermediate lengths, in which the encoded XTEN can have one or more of the properties disclosed herein, when expressed as a component of a CFXTEN fusion protein. In some cases, the polynucleotide library sequences may also include additional bases used as “sequencing islands,” described more fully below.

[0350] FIG. 14 is a schematic flowchart of representative, non-limiting steps in the assembly of a XTEN polynucleotide construct and a CFXTEN polynucleotide construct in the embodiments of the invention. Individual oligonucleotides 501 are annealed into sequence motifs 502 such as a 12 amino acid motif (“12-mer”), which is ligated to additional sequence motifs from a library to create a pool that encompasses the desired length of the XTEN 504, as well as ligated to a smaller concentration of an oligo containing BbsI, and KpnI restriction sites 503. The resulting pool of ligation products is gel-purified and the band with the desired length of XTEN is cut, resulting in an isolated XTEN gene with a stopper sequence 505. The XTEN gene is cloned into a stuffer vector. In this case, the vector encodes an optional CBD sequence 506 and a GFP gene 508. Digestion is than performed with BbsI/HindIII to remove 507 and 508 and place the stop codon. The resulting product is then cloned into a BsaI/HindIII digested vector containing a gene encoding the FVIII, resulting in the gene 500 encoding an FVIII-XTEN fusion protein.

[0351] One may clone the library of XTEN-encoding genes into one or more expression vectors known in the art. To facilitate the identification of well-expressing library members, one can construct the library as fusion to a reporter protein. Non-limiting examples of suitable reporter genes are green fluorescent protein, luciferace, alkaline phosphatase, and beta-galactosidase. By screening, one can identify short XTEN sequences that can be expressed in high concentration in the host organism of choice. Subsequently, one can generate a library of random XTEN dimers and repeat the screen for high level of expression. Subsequently, one can screen the resulting constructs for a number of properties such as level of expression, protease stability, or binding to antiserum.

[0352] One aspect of the invention is to provide polynucleotide sequences encoding the components of the fusion protein wherein the creation of the sequence has undergone codon optimization. Of particular interest is codon optimization with the goal of improving expression of the polypeptide compositions and to improve the genetic stability of the encoding gene in the production hosts. For example, codon optimization is of particular importance for XTEN sequences that are rich in glycine or that have very repetitive amino acid sequences. Codon optimization is performed using computer programs (Gustafsson, C., et al. (2004) Trends Biotechnol, 22: 346-53), some of which minimize ribosomal pausing (Coda Genomics Inc.). In one embodiment, one can perform codon optimization by constructing codon libraries where all members of the library encode the same amino acid sequence but where codon usage is varied. Such libraries can be screened for highly expressing and genetically stable members that are particularly suitable for the large-scale production of XTEN-containing products. When designing XTEN sequences one can consider a number of properties. One can minimize the repetitiveness in the encoding DNA sequences. In addition, one can avoid or minimize the use of codons that are rarely used by the production host (e.g. the AGG and AGA arginine codons and one leucine codon in E. coli). In the case of E. coli, two glycine codons, GGA and GGG, are rarely used in highly expressed proteins. Thus codon optimization of the gene encoding XTEN sequences can be very desirable. DNA sequences that have a high level of glycine tend to have a high GC content that can lead to instability or low expression levels. Thus, when possible, it is preferred to choose codons such that the GC-content of XTEN-encoding sequence is suitable for the production organism that will be used to manufacture the XTEN.

[0353] In one embodiment, polynucleotide libraries are constructed using the disclosed methods wherein all members of the library encode the same amino acid sequence but where codon usage for the respective amino acids in the sequence is varied or optimized for the intended host cell. Such libraries can be screened for highly expressing and genetically stable members that are particularly suitable for the large-scale production of XTEN-containing products. In one embodiment, the libraries are optimized for expression in a eukaryotic host cell.

[0354] Optionally, one can sequence clones in the library to eliminate isolates that contain undesirable sequences. The initial library of short XTEN sequences allows some variation in amino acid sequence. For instance one can randomize some codons such that a number of hydrophilic amino acids can occur in a particular position. During the process of iterative multimerization one can screen the resulting library members for other characteristics like solubility or protease resistance in addition to a screen for high-level expression.

[0355] Once the gene that encodes the XTEN of desired length and properties is selected, it is genetically fused at the desired location to the nucleotides encoding the FVIII gene(s) by cloning it into the construct adjacent and in frame with the gene coding for FVIII, or alternatively between nucleotides encoding adjacent domains of the FVIII, or alternatively within a sequence encoding a given FVIII domain, or alternatively in frame with nucleotides encoding a spacer/cleavage sequence linked to a terminal XTEN. The invention provides various permutations of the foregoing, depending on the CFXTEN to be encoded. For example, a gene encoding a CFXTEN fusion protein comprising a FVIII and two XTEN, such as embodied by formula VI, as depicted above, the gene would have polynucleotides encoding FVIII, encoding two XTEN, which can be identical or different in composition and sequence length. In one non-limiting embodiment of the foregoing, the FVIII polynucleotides would encode factor VIII and the polynucleotides encoding the C-terminus XTEN would encode an XTEN of 288 amino acids and the polynucleotides encoding an internal XTEN adjacent to the C-terminus of the A2 domain would encode an XTEN of 144 amino acids. The step of cloning the FVIII genes into the XTEN construct can occur through a ligation or multimerization step, as shown in FIG. 14. The constructs encoding CFXTEN fusion proteins can be designed in different configurations of the components XTEN, CF, and spacer sequences, such as the configurations of formulae I-VIII. In one embodiment, the construct comprises polynucleotide sequences complementary to, or those that encode a monomeric polypeptide of components in the following order (5′ to 3′) FVIII, an XTEN internal to the B domain, and a C-terminal XTEN. In another embodiment, the construct comprises polynucleotide sequences complementary to, or those that encode a monomeric polypeptide of components in the following order (5′ to 3′) FVIIII, spacer sequence linked to the C-terminus, and XTEN. The spacer polynucleotides can optionally comprise sequences encoding cleavage sequences. As will be apparent to those of skill in the art, multiple permutations of FVIII domains and inserted XTEN are possible.

[0356] Homology, sequence similarity or sequence identity of nucleotide or amino acid sequences may also be determined conventionally by using known software or computer programs such as the BestFit or Gap pairwise comparison programs (GCG Wisconsin Package, Genetics Computer Group, 575 Science Drive, Madison, Wis. 53711). BestFit uses the local homology algorithm of Smith and Waterman (Advances in Applied Mathematics. 1981. 2: 482-489), to find the best segment of identity or similarity between two sequences. Gap performs global alignments: all of one sequence with all of another similar sequence using the method of Needleman and Wunsch, (Journal of Molecular Biology. 1970. 48:443-453). When using a sequence alignment program such as BestFit, to determine the degree of sequence homology, similarity or identity, the default setting may be used, or an appropriate scoring matrix may be selected to optimize identity, similarity or homology scores.

[0357] Nucleic acid sequences that are “complementary” are those that are capable of base-pairing according to the standard Watson-Crick complementarity rules. As used herein, the term “complementary sequences” means nucleic acid sequences that are substantially complementary, as may be assessed by the same nucleotide comparison set forth above, or as defined as being capable of hybridizing to the polynucleotides that encode the CFXTEN sequences under stringent conditions, such as those described herein.

[0358] The resulting polynucleotides encoding the CFXTEN chimeric fusion proteins can then be individually cloned into an expression vector. The nucleic acid sequence is inserted into the vector by a variety of procedures. In general, DNA is inserted into an appropriate restriction endonuclease site(s) using techniques known in the art. Vector components generally include, but are not limited to, one or more of a signal sequence, an origin of replication, one or more marker genes, an enhancer element, a promoter, and a transcription termination sequence. Construction of suitable vectors containing one or more of these components employs standard ligation techniques which are known to the skilled artisan. Such techniques are well known in the art and well described in the scientific and patent literature.

[0359] Various vectors are publicly available. The vector may, for example, be in the form of a plasmid, cosmid, viral particle, or phage that may conveniently be subjected to recombinant DNA procedures, and the choice of vector will often depend on the host cell into which it is to be introduced. Thus, the vector may be an autonomously replicating vector, i.e., a vector, which exists as an extrachromosomal entity, the replication of which is independent of chromosomal replication, e.g., a plasmid. Alternatively, the vector may be one which, when introduced into a host cell, is integrated into the host cell genome and replicated together with the chromosome(s) into which it has been integrated. Representative plasmids are illustrated in FIG. 17, with encoding regions for different configurations of FVIII and XTEN components portrayed.

[0360] The invention provides for the use of plasmid vectors containing replication and control sequences that are compatible with and recognized by the host cell, and are operably linked to the CFXTEN gene for controlled expression of the CFXTEN fusion proteins. The vector ordinarily carries a replication site, as well as sequences that encode proteins that are capable of providing phenotypic selection in transformed cells. Such vector sequences are well known for a variety of bacteria, yeast, and viruses. Useful expression vectors that can be used include, for example, segments of chromosomal, non-chromosomal and synthetic DNA sequences. “Expression vector” refers to a DNA construct containing a DNA sequence that is operably linked to a suitable control sequence capable of effecting the expression of the DNA encoding the fusion protein in a suitable host. The requirements are that the vectors are replicable and viable in the host cell of choice. Low- or high-copy number vectors may be used as desired.

[0361] Other suitable vectors include, but are not limited to, derivatives of SV40 and pcDNA and known bacterial plasmids such as col EI, pCR1, pBR322, pMal-C2, pET, pGEX as described by Smith, et al., Gene 57:31-40 (1988), pMB9 and derivatives thereof, plasmids such as RP4, phage DNAs such as the numerous derivatives of phage I such as NM98 9, as well as other phage DNA such as M13 and filamentous single stranded phage DNA; yeast plasmids such as the 2 micron plasmid or derivatives of the 2m plasmid, as well as centomeric and integrative yeast shuttle vectors; vectors useful in eukaryotic cells such as vectors useful in insect or mammalian cells; vectors derived from combinations of plasmids and phage DNAs, such as plasmids that have been modified to employ phage DNA or the expression control sequences; and the like. Yeast expression systems that can also be used in the present invention include, but are not limited to, the non-fusion pYES2 vector (Invitrogen), the fusion pYESHisA, B, C (Invitrogen), pRS vectors and the like.

[0362] The control sequences of the vector include a promoter to effect transcription, an optional operator sequence to control such transcription, a sequence encoding suitable mRNA ribosome binding sites, and sequences that control termination of transcription and translation. The promoter may be any DNA sequence, which shows transcriptional activity in the host cell of choice and may be derived from genes encoding proteins either homologous or heterologous to the host cell.

[0363] Examples of suitable promoters for directing the transcription of the DNA encoding the FVIII polypeptide variant in mammalian cells are the SV40 promoter (Subramani et al., Mol. Cell. Biol. 1 (1981), 854-864), the MT-1 (metallothionein gene) promoter (Palmiter et al., Science 222 (1983), 809-814), the CMV promoter (Boshart et al., Cell 41:521-530, 1985) or the adenovirus 2 major late promoter (Kaufman and Sharp, Mol. Cell. Biol, 2:1304-1319, 1982). The vector may also carry sequences such as UCOE (ubiquitous chromatin opening elements).

[0364] Examples of suitable promoters for use in filamentous fungus host cells are, for instance, the ADH3 promoter or the tpiA promoter. Examples of other useful promoters are those derived from the gene encoding A. oryzae TAKA amylase, Rhizomucor miehei aspartic proteinase, A. niger neutral α-amylase, A. niger acid stable α-amylase, A. niger or A. awamoriglucoamylase (gluA), Rhizomucor miehei lipase, A. oryzae alkaline protease, A. oryzae triose phosphate isomerase or A. nidulans acetamidase. Preferred are the TAKA-amylase and gluA promoters.

[0365] Promoters suitable for use in expression vectors with prokaryotic hosts include the β-lactamase and lactose promoter systems [Chang et al., Nature, 275:615 (1978); Goeddel et al., Nature, 281:544 (1979)], alkaline phosphatase, a tryptophan (trp) promoter system [Goeddel, Nucleic Acids Res., 8:4057 (1980); EP 36,776], and hybrid promoters such as the tac promoter [deBoer et al., Proc. Natl. Acad. Sci. USA, 80:21-25 (1983)], all is operably linked to the DNA encoding CFXTEN polypeptides. Promoters for use in bacterial systems can also contain a Shine-Dalgarno (S.D.) sequence, operably linked to the DNA encoding CFXTEN polypeptides.

[0366] The invention contemplates use of other expression systems including, for example, a baculovirus expression system with both non-fusion transfer vectors, such as, but not limited to pVL941 Summers, et al., Virology 84:390-402 (1978)), pVL1393 (Invitrogen), pVL1392 (Summers, et al., Virology 84:390-402 (1978) and Invitrogen) and pBlueBacIII (Invitrogen), and fusion transfer vectors such as, but not limited to, pAc7 00 (Summers, et al., Virology 84:390-402 (1978)), pAc701 and pAc70-2 (same as pAc700, with different reading frames), pAc360 Invitrogen) and pBlueBacHisA, B, C (; Invitrogen) can be used.

[0367] Examples of suitable promoters for directing the transcription of the DNA encoding the FVIII polypeptide variant in mammalian cells are the CMV promoter (Boshart et al., Cell 41:521-530, 1985), the SV40 promoter (Subramani et al., Mol. Cell. Biol. 1 (1981), 854-864), the MT-1 (metallothionein gene) promoter (Palmiter et al., Science 222 (1983), 809-814), the adenovirus 2 major late promoter (Kaufman and Sharp, Mol. Cell. Biol, 2:1304-1319, 1982). The vector may also carry sequences such as UCOE (ubiquitous chromatin opening elements).

[0368] The DNA sequences encoding the CFXTEN may also, if necessary, be operably connected to a suitable terminator, such as the hGH terminator (Palmiter et al., Science 222, 1983, pp. 809-814) or the TPI1 terminators (Alber and Kawasaki, J. Mol. Appl. Gen. 1, 1982, pp. 419-434) or ADH3 (McKnight et al., The EMBO J. 4, 1985, pp. 2093-2099). Expression vectors may also contain a set of RNA splice sites located downstream from the promoter and upstream from the insertion site for the CFXTEN sequence itself, including splice sites obtained from adenovirus. Also contained in the expression vectors is a polyadenylation signal located downstream of the insertion site. Particularly preferred polyadenylation signals include the early or late polyadenylation signal from SV40 (Kaufman and Sharp, ibid.), the polyadenylation signal from the adenovirus 5 Elb region, the hGH terminator (DeNoto et al. Nucl. Acids Res. 9:3719-3730, 1981). The expression vectors may also include a noncoding viral leader sequence, such as the adenovirus 2 tripartite leader, located between the promoter and the RNA splice sites; and enhancer sequences, such as the SV40 enhancer.

[0369] To direct the CFXTEN of the present invention into the secretory pathway of the host cells, a secretory signal sequence (a.k.a., a leader sequence, a prepro sequence, or a pre sequence) may be included in the recombinant vector. The secretory signal sequence is operably linked to the DNA sequences encoding the CFXTEN, usually positioned 5′ to the DNA sequence encoding the CFXTEN fusion protein. The secretory signal sequence may be that, normally associated with the native FVIII protein or may be from a gene encoding another secreted protein. Non-limiting examples include OmpA, PhoA, and DsbA for E. coli expression, ppL-alpha, DEX4, invertase signal peptide, acid phosphatase signal peptide, CPY, or INU1 for yeast expression, and IL2L, SV40, IgG kappa and IgG lambda for mammalian expression. Signal sequences are typically proteolytically removed from the protein during the translocation and secretion process, generating a defined N-terminus. Methods are disclosed in Arnau, et al., Protein Expression and Purification 48: 1-13 (2006).

[0370] The procedures used to ligate the DNA sequences coding for the CFXTEN, the promoter and optionally the terminator and/or secretory signal sequence, respectively, and to insert them into suitable vectors containing the information necessary for replication, are well known to persons skilled in the art (cf., for instance, Sambrook, J. et al., “Molecular Cloning: A Laboratory Manual,” 3^{rd} edition, Cold Spring Harbor Laboratory Press, 2001). In this manner, a chimeric DNA molecule coding for a monomeric CFXTEN fusion protein is generated within the construct. Optionally, this chimeric DNA molecule may be transferred or cloned into another construct that is a more appropriate expression vector. At this point, a host cell capable of expressing the chimeric DNA molecule can be transformed with the chimeric DNA molecule.

[0371] Non-limiting examples of mammalian cell lines for use in the present invention are the COS-1 (ATCC CRL 1650), COS-7 (ATCC CRL 1651), BHK-21 (ATCC CCL 10)) and BHK-293 (ATCC CRL 1573; Graham et al., J. Gen. Virol. 36:59-72, 1977), BHK-570 cells (ATCC CRL 10314), CHO-K1 (ATCC CCL 61), CHO-S (Invitrogen 11619-012), and 293-F (Invitrogen R790-7), and the parental and derivative cell lines known in the art useful for expression of FVIII. A tk-ts13 BHK cell line is also available from the ATCC under accession number CRL 1632. In addition, a number of other cell lines may be used within the present invention, including Rat Hep I (Rat hepatoma; ATCC CRL 1600), Rat Hep II (Rat hepatoma; ATCC CRL 1548), TCMK (ATCC CCL 139), Human lung (ATCC HB 8065), NCTC 1469 (ATCC CCL 9.1), CHO (ATCC CCL 61) and DUKX cells (Urlaub and Chasin, Proc. Natl. Acad. Sci. USA 77:4216-4220, 1980).

[0372] Examples of suitable yeasts cells include cells of Saccharomyces spp. or Schizosaccharomyces spp., in particular strains of Saccharomyces cerevisiae or Saccharomyces kluyveri. Methods for transforming yeast cells with heterologous DNA and producing heterologous polypeptides there from are described, e.g. in U.S. Pat. Nos. 4,599,311, 4,931,373, 4,870,008, 5,037,743, and 4,845,075, all of which are hereby incorporated by reference. Transformed cells are selected by a phenotype determined by a selectable marker, commonly drug resistance or the ability to grow in the absence of a particular nutrient, e.g. leucine. A preferred vector for use in yeast is the POT1 vector disclosed in U.S. Pat. No. 4,931,373. The DNA sequences encoding the CFXTEN may be preceded by a signal sequence and optionally a leader sequence, e.g. as described above. Further examples of suitable yeast cells are strains of Kluyveromyces, such as K. lactis, Hansenula, e.g. H. polymorpha, or Pichia, e.g. P. pastoris (cf. Gleeson et al., J. Gen. Microbiol. 132, 1986, pp. 3459-3465; U.S. Pat. No. 4,882,279). Examples of other fungal cells are cells of filamentous fungi, e.g. Aspergillus spp., Neurospora spp., Fusarium spp. or Trichoderma spp., in particular strains of A. oryzae, A. nidulans or A. niger. The use of Aspergillus spp. for the expression of proteins is described in, e.g., EP 272 277, EP 238 023, EP 184 438 The transformation of F. oxysporum may, for instance, be carried out as described by Malardier et al., 1989, Gene 78: 147-156. The transformation of Trichoderma spp. may be performed for instance as described in EP 244 234.

[0373] Other suitable cells that can be used in the present invention include, but are not limited to, prokaryotic host cells strains such as Escherichia coli, (e.g., strain DH5-a), Bacillus subtilis, Salmonella typhimurium, or strains of the genera of Pseudomonas, Streptomyces and Staphylococcus. Non-limiting examples of suitable prokaryotes include those from the genera: Actinoplanes; Archaeoglobus; Bdellovibrio; Borrelia; Chloroflexus; Enterococcus; Escherichia; Lactobacillus; Listeria; Oceanobacillus; Paracoccus; Pseudomonas; Staphylococcus; Streptococcus; Streptomyces; Thermoplasma; and Vibrio.

[0374] Methods of transfecting mammalian cells and expressing DNA sequences introduced in the cells are described in e.g., Kaufman and Sharp, J. Mol. Biol. 159 (1982), 601-621; Southern and Berg, J. Mol. Appl. Genet. 1 (1982), 327-341; Loyter et al., Proc. Natl. Acad. Sci. USA 79 (1982), 422-426; Wigler et al., Cell 14 (1978), 725; Corsaro and Pearson, Somatic Cell Genetics 7 (1981), 603, Graham and van der Eb, Virology 52 (1973), 456; and Neumann et al., EMBO J. 1 (1982), 841-845.

[0375] Cloned DNA sequences are introduced into cultured mammalian cells by, for example, calcium phosphate-mediated transfection (Wigler et al., Cell 14:725-732, 1978; Corsaro and Pearson, Somatic Cell Genetics 7:603-616, 1981; Graham and Van der Eb, Virology 52d:456-467, 1973), transfection with many commercially available reagents such as FuGENEG Roche Diagnostics, Mannheim, Germany) or lipofectamine (Invitrogen) or by electroporation (Neumann et al., EMBO J. 1:841-845, 1982). To identify and select cells that express the exogenous DNA, a gene that confers a selectable phenotype (a selectable marker) is generally introduced into cells along with the gene or cDNA of interest. Preferred selectable markers include genes that confer resistance to drugs such as neomycin, hygromycin, puromycin, zeocin, and methotrexate. The selectable marker may be an amplifiable selectable marker. A preferred amplifiable selectable marker is a dihydrofolate reductase (DHFR) sequence. Further examples of selectable markers are well known to one of skill in the art and include reporters such as enhanced green fluorescent protein (EGFP), beta-galactosidase (β-gal) or chloramphenicol acetyltransferase (CAT). Selectable markers are reviewed by Thilly (Mammalian Cell Technology, Butterworth Publishers, Stoneham, Mass., incorporated herein by reference). The person skilled in the art will easily be able to choose suitable selectable markers. Any known selectable marker may be employed so long as it is capable of being expressed simultaneously with the nucleic acid encoding a gene product.

[0376] Selectable markers may be introduced into the cell on a separate plasmid at the same time as the gene of interest, or they may be introduced on the same plasmid. If, on the same plasmid, the selectable marker and the gene of interest may be under the control of different promoters or the same promoter, the latter arrangement producing a dicistronic message. Constructs of this type are known in the art (for example, Levinson and Simonsen, U.S. Pat. No. 4,713,339). It may also be advantageous to add additional DNA, known as “carrier DNA,” to the mixture that is introduced into the cells.

[0377] After the cells have taken up the DNA, they are grown in an appropriate growth medium, typically 1-2 days, to begin expressing the gene of interest. As used herein the term “appropriate growth medium” means a medium containing nutrients and other components required for the growth of cells and the expression of the CFXTEN of interest. Media generally include a carbon source, a nitrogen source, essential amino acids, essential sugars, vitamins, salts, phospholipids, protein and growth factors. For production of gamma-carboxylated proteins, the medium will contain vitamin K, preferably at a concentration of about 0.1 μg/ml to about 5 μg/ml. Drug selection is then applied to select for the growth of cells that are expressing the selectable marker in a stable fashion. For cells that have been transfected with an amplifiable selectable marker the drug concentration may be increased to select for an increased copy number of the cloned sequences, thereby increasing expression levels. Clones of stably transfected cells are then screened for expression of the FVIII polypeptide variant of interest.

[0378] The transformed or transfected host cell is then cultured in a suitable nutrient medium under conditions permitting expression of the CFXTEN polypeptide after which the resulting peptide may be recovered from the culture as an isolated fusion protein. The medium used to culture the cells may be any conventional medium suitable for growing the host cells, such as minimal or complex media containing appropriate supplements. Suitable media are available from commercial suppliers or may be prepared according to published recipes (e.g. in catalogues of the American Type Culture Collection). The culture conditions, such as temperature, pH and the like, are those previously used with the host cell selected for expression, and will be apparent to the ordinarily skilled artisan.

[0379] Gene expression may be measured in a sample directly, for example, by conventional Southern blotting, Northern blotting to quantitate the transcription of mRNA [Thomas, Proc. Natl. Acad. Sci. USA, 77:5201-5205 (1980)], dot blotting (DNA analysis), or in situ hybridization, using an appropriately labeled probe, based on the sequences provided herein. Alternatively, antibodies may be employed that can recognize specific duplexes, including DNA duplexes, RNA duplexes, and DNA-RNA hybrid duplexes or DNA-protein duplexes. The antibodies in turn may be labeled and the assay may be carried out where the duplex is bound to a surface, so that upon the formation of duplex on the surface, the presence of antibody bound to the duplex can be detected.

[0380] Gene expression, alternatively, may be measured by immunological of fluorescent methods, such as immunohistochemical staining of cells or tissue sections and assay of cell culture or body fluids or the detection of selectable markers, to quantitate directly the expression of gene product. Antibodies useful for immunohistochemical staining and/or assay of sample fluids may be either monoclonal or polyclonal, and may be prepared in any mammal. Conveniently, the antibodies may be prepared against a native sequence FVIII polypeptide or against a synthetic peptide based on the DNA sequences provided herein or against exogenous sequence fused to FVIII and encoding a specific antibody epitope. Examples of selectable markers are well known to one of skill in the art and include reporters such as enhanced green fluorescent protein (EGFP), beta-galactosidase (β-gal) or chloramphenicol acetyltransferase (CAT).

[0381] Expressed CFXTEN polypeptide product(s) may be purified via methods known in the art or by methods disclosed herein. Procedures such as gel filtration, affinity purification (e.g., using an anti-FVIII antibody column), salt fractionation, ion exchange chromatography, size exclusion chromatography, hydroxyapatite adsorption chromatography, hydrophobic interaction chromatography and gel electrophoresis may be used; each tailored to recover and purify the fusion protein produced by the respective host cells. Additional purification may be achieved by conventional chemical purification means, such as high performance liquid chromatography. Some expressed CFXTEN may require refolding during isolation and purification. Methods of purification are described in Robert K. Scopes, Protein Purification: Principles and Practice, Charles R. Castor (ed.), Springer-Verlag 1994, and Sambrook, et al., supra. Multi-step purification separations are also described in Baron, et al., Crit. Rev. Biotechnol. 10:179-90 (1990) and Below, et al., J. Chromatogr. A. 679:67-83 (1994). For therapeutic purposes it is preferred that the CFXTEN fusion proteins of the invention are substantially pure. Thus, in a preferred embodiment of the invention the CFXTEN of the invention is purified to at least about 90 to 95% homogeneity, preferably to at least about 98% homogeneity. Purity may be assessed by, e.g., gel electrophoresis, HPLC, and amino-terminal amino acid sequencing.

### VIII). Pharmaceutical Compositions

[0382] The present invention provides pharmaceutical compositions comprising CFXTEN. In one embodiment, the pharmaceutical composition comprises a CFXTEN fusion protein disclosed herein admixed with at least one pharmaceutically acceptable carrier. CFXTEN polypeptides of the present invention can be formulated according to known methods to prepare pharmaceutically useful compositions, whereby the polypeptide is combined in admixture with a pharmaceutically acceptable carrier vehicle, such as aqueous solutions, buffers, solvents and/or pharmaceutically acceptable suspensions, emulsions, stabilizers or excipients. Examples of non-aqueous solvents include propyl ethylene glycol, polyethylene glycol and vegetable oils. Formulations of the pharmaceutical compositions are prepared for storage by mixing the active CFXTEN ingredient having the desired degree of purity with optional physiologically acceptable carriers, excipients (e.g., sodium chloride, a calcium salt, sucrose, or polysorbate) or stabilizers (e.g., sucrose, trehalose, raffinose, arginine, a calcium salt, glycine or histidine), as described in Remington's Pharmaceutical Sciences 16th edition, Osol, A. Ed. (1980), in the form of lyophilized formulations or aqueous solutions.

[0383] The pharmaceutical composition may be supplied as a lyophilized powder to be reconstituted prior to administration. In another embodiment, the pharmaceutical composition may be supplied in a liquid form in a vial, the contents of which can be administered directly to a patient. Alternatively, the composition is supplied as a liquid in a pre-filled syringe for administration of the composition. In another embodiment, the composition is supplied as a liquid in a pre-filled vial that can be incorporated into a pump.

[0384] The pharmaceutical compositions can be administered by any suitable means or route, including subcutaneously, subcutaneously by infusion pump, intramuscularly, and intravenously. It will be appreciated that the preferred route will vary with the disease and age of the recipient, and the severity of the condition being treated.

[0385] In one embodiment, the CFXTEN pharmaceutical composition in liquid form or after reconstitution (when supplied as a lyophilized powder) comprises coagulation factor VIII with an activity of at least 50 IU/ml, or at least 100 IU/ml, or at least 200 IU/ml, or at least 300 IU/ml, or at least 400 IU/ml, or an activity of at least 500 IU/ml, or an activity of at least 600 IU/ml, which composition is capable of increasing factor VIII activity to at least 1.5% of the normal plasma level in the blood for at least about 12 hours, or at least about 24 hours, or at least about 48 hours, or at least about 72 hours, or at least about 96 hours, or at least about 120 hours after administration of the factor VIII pharmaceutical composition to a subject in need of routine prophylaxis. In another embodiment, the CFXTEN pharmaceutical composition in liquid form or after reconstitution (when supplied as a lyophilized powder) comprises coagulation factor VIII with an activity of at least 50 IU/ml, or at least 100 IU/ml, or at least 200 IU/ml, or at least 300 IU/ml, or at least 400 IU/ml, or at least 500 IU/ml, or an activity of at least 600 IU/ml, which composition is capable of increasing factor VIII activity to at least 2.5% of the normal plasma level in the blood for at least about 12 hours, or at least about 24 hours, or at least about 48 hours, or at least about 72 hours, or at least about 96 hours, or at least about 120 hours after administration to a subject in need of routine prophylaxis. It is specifically contemplated that the pharmaceutical compositions of the foregoing can be formulated to include one or more excipients, buffers or other ingredients known in the art to be compatible with administration by the intravenous route or the subcutaneous route or the intramuscular route. Thus, in the embodiments hereinabove described in this paragraph, the pharmaceutical composition is administered subcutaneously, intramuscularly or intravenously.

[0386] The compositions of the invention may be formulated using a variety of excipients. Suitable excipients include microcrystalline cellulose (e.g. Avicel PH102, Avicel PH101), polymethacrylate, poly(ethyl acrylate, methyl methacrylate, trimethylammonioethyl methacrylate chloride) (such as Eudragit RS-30D), hydroxypropyl methylcellulose (Methocel K100M, Premium CR Methocel K100M, Methocel E5, Opadry®), magnesium stearate, talc, triethyl citrate, aqueous ethylcellulose dispersion (Surelease®), and protamine sulfate. The slow release agent may also comprise a carrier, which can comprise, for example, solvents, dispersion media, coatings, antibacterial and antifungal agents, isotonic and absorption delaying agents. Pharmaceutically acceptable salts can also be used in these slow release agents, for example, mineral salts such as hydrochlorides, hydrobromides, phosphates, or sulfates, as well as the salts of organic acids such as acetates, proprionates, malonates, or benzoates. The composition may also contain liquids, such as water, saline, glycerol, and ethanol, as well as substances such as wetting agents, emulsifying agents, or pH buffering agents. Liposomes may also be used as a carrier.

[0387] In another embodiment, the compositions of the present invention are encapsulated in liposomes, which have demonstrated utility in delivering beneficial active agents in a controlled manner over prolonged periods of time. Liposomes are closed bilayer membranes containing an entrapped aqueous volume. Liposomes may also be unilamellar vesicles possessing a single membrane bilayer or multilamellar vesicles with multiple membrane bilayers, each separated from the next by an aqueous layer. The structure of the resulting membrane bilayer is such that the hydrophobic (non-polar) tails of the lipid are oriented toward the center of the bilayer while the hydrophilic (polar) heads orient towards the aqueous phase. In one embodiment, the liposome may be coated with a flexible water soluble polymer that avoids uptake by the organs of the mononuclear phagocyte system, primarily the liver and spleen. Suitable hydrophilic polymers for surrounding the liposomes include, without limitation, PEG, polyvinylpyrrolidone, polyvinylmethylether, polymethyloxazoline, polyethyloxazoline, polyhydroxypropyloxazoline, polyhydroxypropylmethacrylamide, polymethacrylamide, polydimethylacrylamide, polyhydroxypropylmethacrylate, polyhydroxethylacrylate, hydroxymethylcellulose hydroxyethylcellulose, polyethyleneglycol, polyaspartamide and hydrophilic peptide sequences as described in U.S. Pat. Nos. 6,316,024; 6,126,966; 6,056,973; 6,043,094, the contents of which are incorporated by reference in their entirety. Additional liposomal technologies are described in U.S. Pat. Nos. 6,759,057; 6,406,713; 6,352,716; 6,316,024; 6,294,191; 6,126,966; 6,056,973; 6,043,094; 5,965,156; 5,916,588; 5,874,104; 5,215,680; and 4,684,479, the contents of which are incorporated herein by reference. These describe liposomes and lipid-coated microbubbles, and methods for their manufacture. Thus, one skilled in the art, considering both the disclosure of this invention and the disclosures of these other patents could produce a liposome for the extended release of the polypeptides of the present invention.

[0388] For liquid formulations, a desired property is that the formulation be supplied in a form that can pass through a 25, 28, 30, 31, 32 gauge needle for intravenous, intramuscular, intraarticular, or subcutaneous administration.

[0389] Syringe pumps may also be used as slow release agents. Such devices are described in U.S. Pat. Nos. 4,976,696; 4,933,185; 5,017,378; 6,309,370; 6,254,573; 4,435,173; 4,398,908; 6,572,585; 5,298,022; 5,176,502; 5,492,534; 5,318,540; and 4,988,337, the contents of which are incorporated herein by reference. One skilled in the art, considering both the disclosure of this invention and the disclosures of these other patents could produce a syringe pump for the extended release of the compositions of the present invention.

### IX). Pharmaceutical Kits

[0390] In another aspect, the invention provides a kit to facilitate the use of the CFXTEN polypeptides. The kit comprises the pharmaceutical composition provided herein, a container and a label or package insert on or associated with the container. Suitable containers include, for example, bottles, vials, syringes, etc., formed from a variety of materials such as glass or plastic. The container holds a pharmaceutical composition as a formulation that is effective for beating the Pall-related condition and may have a sterile access port (for example the container may be an intravenous solution hag or a vial having a stopper pierceable by a hypodermic injection needle). The package insert can list the approved indications for the drug, instructions for the reconstitution and/or administration of the drug for the use for the approved indication, appropriate dosage and safety information, and information identifying the lot and expiration of the drug. In another embodiment of the foregoing, the kit can comprise a second container that can carry a suitable diluent for the pharmaceutical composition, the use of which will provide the user with the appropriate concentration to be delivered to the subject.

### EXAMPLES

### Example 1: Construction of XTEN_AD36 Motif Segments

[0391] The following example describes the construction of a collection of codon-optimized genes encoding motif sequences of 36 amino acids. As a first step, a stuffer vector pCW0359 was constructed based on a pET vector and that includes a T7 promoter. pCW0359 encodes a cellulose binding domain (CBD) and a TEV protease recognition site followed by a stuffer sequence that is flanked by BsaI, BbsI, and KpnI sites. The BsaI and BbsI sites were inserted such that they generate compatible overhangs after digestion. The stuffer sequence is followed by a truncated version of the GFP gene and a His tag. The stuffer sequence contains stop codons and thus E. coli cells carrying the stuffer plasmid pCW0359 form non-fluorescent colonies. The stuffer vector pCW0359 was digested with BsaI and KpnI to remove the stuffer segment and the resulting vector fragment was isolated by agarose gel purification. The sequences were designated XTEN_AD36, reflecting the AD family of motifs. Its segments have the amino acid sequence [X]₃ where X is a 12mer peptide with the sequences: GESPGGSSGSES (SEQ ID NO: 19), GSEGSSGPGESS (SEQ ID NO: 20), GSSESGSSEGGP (SEQ ID NO: 21), or GSGGEPSESGSS (SEQ ID NO: 22). The insert was obtained by annealing the following pairs of phosphorylated synthetic oligonucleotide pairs:

AD1for:

(SEQ ID NO: 1619)

AGGTGAATCTCCDGGTGGYTCYAGCGGTTCYGARTC
AD1rev:

(SEQ ID NO: 1620)

ACCTGAYTCRGAACCGCTRGARCCACCHGGAGATTC
AD2for:

(SEQ ID NO: 1621)

AGGTAGCGAAGGTTCTTCYGGTCCDGGYGARTCYTC
AD2rev:

(SEQ ID NO: 1622)

ACCTGARGAYTCRCCHGGACCRGAAGAACCTTCGCT
AD3for:

(SEQ ID NO: 1623)

AGGTTCYTCYGAAAGCGGTTCTTCYGARGGYGGTCC
AD3rev:

(SEQ ID NO: 1624)

ACCTGGACCRCCYTCRGAAGAACCGCTTTCRGARGA
AD4for:

(SEQ ID NO: 1625)

AGGTTCYGGTGGYGAACCDTCYGARTCTGGTAGCTC

[0392] We also annealed the phosphorylated oligonucleotide 3KpnIstopperFor: AGGTTCGTCTTCACTCGAGGGTAC (SEQ ID NO: 1626) and the non-phosphorylated oligonucleotide pr_3 KpnIstopperRev: CCTCGAGTGAAGACGA (SEQ ID NO: 1627). The annealed oligonucleotide pairs were ligated, which resulted in a mixture of products with varying length that represents the varying number of 12mer repeats ligated to one BbsI/KpnI segment. The products corresponding to the length of 36 amino acids were isolated from the mixture by preparative agarose gel electrophoresis and ligated into the BsaI/KpnI digested stuffer vector pCW0359. Most of the clones in the resulting library designated LCW0401 showed green fluorescence after induction, which shows that the sequence of XTEN_AD36 had been ligated in frame with the GFP gene and that most sequences of XTEN_AD36 had good expression levels.

[0393] We screened 96 isolates from library LCW0401 for high level of fluorescence by stamping them onto agar plate containing IPTG. The same isolates were evaluated by PCR and 48 isolates were identified that contained segments with 36 amino acids as well as strong fluorescence. These isolates were sequenced and 39 clones were identified that contained correct XTEN_AD36 segments. The file names of the nucleotide and amino acid constructs and the sequences for these segments are listed in Table 13.

TABLE 13
DNA and Amino Acid Sequences for AD 36-mer motifs (SEQ ID NOS 203-278,
respectively, in order of appearance)

| File name | Amino acid sequence | Nucleotide sequence |
|---|---|---|
| LCW0401_001_GFP- | GSGGEPSESGSSGESPGG | GGTTCTGGTGGCGAACCGTCCGAGTCTGGTAGCTCA |
| N_A01.ab1 | SSGSESGESPGGSSGSES | GGTGAATCTCCGGGTGGCTCTAGCGGTTCCGAGTCA |
| | | GGTGAATCTCCTGGTGGTTCCAGCGGTTCCGAGTCA |
| LCW0401_002_GFP- | GSEGSSGPGESSGESPGG | GGTAGCGAAGGTTCTTCTGGTCCTGGCGAGTCTTCA |
| N_B01.ab1 | SSGSESGSSESGSSEGGP | GGTGAATCTCCTGGTGGTTCCAGCGGTTCTGAATCA |
| | | GGTTCCTCCGAAAGCGGTTCTTCCGAGGGCGGTCCA |
| LCW0401_003_GFP- | GSSESGSSEGGPGSSESG | GGTTCCTCTGAAAGCGGTTCTTCCGAAGGTGGTCCA |
| N_C01.ab1 | SSEGGPGESPGGSSGSES | GGTTCCTCTGAAAGCGGTTCTTCTGAGGGTGGTCCA |
| | | GGTGAATCTCCGGGTGGCTCCAGCGGTTCCGAGTCA |
| LCW0401_004_GFP- | GSGGEPSESGSSGSSESG | GGTTCCGGTGGCGAACCGTCTGAATCTGGTAGCTCA |
| N_D01.ab1 | SSEGGPGSGGEPSESGSS | GGTTCTTCTGAAAGCGGTTCTTCCGAGGGTGGTCCA |
| | | GGTTCTGGTGGTGAACCTTCCGAGTCTGGTAGCTCA |
| LCW0401_007_GFP- | GSSESGSSEGGPGSEGSS | GGTTCTTCCGAAAGCGGTTCTTCTGAGGGTGGTCCA |
| N_F01.ab1 | GPGESSGSEGSSGPGESS | GGTAGCGAAGGTTCTTCCGGTCCAGGTGAGTCTTCA |
| | | GGTAGCGAAGGTTCTTCTGGTCCTGGTGAATCTTCA |
| LCW0401_008_GFP- | GSSESGSSEGGPGESPGG | GGTTCCTCTGAAAGCGGTTCTTCCGAGGGTGGTCCA |
| N_G01.ab1 | SSGSESGSEGSSGPGESS | GGTGAATCTCCAGGTGGTTCCAGCGGTTCTGAGTCA |
| | | GGTAGCGAAGGTTCTTCTGGTCCAGGTGAATCCTCA |
| LCW0401_012_GFP- | GSGGEPSESGSSGSGGEP | GGTTCTGGTGGTGAACCGTCTGAGTCTGGTAGCTCA |
| N_H01.ab1 | SESGSSGSEGSSGPGESS | GGTTCCGGTGGCGAACCATCCGAATCTGGTAGCTCA |
| | | GGTAGCGAAGGTTCTTCCGGTCCAGGTGAGTCTTCA |
| LCW0401_015_GFP- | GSSESGSSEGGPGSEGSS | GGTTCTTCCGAAAGCGGTTCTTCCGAAGGCGGTCCA |
| N_A02.ab1 | GPGESSGESPGGSSGSES | GGTAGCGAAGGTTCTTCTGGTCCAGGCGAATCTTCA |
| | | GGTGAATCTCCTGGTGGCTCCAGCGGTTCTGAGTCA |
| LCW0401_016_GFP- | GSSESGSSEGGPGSSESG | GGTTCCTCCGAAAGCGGTTCTTCTGAGGGCGGTCCA |
| N_B02.ab1 | SSEGGPGSSESGSSEGGP | GGTTCCTCCGAAAGCGGTTCTTCCGAGGGCGGTCCA |
| | | GGTTCTTCTGAAAGCGGTTCTTCCGAGGGCGGTCCA |
| LCW0401_020_GFP- | GSGGEPSESGSSGSEGSS | GGTTCCGGTGGCGAACCGTCCGAATCTGGTAGCTCA |
| N_E02.ab1 | GPGESSGSSESGSSEGGP | GGTAGCGAAGGTTCTTCTGGTCCAGGCGAATCTTCA |
| | | GGTTCCTCTGAAAGCGGTTCTTCTGAGGGCGGTCCA |
| LCW0401_022_GFP- | GSGGEPSESGSSGSSESG | GGTTCTGGTGGTGAACCGTCCGAATCTGGTAGCTCA |
| N_F02.ab1 | SSEGGPGSGGEPSESGSS | GGTTCTTCCGAAAGCGGTTCTTCTGAAGGTGGTCCA |
| | | GGTTCCGGTGGCGAACCTTCTGAATCTGGTAGCTCA |
| LCW0401_024_GFP- | GSGGEPSESGSSGSSESG | GGTTCTGGTGGCGAACCGTCCGAATCTGGTAGCTCA |
| N_G02.ab1 | SSEGGPGESPGGSSGSES | GGTTCCTCCGAAAGCGGTTCTTCTGAAGGTGGTCCA |
| | | GGTGAATCTCCAGGTGGTTCTAGCGGTTCTGAATCA |
| LCW0401_026_GFP- | GSGGEPSESGSSGESPGG | GGTTCTGGTGGCGAACCGTCTGAGTCTGGTAGCTCA |
| N_H02.ab1 | SSGSESGSEGSSGPGESS | GGTGAATCTCCTGGTGGCTCCAGCGGTTCTGAATCA |
| | | GGTAGCGAAGGTTCTTCTGGTCCTGGTGAATCTTCA |
| LCW0401_027_GFP- | GSGGEPSESGSSGESPGG | GGTTCCGGTGGCGAACCTTCCGAATCTGGTAGCTCA |
| N_A03.ab1 | SSGSESGSGGEPSESGSS | GGTGAATCTCCGGGTGGTTCTAGCGGTTCTGAGTCA |
| | | GGTTCTGGTGGTGAACCTTCCGAGTCTGGTAGCTCA |
| LCW0401_028_GFP- | GSSESGSSEGGPGSSESG | GGTTCCTCTGAAAGCGGTTCTTCTGAGGGCGGTCCA |
| N_B03.ab1 | SSEGGPGSSESGSSEGGP | GGTTCTTCCGAAAGCGGTTCTTCCGAGGGCGGTCCA |
| | | GGTTCTTCCGAAAGCGGTTCTTCTGAAGGCGGTCCA |
| LCW0401_030_GFP- | GESPGGSSGSESGSEGSS | GGTGAATCTCCGGGTGGCTCCAGCGGTTCTGAGTCA |
| N_C03.ab1 | GPGESSGSEGSSGPGESS | GGTAGCGAAGGTTCTTCCGGTCCGGGTGAGTCCTCA |
| | | GGTAGCGAAGGTTCTTCCGGTCCTGGTGAGTCTTCA |
| LCW0401_031_GFP- | GSGGEPSESGSSGSGGEP | GGTTCTGGTGGCGAACCTTCCGAATCTGGTAGCTCA |
| N_D03.ab1 | SESGSSGSSESGSSEGGP | GGTTCCGGTGGTGAACCTTCTGAATCTGGTAGCTCA |
| | | GGTTCTTCTGAAAGCGGTTCTTCCGAGGGCGGTCCA |
| LCW0401_033_GFP- | GSGGEPSESGSSGSGGEP | GGTTCCGGTGGTGAACCTTCTGAATCTGGTAGCTCA |
| N_E03.ab1 | SESGSSGSGGEPSESGSS | GGTTCCGGTGGCGAACCATCCGAGTCTGGTAGCTCA |
| | | GGTTCCGGTGGTGAACCATCCGAGTCTGGTAGCTCA |
| LCW0401_037_GFP- | GSGGEPSESGSSGSSESG | GGTTCCGGTGGCGAACCTTCTGAATCTGGTAGCTCA |
| N_F03.ab1 | SSEGGPGSEGSSGPGESS | GGTTCCTCCGAAAGCGGTTCTTCTGAGGGCGGTCCA |
| | | GGTAGCGAAGGTTCTTCTGGTCCGGGCGAGTCTTCA |
| LCW0401_038_GFP- | GSGGEPSESGSSGSEGSS | GGTTCCGGTGGTGAACCGTCCGAGTCTGGTAGCTCA |
| N_G03.ab1 | GPGESSGSGGEPSESGSS | GGTAGCGAAGGTTCTTCTGGTCCGGGTGAGTCTTCA |
| | | GGTTCTGGTGGCGAACCGTCCGAATCTGGTAGCTCA |
| LCW0401_039_GFP- | GSGGEPSESGSSGESPGG | GGTTCTGGTGGCGAACCGTCCGAATCTGGTAGCTCA |
| N_H03.ab1 | SSGSESGSGGEPSESGSS | GGTGAATCTCCTGGTGGTTCCAGCGGTTCCGAGTCA |
| | | GGTTCTGGTGGCGAACCTTCCGAATCTGGTAGCTCA |
| LCW0401_040_GFP- | GSSESGSSEGGPGSGGEP | GGTTCTTCCGAAAGCGGTTCTTCCGAGGGCGGTCCA |
| N_A04.ab1 | SESGSSGSSESGSSEGGP | GGTTCCGGTGGTGAACCATCTGAATCTGGTAGCTCA |
| | | GGTTCTTCTGAAAGCGGTTCTTCTGAAGGTGGTCCA |
| LCW0401_042_GFP- | GSEGSSGPGESSGESPGG | GGTAGCGAAGGTTCTTCCGGTCCTGGTGAGTCTTCA |
| N_C04.ab1 | SSGSESGSEGSSGPGESS | GGTGAATCTCCAGGTGGCTCTAGCGGTTCCGAGTCA |
| | | GGTAGCGAAGGTTCTTCTGGTCCTGGCGAGTCCTCA |
| LCW0401_046_GFP- | GSSESGSSEGGPGSSESG | GGTTCCTCTGAAAGCGGTTCTTCCGAAGGCGGTCCA |
| N_D04.ab1 | SSEGGPGSSESGSSEGGP | GGTTCTTCCGAAAGCGGTTCTTCTGAGGGCGGTCCA |
| | | GGTTCCTCCGAAAGCGGTTCTTCTGAGGGTGGTCCA |
| LCW0401_047_GFP- | GSGGEPSESGSSGESPGG | GGTTCTGGTGGCGAACCTTCCGAGTCTGGTAGCTCA |
| N_E04.ab1 | SSGSESGESPGGSSGSES | GGTGAATCTCCGGGTGGTTCTAGCGGTTCCGAGTCA |
| | | GGTGAATCTCCGGGTGGTTCCAGCGGTTCTGAGTCA |
| LCW0401_051_GFP- | GSGGEPSESGSSGSEGSS | GGTTCTGGTGGCGAACCATCTGAGTCTGGTAGCTCA |
| N_F04.ab1 | GPGESSGESPGGSSGSES | GGTAGCGAAGGTTCTTCCGGTCCAGGCGAGTCTTCA |
| | | GGTGAATCTCCTGGTGGCTCCAGCGGTTCTGAGTCA |
| LCW0401_053_GFP- | GESPGGSSGSESGESPGG | GGTGAATCTCCTGGTGGTTCCAGCGGTTCCGAGTCA |
| N_H04.ab1 | SSGSESGESPGGSSGSES | GGTGAATCTCCAGGTGGCTCTAGCGGTTCCGAGTCA |
| | | GGTGAATCTCCTGGTGGTTCTAGCGGTTCTGAATCA |
| LCW0401_054_GFP- | GSEGSSGPGESSGSEGSS | GGTAGCGAAGGTTCTTCCGGTCCAGGTGAATCTTCA |
| N_A05.ab1 | GPGESSGSGGEPSESGSS | GGTAGCGAAGGTTCTTCTGGTCCTGGTGAATCCTCA |
| | | GGTTCCGGTGGCGAACCATCTGAATCTGGTAGCTCA |
| LCW0401_059_GFP- | GSGGEPSESGSSGSEGSS | GGTTCTGGTGGCGAACCATCCGAATCTGGTAGCTCA |
| N_D05.ab1 | GPGESSGESPGGSSGSES | GGTAGCGAAGGTTCTTCTGGTCCTGGCGAATCTTCA |
| | | GGTGAATCTCCAGGTGGCTCTAGCGGTTCCGAATCA |
| LCW0401_060_GFP- | GSGGEPSESGSSGSSESG | GGTTCCGGTGGTGAACCGTCCGAATCTGGTAGCTCA |
| N_E05.ab1 | SSEGGPGSGGEPSESGSS | GGTTCCTCTGAAAGCGGTTCTTCCGAGGGTGGTCCA |
| | | GGTTCCGGTGGTGAACCTTCTGAGTCTGGTAGCTCA |
| LCW0401_061_GFP- | GSSESGSSEGGPGSGGEP | GGTTCCTCTGAAAGCGGTTCTTCTGAGGGCGGTCCA |
| N_F05.ab1 | SESGSSGSEGSSGPGESS | GGTTCTGGTGGCGAACCATCTGAATCTGGTAGCTCA |
| | | GGTAGCGAAGGTTCTTCCGGTCCGGGTGAATCTTCA |
| LCW0401_063_GFP- | GSGGEPSESGSSGSEGSS | GGTTCTGGTGGTGAACCGTCCGAATCTGGTAGCTCA |
| N_H05.ab1 | GPGESSGSEGSSGPGESS | GGTAGCGAAGGTTCTTCTGGTCCTGGCGAGTCTTCA |
| | | GGTAGCGAAGGTTCTTCTGGTCCTGGTGAATCTTCA |
| LCW0401_066_GFP- | GSGGEPSESGSSGSSESG | GGTTCTGGTGGCGAACCATCCGAGTCTGGTAGCTCA |
| N_B06.ab1 | SSEGGPGSGGEPSESGSS | GGTTCTTCCGAAAGCGGTTCTTCCGAAGGCGGTCCA |
| | | GGTTCTGGTGGTGAACCGTCCGAATCTGGTAGCTCA |
| LCW0401_067_GFP- | GSGGEPSESGSSGESPGG | GGTTCCGGTGGCGAACCTTCCGAATCTGGTAGCTCA |
| N_C06.ab1 | SSGSESGESPGGSSGSES | GGTGAATCTCCGGGTGGTTCTAGCGGTTCCGAATCA |
| | | GGTGAATCTCCAGGTGGTTCTAGCGGTTCCGAATCA |
| LCW0401_069_GFP- | GSGGEPSESGSSGSGGEP | GGTTCCGGTGGTGAACCATCTGAGTCTGGTAGCTCA |
| N_D06.ab1 | SESGSSGESPGGSSGSES | GGTTCCGGTGGCGAACCGTCCGAGTCTGGTAGCTCA |
| | | GGTGAATCTCCGGGTGGTTCCAGCGGTTCCGAATCA |
| LCW0401_070_GFP- | GSEGSSGPGESSGSSESG | GGTAGCGAAGGTTCTTCTGGTCCGGGCGAATCCTCA |
| N_E06.ab1 | SSEGGPGSEGSSGPGESS | GGTTCCTCCGAAAGCGGTTCTTCCGAAGGTGGTCCA |
| | | GGTAGCGAAGGTTCTTCCGGTCCTGGTGAATCTTCA |
| LCW0401_078_GFP- | GSSESGSSEGGPGESPGG | GGTTCCTCTGAAAGCGGTTCTTCTGAAGGCGGTCCA |
| N_F06.ab1 | SSGSESGESPGGSSGSES | GGTGAATCTCCGGGTGGCTCCAGCGGTTCTGAATCA |
| | | GGTGAATCTCCTGGTGGCTCCAGCGGTTCCGAGTCA |
| LCW0401_079_GFP- | GSEGSSGPGESSGSEGSS | GGTAGCGAAGGTTCTTCTGGTCCAGGCGAGTCTTCA |
| N_G06.ab1 | GPGESSGSGGEPSESGSS | GGTAGCGAAGGTTCTTCCGGTCCTGGCGAGTCTTCA |
| | | GGTTCCGGTGGCGAACCGTCCGAATCTGGTAGCTCA |

### Example 2: Construction of XTEN_AE36 Segments

[0394] A codon library encoding XTEN sequences of 36 amino acid length was constructed. The XTEN sequence was designated XTEN_AE36. Its segments have the amino acid sequence [X]₃ where X is a 12mer peptide with the sequence: GSPAGSPTSTEE (SEQ ID NO: 23), GSEPATSGSETP (SEQ ID NO: 24), GTSESATPESGP (SEQ ID NO: 25), or GTSTEPSEGSAP (SEQ ID NO: 26). The insert was obtained by annealing the following pairs of phosphorylated synthetic oligonucleotide pairs:

AE1for:

(SEQ ID NO: 1628)

AGGTAGCCCDGCWGGYTCTCCDACYTCYACYGARGA
AE1rev:

(SEQ ID NO: 1629)

ACCTTCYTCRGTRGARGTHGGAGARCCWGCHGGGCT
AE2for:

(SEQ ID NO: 1630)

AGGTAGCGAACCKGCWACYTCYGGYTCTGARACYCC
AE2rev:

(SEQ ID NO: 1631)

ACCTGGRGTYTCAGARCCRGARGTWGCMGGTTCGCT
AE3for:

(SEQ ID NO: 1632)

AGGTACYTCTGAAAGCGCWACYCCKGARTCYGGYCC
AE3rev:

(SEQ ID NO: 1633)

ACCTGGRCCRGAYTCMGGRGTWGCGCTTTCAGARGT
AE4for:

(SEQ ID NO: 1634)

AGGTACYTCTACYGAACCKTCYGARGGYAGCGCWCC
AE4rev:

(SEQ ID NO: 1635)

ACCTGGWGCGCTRCCYTCRGAMGGTTCRGTAGARGT

[0395] We also annealed the phosphorylated oligonucleotide 3KpnIstopperFor: AGGTTCGTCTTCACTCGAGGGTAC (SEQ ID NO: 1626) and the non-phosphorylated oligonucleotide pr_3 KpnIstopperRev: CCTCGAGTGAAGACGA (SEQ ID NO: 1627). The annealed oligonucleotide pairs were ligated, which resulted in a mixture of products with varying length that represents the varying number of 12mer repeats ligated to one BbsI/KpnI segment. The products corresponding to the length of 36 amino acids were isolated from the mixture by preparative agarose gel electrophoresis and ligated into the BsaI/KpnI digested stuffer vector pCW0359. Most of the clones in the resulting library designated LCW0402 showed green fluorescence after induction which shows that the sequence of XTEN_AE36 had been ligated in frame with the GFP gene and most sequences of XTEN_AE36 show good expression.

[0396] We screened 96 isolates from library LCW0402 for high level of fluorescence by stamping them onto agar plate containing IPTG. The same isolates were evaluated by PCR and 48 isolates were identified that contained segments with 36 amino acids as well as strong fluorescence. These isolates were sequenced and 37 clones were identified that contained correct XTEN_AE36 segments. The file names of the nucleotide and amino acid constructs and the sequences for these segments are listed in Table 14.

TABLE 14
DNA and Amino Acid Sequences for AE 36-mer motifs (SEQ ID NOS 279-352,
respectively, in order of appearance)

| File name | Amino acid sequence | Nucleotide sequence |
|---|---|---|
| LCW0402_002_GFP- | GSPAGSPTSTEEGTSE | GGTAGCCCGGCAGGCTCTCCGACCTCTACTGAGGAA |
| N_A07.ab1 | SATPESGPGTSTEPSE | GGTACTTCTGAAAGCGCAACCCCGGAGTCCGGCCCA |
| | GSAP | GGTACCTCTACCGAACCGTCTGAGGGCAGCGCACCA |
| LCW0402_003_GFP- | GTSTEPSEGSAPGTST | GGTACTTCTACCGAACCGTCCGAAGGCAGCGCTCCA |
| N_B07.ab1 | EPSEGSAPGTSTEPSE | GGTACCTCTACTGAACCTTCCGAGGGCAGCGCTCCA |
| | GSAP | GGTACCTCTACCGAACCTTCTGAAGGTAGCGCACCA |
| LCW0402_004_GFP- | GTSTEPSEGSAPGTSE | GGTACCTCTACCGAACCGTCTGAAGGTAGCGCACCA |
| N_C07.ab1 | SATPESGPGTSESATP | GGTACCTCTGAAAGCGCAACTCCTGAGTCCGGTCCA |
| | ESGP | GGTACTTCTGAAAGCGCAACCCCGGAGTCTGGCCCA |
| LCW0402_005_GFP- | GTSTEPSEGSAPGTSE | GGTACTTCTACTGAACCGTCTGAAGGTAGCGCACCA |
| N_D07.ab1 | SATPESGPGTSESATP | GGTACTTCTGAAAGCGCAACCCCGGAATCCGGCCCA |
| | ESGP | GGTACCTCTGAAAGCGCAACCCCGGAGTCCGGCCCA |
| LCW0402_006_GFP- | GSEPATSGSETPGTSE | GGTAGCGAACCGGCAACCTCCGGCTCTGAAACCCCA |
| N_E07.ab1 | SATPESGPGSPAGSPT | GGTACCTCTGAAAGCGCTACTCCTGAATCCGGCCCA |
| | STEE | GGTAGCCCGGCAGGTTCTCCGACTTCCACTGAGGAA |
| LCW0402_008_GFP- | GTSESATPESGPGSEP | GGTACTTCTGAAAGCGCAACCCCTGAATCCGGTCCA |
| N_F07.ab1 | ATSGSETPGTSTEPSE | GGTAGCGAACCGGCTACTTCTGGCTCTGAGACTCCA |
| | GSAP | GGTACTTCTACCGAACCGTCCGAAGGTAGCGCACCA |
| LCW0402_009_GFP- | GSPAGSPTSTEEGSPA | GGTAGCCCGGCTGGCTCTCCAACCTCCACTGAGGAA |
| N_G07.ab1 | GSPTSTEEGSEPATSG | GGTAGCCCGGCTGGCTCTCCAACCTCCACTGAAGAA |
| | SETP | GGTAGCGAACCGGCTACCTCCGGCTCTGAAACTCCA |
| LCW0402_011_GFP- | GSPAGSPTSTEEGTSE | GGTAGCCCGGCTGGCTCTCCTACCTCTACTGAGGAA |
| N_A08.ab1 | SATPESGPGTSTEPSE | GGTACTTCTGAAAGCGCTACTCCTGAGTCTGGTCCA |
| | GSAP | GGTACCTCTACTGAACCGTCCGAAGGTAGCGCTCCA |
| LCW0402_012_GFP- | GSPAGSPTSTEEGSPA | GGTAGCCCTGCTGGCTCTCCGACTTCTACTGAGGAA |
| N_B08.ab1 | GSPTSTEEGTSTEPSE | GGTAGCCCGGCTGGTTCTCCGACTTCTACTGAGGAA |
| | GSAP | GGTACTTCTACCGAACCTTCCGAAGGTAGCGCTCCA |
| LCW0402_013_GFP- | GTSESATPESGPGTST | GGTACTTCTGAAAGCGCTACTCCGGAGTCCGGTCCA |
| N_C08.ab1 | EPSEGSAPGTSTEPSE | GGTACCTCTACCGAACCGTCCGAAGGCAGCGCTCCA |
| | GSAP | GGTACTTCTACTGAACCTTCTGAGGGTAGCGCTCCA |
| LCW0402_014_GFP- | GTSTEPSEGSAPGSPA | GGTACCTCTACCGAACCTTCCGAAGGTAGCGCTCCA |
| N_D08.ab1 | GSPTSTEEGTSTEPSE | GGTAGCCCGGCAGGTTCTCCTACTTCCACTGAGGAA |
| | GSAP | GGTACTTCTACCGAACCTTCTGAGGGTAGCGCACCA |
| LCW0402_015_GFP- | GSEPATSGSETPGSPA | GGTAGCGAACCGGCTACTTCCGGCTCTGAGACTCCA |
| N_E08.ab1 | GSPTSTEEGTSESATP | GGTAGCCCTGCTGGCTCTCCGACCTCTACCGAAGAA |
| | ESGP | GGTACCTCTGAAAGCGCTACCCCTGAGTCTGGCCCA |
| LCW0402_016_GFP- | GTSTEPSEGSAPGTSE | GGTACTTCTACCGAACCTTCCGAGGGCAGCGCACCA |
| N_F08.ab1 | SATPESGPGTSESATP | GGTACTTCTGAAAGCGCTACCCCTGAGTCCGGCCCA |
| | ESGP | GGTACTTCTGAAAGCGCTACTCCTGAATCCGGTCCA |
| LCW0402_020_GFP- | GTSTEPSEGSAPGSEP | GGTACTTCTACTGAACCGTCTGAAGGCAGCGCACCA |
| N_G08.ab1 | ATSGSETPGSPAGSPT | GGTAGCGAACCGGCTACTTCCGGTTCTGAAACCCCA |
| | STEE | GGTAGCCCAGCAGGTTCTCCAACTTCTACTGAAGAA |
| LCW0402_023_GFP- | GSPAGSPTSTEEGTSE | GGTAGCCCTGCTGGCTCTCCAACCTCCACCGAAGAA |
| N_A09.ab1 | SATPESGPGSEPATSG | GGTACCTCTGAAAGCGCAACCCCTGAATCCGGCCCA |
| | SETP | GGTAGCGAACCGGCAACCTCCGGTTCTGAAACCCCA |
| LCW0402_024_GFP- | GTSESATPESGPGSPA | GGTACTTCTGAAAGCGCTACTCCTGAGTCCGGCCCA |
| N_B09.ab1 | GSPTSTEEGSPAGSPT | GGTAGCCCGGCTGGCTCTCCGACTTCCACCGAGGAA |
| | STEE | GGTAGCCCGGCTGGCTCTCCAACTTCTACTGAAGAA |
| LCW0402_025_GFP- | GTSTEPSEGSAPGTSE | GGTACCTCTACTGAACCTTCTGAGGGCAGCGCTCCA |
| N_C09.ab1 | SATPESGPGTSTEPSE | GGTACTTCTGAAAGCGCTACCCCGGAGTCCGGTCCA |
| | GSAP | GGTACTTCTACTGAACCGTCCGAAGGTAGCGCACCA |
| LCW0402_026_GFP- | GSPAGSPTSTEEGTST | GGTAGCCCGGCAGGCTCTCCGACTTCCACCGAGGAA |
| N_D09.ab1 | EPSEGSAPGSEPATSG | GGTACCTCTACTGAACCTTCTGAGGGTAGCGCTCCA |
| | SETP | GGTAGCGAACCGGCAACCTCTGGCTCTGAAACCCCA |
| LCW0402_027_GFP- | GSPAGSPTSTEEGTST | GGTAGCCCAGCAGGCTCTCCGACTTCCACTGAGGAA |
| N_E09.ab1 | EPSEGSAPGTSTEPSE | GGTACTTCTACTGAACCTTCCGAAGGCAGCGCACCA |
| | GSAP | GGTACCTCTACTGAACCTTCTGAGGGCAGCGCTCCA |
| LCW0402_032_GFP- | GSEPATSGSETPGTSE | GGTAGCGAACCTGCTACCTCCGGTTCTGAAACCCCA |
| N_H09.ab1 | SATPESGPGSPAGSPT | GGTACCTCTGAAAGCGCAACTCCGGAGTCTGGTCCA |
| | STEE | GGTAGCCCTGCAGGTTCTCCTACCTCCACTGAGGAA |
| LCW0402_034_GFP- | GTSESATPESGPGTST | GGTACCTCTGAAAGCGCTACTCCGGAGTCTGGCCCA |
| N_A10.ab1 | EPSEGSAPGTSTEPSE | GGTACCTCTACTGAACCGTCTGAGGGTAGCGCTCCA |
| | GSAP | GGTACTTCTACTGAACCGTCCGAAGGTAGCGCACCA |
| LCW0402_036_GFP- | GSPAGSPTSTEEGTST | GGTAGCCCGGCTGGTTCTCCGACTTCCACCGAGGAA |
| N_C10.ab1 | EPSEGSAPGTSTEPSE | GGTACCTCTACTGAACCTTCTGAGGGTAGCGCTCCA |
| | GSAP | GGTACCTCTACTGAACCTTCCGAAGGCAGCGCTCCA |
| LCW0402_039_GFP- | GTSTEPSEGSAPGTST | GGTACTTCTACCGAACCGTCCGAGGGCAGCGCTCCA |
| N_E10.ab1 | EPSEGSAPGTSTEPSE | GGTACTTCTACTGAACCTTCTGAAGGCAGCGCTCCA |
| | GSAP | GGTACTTCTACTGAACCTTCCGAAGGTAGCGCACCA |
| LCW0402_040_GFP- | GSEPATSGSETPGTSE | GGTAGCGAACCTGCAACCTCTGGCTCTGAAACCCCA |
| N_F10.ab1 | SATPESGPGTSTEPSE | GGTACCTCTGAAAGCGCTACTCCTGAATCTGGCCCA |
| | GSAP | GGTACTTCTACTGAACCGTCCGAGGGCAGCGCACCA |
| LCW0402_041_GFP- | GTSTEPSEGSAPGSPA | GGTACTTCTACCGAACCGTCCGAGGGTAGCGCACCA |
| N_G10.ab1 | GSPTSTEEGTSTEPSE | GGTAGCCCAGCAGGTTCTCCTACCTCCACCGAGGAA |
| | GSAP | GGTACTTCTACCGAACCGTCCGAGGGTAGCGCACCA |
| LCW0402_050_GFP- | GSEPATSGSETPGTSE | GGTAGCGAACCGGCAACCTCCGGCTCTGAAACTCCA |
| N_A11.ab1 | SATPESGPGSEPATSG | GGTACTTCTGAAAGCGCTACTCCGGAATCCGGCCCA |
| | SETP | GGTAGCGAACCGGCTACTTCCGGCTCTGAAACCCCA |
| LCW0402_051_GFP- | GSEPATSGSETPGTSE | GGTAGCGAACCGGCAACTTCCGGCTCTGAAACCCCA |
| N_B11.ab1 | SATPESGPGSEPATSG | GGTACTTCTGAAAGCGCTACTCCTGAGTCTGGCCCA |
| | SETP | GGTAGCGAACCTGCTACCTCTGGCTCTGAAACCCCA |
| LCW0402_059_GFP- | GSEPATSGSETPGSEP | GGTAGCGAACCGGCAACCTCTGGCTCTGAAACTCCA |
| N_E11.ab1 | ATSGSETPGTSTEPSE | GGTAGCGAACCTGCAACCTCCGGCTCTGAAACCCCA |
| | GSAP | GGTACTTCTACTGAACCTTCTGAGGGCAGCGCACCA |
| LCW0402_060_GFP- | GTSESATPESGPGSEP | GGTACTTCTGAAAGCGCTACCCCGGAATCTGGCCCA |
| N_F11.ab1 | ATSGSETPGSEPATSG | GGTAGCGAACCGGCTACTTCTGGTTCTGAAACCCCA |
| | SETP | GGTAGCGAACCGGCTACCTCCGGTTCTGAAACTCCA |
| LCW0402_061_GFP- | GTSTEPSEGSAPGTST | GGTACCTCTACTGAACCTTCCGAAGGCAGCGCTCCA |
| N_G11.ab1 | EPSEGSAPGTSESATP | GGTACCTCTACCGAACCGTCCGAGGGCAGCGCACCA |
| | ESGP | GGTACTTCTGAAAGCGCAACCCCTGAATCCGGTCCA |
| LCW0402_065_GFP- | GSEPATSGSETPGTSE | GGTAGCGAACCGGCAACCTCTGGCTCTGAAACCCCA |
| N_A12.ab1 | SATPESGPGTSESATP | GGTACCTCTGAAAGCGCTACTCCGGAATCTGGTCCA |
| | ESGP | GGTACTTCTGAAAGCGCTACTCCGGAATCCGGTCCA |
| LCW0402_066_GFP- | GSEPATSGSETPGSEP | GGTAGCGAACCTGCTACCTCCGGCTCTGAAACTCCA |
| N_B12.ab1 | ATSGSETPGTSTEPSE | GGTAGCGAACCGGCTACTTCCGGTTCTGAAACTCCA |
| | GSAP | GGTACCTCTACCGAACCTTCCGAAGGCAGCGCACCA |
| LCW0402_067_GFP- | GSEPATSGSETPGTST | GGTAGCGAACCTGCTACTTCTGGTTCTGAAACTCCA |
| N_C12.ab1 | EPSEGSAPGSEPATSG | GGTACTTCTACCGAACCGTCCGAGGGTAGCGCTCCA |
| | SETP | GGTAGCGAACCTGCTACTTCTGGTTCTGAAACTCCA |
| LCW0402_069_GFP- | GTSTEPSEGSAPGTST | GGTACCTCTACCGAACCGTCCGAGGGTAGCGCACCA |
| N_D12.ab1 | EPSEGSAPGSEPATSG | GGTACCTCTACTGAACCGTCTGAGGGTAGCGCTCCA |
| | SETP | GGTAGCGAACCGGCAACCTCCGGTTCTGAAACTCCA |
| LCW0402_073_GFP- | GTSTEPSEGSAPGSEP | GGTACTTCTACTGAACCTTCCGAAGGTAGCGCTCCA |
| N_F12.ab1 | ATSGSETPGSPAGSPT | GGTAGCGAACCTGCTACTTCTGGTTCTGAAACCCCA |
| | STEE | GGTAGCCCGGCTGGCTCTCCGACCTCCACCGAGGAA |
| LCW0402_074_GFP- | GSEPATSGSETPGSPA | GGTAGCGAACCGGCTACTTCCGGCTCTGAGACTCCA |
| N_G12.ab1 | GSPTSTEEGTSESATP | GGTAGCCCAGCTGGTTCTCCAACCTCTACTGAGGAA |
| | ESGP | GGTACTTCTGAAAGCGCTACCCCTGAATCTGGTCCA |
| LCW0402_075_GFP- | GTSESATPESGPGSEP | GGTACCTCTGAAAGCGCAACTCCTGAGTCTGGCCCA |
| N_H12.ab1 | ATSGSETPGTSESATP | GGTAGCGAACCTGCTACCTCCGGCTCTGAGACTCCA |
| | ESGP | GGTACCTCTGAAAGCGCAACCCCGGAATCTGGTCCA |

### Example 3: Construction of XTEN_AF36 Segments

[0397] A codon library encoding sequences of 36 amino acid length was constructed. The sequences were designated XTEN_AF36. Its segments have the amino acid sequence [X]₃ where X is a 12mer peptide with the sequence: GSTSESPSGTAP (SEQ ID NO: 27), GTSTPESGSASP (SEQ ID NO: 28), GTSPSGESSTAP (SEQ ID NO: 29), or GSTSSTAESPGP (SEQ ID NO: 30). The insert was obtained by annealing the following pairs of phosphorylated synthetic oligonucleotide pairs:

AF1for:

(SEQ ID NO: 1636)

AGGTTCTACYAGCGAATCYCCKTCTGGYACYGCWCC
AF1rev:

(SEQ ID NO: 1637)

ACCTGGWGCRGTRCCAGAMGGRGATTCGCTRGTAGA
AF2for:

(SEQ ID NO: 1638)

AGGTACYTCTACYCCKGAAAGCGGYTCYGCWTCTCC
AF2rev:

(SEQ ID NO: 1639)

ACCTGGAGAWGCRGARCCGCTTTCMGGRGTAGARGT
AF3for:

(SEQ ID NO: 1640)

AGGTACYTCYCCKAGCGGYGAATCTTCTACYGCWCC
AF3rev:

(SEQ ID NO: 1641)

ACCTGGWGCRGTAGAAGATTCRCCGCTMGGRGARGT
AF4for:

(SEQ ID NO: 1642)

AGGTTCYACYAGCTCTACYGCWGAATCTCCKGGYCC
AF4rev:

(SEQ ID NO: 1643)

ACCTGGRCCMGGAGATTCWGCRGTAGAGCTRGTRGA

[0398] We also annealed the phosphorylated oligonucleotide 3KpnIstopperFor: AGGTTCGTCTTCACTCGAGGGTAC (SEQ ID NO: 1626) and the non-phosphorylated oligonucleotide pr_3 KpnIstopperRev: CCTCGAGTGAAGACGA (SEQ ID NO: 1627). The annealed oligonucleotide pairs were ligated, which resulted in a mixture of products with varying length that represents the varying number of 12mer repeats ligated to one BbsI/KpnI segment The products corresponding to the length of 36 amino acids were isolated from the mixture by preparative agarose gel electrophoresis and ligated into the BsaI/KpnI digested stuffer vector pCW0359. Most of the clones in the resulting library designated LCW0403 showed green fluorescence after induction which shows that the sequence of XTEN_AF36 had been ligated in frame with the GFP gene and most sequences of XTEN_AF36 show good expression.

[0399] We screened 96 isolates from library LCW0403 for high level of fluorescence by stamping them onto agar plate containing IPTG. The same isolates were evaluated by PCR and 48 isolates were identified that contained segments with 36 amino acids as well as strong fluorescence. These isolates were sequenced and 44 clones were identified that contained correct XTEN_AF36 segments. The file names of the nucleotide and amino acid constructs and the sequences for these segments are listed in Table 15.

TABLE 15
DNA and Amino Acid Sequences for AF 36-mer motifs (SEQ ID NOS 353-440,
respectively, in order of appearance)

| File name | Amino acid sequence | Nucleotide sequence |
|---|---|---|
| LCW0403_004_GFP- | GTSTPESGSASPGTSP | GGTACTTCTACTCCGGAAAGCGGTTCCGCATCTCCA |
| N_A01.ab1 | SGESSTAPGTSPSGES | GGTACTTCTCCTAGCGGTGAATCTTCTACTGCTCCAG |
| | STAP | GTACCTCTCCTAGCGGCGAATCTTCTACTGCTCCA |
| LCW0403_005_GFP- | GTSPSGESSTAPGSTS | GGTACTTCTCCGAGCGGTGAATCTTCTACCGCACCA |
| N_B01.ab1 | STAESPGPGTSPSGES | GGTTCTACTAGCTCTACCGCTGAATCTCCGGGCCCAG |
| | STAP | GTACTTCTCCGAGCGGTGAATCTTCTACTGCTCCA |
| LCW0403_006_GFP- | GSTSSTAESPGPGTSP | GGTTCCACCAGCTCTACTGCTGAATCTCCTGGTCCAG |
| N_C01.ab1 | SGESSTAPGTSTPESG | GTACCTCTCCTAGCGGTGAATCTTCTACTGCTCCAGG |
| | SASP | TACTTCTACTCCTGAAAGCGGCTCTGCTTCTCCA |
| LCW0403_007_GFP- | GSTSSTAESPGPGSTS | GGTTCTACCAGCTCTACTGCAGAATCTCCTGGCCCAG |
| N_D01.ab1 | STAESPGPGTSPSGES | GTTCCACCAGCTCTACCGCAGAATCTCCGGGTCCAG |
| | STAP | GTACTTCCCCTAGCGGTGAATCTTCTACCGCACCA |
| LCW0403_008_GFP- | GSTSSTAESPGPGTSP | GGTTCTACTAGCTCTACTGCTGAATCTCCTGGCCCAG |
| N_E01.ab1 | SGESSTAPGTSTPESG | GTACTTCTCCTAGCGGTGAATCTTCTACCGCTCCAGG |
| | SASP | TACCTCTACTCCGGAAAGCGGTTCTGCATCTCCA |
| LCW0403_010_GFP- | GSTSSTAESPGPGTST | GGTTCTACCAGCTCTACCGCAGAATCTCCTGGTCCAG |
| N_F01.ab1 | PESGSASPGSTSESPS | GTACCTCTACTCCGGAAAGCGGCTCTGCATCTCCAG |
| | GTAP | GTTCTACTAGCGAATCTCCTTCTGGCACTGCACCA |
| LCW0403_011_GFP- | GSTSSTAESPGPGTST | GGTTCTACTAGCTCTACTGCAGAATCTCCTGGCCCAG |
| N_G01.ab1 | PESGSASPGTSTPESG | GTACCTCTACTCCGGAAAGCGGCTCTGCATCTCCAG |
| | SASP | GTACTTCTACCCCTGAAAGCGGTTCTGCATCTCCA |
| LCW0403_012_GFP- | GSTSESPSGTAPGTSP | GGTTCTACCAGCGAATCTCCTTCTGGCACCGCTCCAG |
| N_H01.ab1 | SGESSTAPGSTSESPS | GTACCTCTCCTAGCGGCGAATCTTCTACCGCTCCAGG |
| | GTAP | TTCTACTAGCGAATCTCCTTCTGGCACTGCACCA |
| LCW0403_013_GFP- | GSTSSTAESPGPGSTS | GGTTCCACCAGCTCTACTGCAGAATCTCCGGGCCCA |
| N_A02.ab1 | STAESPGPGTSPSGES | GGTTCTACTAGCTCTACTGCAGAATCTCCGGGTCCAG |
| | STAP | GTACTTCTCCTAGCGGCGAATCTTCTACCGCTCCA |
| LCW0403_014_GFP- | GSTSSTAESPGPGTST | GGTTCCACTAGCTCTACTGCAGAATCTCCTGGCCCAG |
| N_B02.ab1 | PESGSASPGSTSESPS | GTACCTCTACCCCTGAAAGCGGCTCTGCATCTCCAG |
| | GTAP | GTTCTACCAGCGAATCCCCGTCTGGCACCGCACCA |
| LCW0403_015_GFP- | GSTSSTAESPGPGSTS | GGTTCTACTAGCTCTACTGCTGAATCTCCGGGTCCAG |
| N_C02.ab1 | STAESPGPGTSPSGES | GTTCTACCAGCTCTACTGCTGAATCTCCTGGTCCAGG |
| | STAP | TACCTCCCCGAGCGGTGAATCTTCTACTGCACCA |
| LCW0403_017_GFP- | GSTSSTAESPGPGSTS | GGTTCTACCAGCTCTACCGCTGAATCTCCTGGCCCAG |
| N_D02.ab1 | ESPSGTAPGSTSSTAE | GTTCTACCAGCGAATCCCCGTCTGGCACCGCACCAG |
| | SPGP | GTTCTACTAGCTCTACCGCTGAATCTCCGGGTCCA |
| LCW0403_018_GFP- | GSTSSTAESPGPGSTS | GGTTCTACCAGCTCTACCGCAGAATCTCCTGGCCCA |
| N_E02.ab1 | STAESPGPGSTSSTAE | GGTTCCACTAGCTCTACCGCTGAATCTCCTGGTCCAG |
| | SPGP | GTTCTACTAGCTCTACCGCTGAATCTCCTGGTCCA |
| LCW0403_019_GFP- | GSTSESPSGTAPGSTS | GGTTCTACTAGCGAATCCCCTTCTGGTACTGCTCCAG |
| N_F02.ab1 | STAESPGPGSTSSTAE | GTTCCACTAGCTCTACCGCTGAATCTCCTGGCCCAGG |
| | SPGP | TTCCACTAGCTCTACTGCAGAATCTCCTGGTCCA |
| LCW0403_023_GFP- | GSTSESPSGTAPGSTS | GGTTCTACTAGCGAATCTCCTTCTGGTACCGCTCCAG |
| N_H02.ab1 | ESPSGTAPGSTSESPS | GTTCTACCAGCGAATCCCCGTCTGGTACTGCTCCAGG |
| | GTAP | TTCTACCAGCGAATCTCCTTCTGGTACTGCACCA |
| LCW0403_024_GFP- | GSTSSTAESPGPGSTS | GGTTCCACCAGCTCTACTGCTGAATCTCCTGGCCCAG |
| N_A03.ab1 | STAESPGPGSTSSTAE | GTTCTACCAGCTCTACTGCTGAATCTCCGGGCCCAGG |
| | SPGP | TTCCACCAGCTCTACCGCTGAATCTCCGGGTCCA |
| LCW0403_025_GFP- | GSTSSTAESPGPGSTS | GGTTCCACTAGCTCTACCGCAGAATCTCCTGGTCCAG |
| N_B03.ab1 | STAESPGPGTSPSGES | GTTCTACTAGCTCTACTGCTGAATCTCCGGGTCCAGG |
| | STAP | TACCTCCCCTAGCGGCGAATCTTCTACCGCTCCA |
| LCW0403_028_GFP- | GSSPSASTGTGPGSST | GGTTCTAGCCCTTCTGCTTCCACCGGTACCGGCCCAG |
| N_D03.ab1 | PSGATGSPGSSTPSGA | GTAGCTCTACTCCGTCTGGTGCAACTGGCTCTCCAGG |
| | TGSP | TAGCTCTACTCCGTCTGGTGCAACCGGCTCCCCA |
| LCW0403_029_GFP- | GTSPSGESSTAPGTST | GGTACTTCCCCTAGCGGTGAATCTTCTACTGCTCCAG |
| N_E03.ab1 | PESGSASPGSTSSTAE | GTACCTCTACTCCGGAAAGCGGCTCCGCATCTCCAG |
| | SPGP | GTTCTACTAGCTCTACTGCTGAATCTCCTGGTCCA |
| LCW0403_030_GFP- | GSTSSTAESPGPGSTS | GGTTCTACTAGCTCTACCGCTGAATCTCCGGGTCCAG |
| N_F03.ab1 | STAESPGPGTSTPESG | GTTCTACCAGCTCTACTGCAGAATCTCCTGGCCCAGG |
| | SASP | TACTTCTACTCCGGAAAGCGGTTCCGCTTCTCCA |
| LCW0403_031_GFP- | GTSPSGESSTAPGSTS | GGTACTTCTCCTAGCGGTGAATCTTCTACCGCTCCAG |
| N_G03.ab1 | STAESPGPGTSTPESG | GTTCTACCAGCTCTACTGCTGAATCTCCTGGCCCAGG |
| | SASP | TACTTCTACCCCGGAAAGCGGCTCCGCTTCTCCA |
| LCW0403_033_GFP- | GSTSESPSGTAPGSTS | GGTTCTACTAGCGAATCCCCTTCTGGTACTGCACCAG |
| N_H03.ab1 | STAESPGPGSTSSTAE | GTTCTACCAGCTCTACTGCTGAATCTCCGGGCCCAGG |
| | SPGP | TTCCACCAGCTCTACCGCAGAATCTCCTGGTCCA |
| LCW0403_035_GFP- | GSTSSTAESPGPGSTS | GGTTCCACCAGCTCTACCGCTGAATCTCCGGGCCCA |
| N_A04.ab1 | ESPSGTAPGSTSSTAE | GGTTCTACCAGCGAATCCCCTTCTGGCACTGCACCA |
| | SPGP | GGTTCTACTAGCTCTACCGCAGAATCTCCGGGCCCA |
| LCW0403_036_GFP- | GSTSSTAESPGPGTSP | GGTTCTACCAGCTCTACTGCTGAATCTCCGGGTCCAG |
| N_B04.ab1 | SGESSTAPGTSTPESG | GTACTTCCCCGAGCGGTGAATCTTCTACTGCACCAG |
| | SASP | GTACTTCTACTCCGGAAAGCGGTTCCGCTTCTCCA |
| LCW0403_039_GFP- | GSTSESPSGTAPGSTS | GGTTCTACCAGCGAATCTCCTTCTGGCACCGCTCCAG |
| N_C04.ab1 | ESPSGTAPGTSPSGES | GTTCTACTAGCGAATCCCCGTCTGGTACCGCACCAG |
| | STAP | GTACTTCTCCTAGCGGCGAATCTTCTACCGCACCA |
| LCW0403_041_GFP- | GSTSESPSGTAPGSTS | GGTTCTACCAGCGAATCCCCTTCTGGTACTGCTCCAG |
| N_D04.ab1 | ESPSGTAPGTSTPESG | GTTCTACCAGCGAATCCCCTTCTGGCACCGCACCAG |
| | SASP | GTACTTCTACCCCTGAAAGCGGCTCCGCTTCTCCA |
| LCW0403_044_GFP- | GTSTPESGSASPGSTS | GGTACCTCTACTCCTGAAAGCGGTTCTGCATCTCCAG |
| N_E04.ab1 | STAESPGPGSTSSTAE | GTTCCACTAGCTCTACCGCAGAATCTCCGGGCCCAG |
| | SPGP | GTTCTACTAGCTCTACTGCTGAATCTCCTGGCCCA |
| LCW0403_046_GFP- | GSTSESPSGTAPGSTS | GGTTCTACCAGCGAATCCCCTTCTGGCACTGCACCA |
| N_F04.ab1 | ESPSGTAPGTSPSGES | GGTTCTACTAGCGAATCCCCTTCTGGTACCGCACCAG |
| | STAP | GTACTTCTCCGAGCGGCGAATCTTCTACTGCTCCA |
| LCW0403_047_GFP- | GSTSSTAESPGPGSTS | GGTTCTACTAGCTCTACCGCTGAATCTCCTGGCCCAG |
| N_G04.ab1 | STAESPGPGSTSESPS | GTTCCACTAGCTCTACCGCAGAATCTCCGGGCCCAG |
| | GTAP | GTTCTACTAGCGAATCCCCTTCTGGTACCGCTCCA |
| LCW0403_049_GFP- | GSTSSTAESPGPGSTS | GGTTCCACCAGCTCTACTGCAGAATCTCCTGGCCCA |
| N_H04.ab1 | STAESPGPGTSTPESG | GGTTCTACTAGCTCTACCGCAGAATCTCCTGGTCCAG |
| | SASP | GTACCTCTACTCCTGAAAGCGGTTCCGCATCTCCA |
| LCW0403_051_GFP- | GSTSSTAESPGPGSTS | GGTTCTACTAGCTCTACTGCTGAATCTCCGGGCCCAG |
| N_A05.ab1 | STAESPGPGSTSESPS | GTTCTACTAGCTCTACCGCTGAATCTCCGGGTCCAGG |
| | GTAP | TTCTACTAGCGAATCTCCTTCTGGTACCGCTCCA |
| LCW0403_053_GFP- | GTSPSGESSTAPGSTS | GGTACCTCCCCGAGCGGTGAATCTTCTACTGCACCA |
| N_B05.ab1 | ESPSGTAPGSTSSTAE | GGTTCTACTAGCGAATCCCCTTCTGGTACTGCTCCAG |
| | SPGP | GTTCCACCAGCTCTACTGCAGAATCTCCGGGTCCA |
| LCW0403_054_GFP- | GSTSESPSGTAPGTSP | GGTTCTACTAGCGAATCCCCGTCTGGTACTGCTCCAG |
| N_C05.ab1 | SGESSTAPGSTSSTAE | GTACTTCCCCTAGCGGTGAATCTTCTACTGCTCCAGG |
| | SPGP | TTCTACCAGCTCTACCGCAGAATCTCCGGGTCCA |
| LCW0403_057_GFP- | GSTSSTAESPGPGSTS | GGTTCTACCAGCTCTACCGCTGAATCTCCTGGCCCAG |
| N_D05.ab1 | ESPSGTAPGTSPSGES | GTTCTACTAGCGAATCTCCGTCTGGCACCGCACCAG |
| | STAP | GTACTTCCCCTAGCGGTGAATCTTCTACTGCACCA |
| LCW0403_058_GFP- | GSTSESPSGTAPGSTS | GGTTCTACTAGCGAATCTCCTTCTGGCACTGCACCAG |
| N_E05.ab1 | ESPSGTAPGTSTPESG | GTTCTACCAGCGAATCTCCGTCTGGCACTGCACCAG |
| | SASP | GTACCTCTACCCCTGAAAGCGGTTCCGCTTCTCCA |
| LCW0403_060_GFP- | GTSTPESGSASPGSTS | GGTACCTCTACTCCGGAAAGCGGTTCCGCATCTCCA |
| N_F05.ab1 | ESPSGTAPGSTSSTAE | GGTTCTACCAGCGAATCCCCGTCTGGCACCGCACCA |
| | SPGP | GGTTCTACTAGCTCTACTGCTGAATCTCCGGGCCCA |
| LCW0403_063_GFP- | GSTSSTAESPGPGTSP | GGTTCTACTAGCTCTACTGCAGAATCTCCGGGCCCA |
| N_G05.ab1 | SGESSTAPGTSPSGES | GGTACCTCTCCTAGCGGTGAATCTTCTACCGCTCCAG |
| | STAP | GTACTTCTCCGAGCGGTGAATCTTCTACCGCTCCA |
| LCW0403_064_GFP- | GTSPSGESSTAPGTSP | GGTACCTCCCCTAGCGGCGAATCTTCTACTGCTCCAG |
| N_H05.ab1 | SGESSTAPGTSPSGES | GTACCTCTCCTAGCGGCGAATCTTCTACCGCTCCAGG |
| | STAP | TACCTCCCCTAGCGGTGAATCTTCTACCGCACCA |
| LCW0403_065_GFP- | GSTSSTAESPGPGTST | GGTTCCACTAGCTCTACTGCTGAATCTCCTGGCCCAG |
| N_A06.ab1 | PESGSASPGSTSESPS | GTACTTCTACTCCGGAAAGCGGTTCCGCTTCTCCAGG |
| | GTAP | TTCTACTAGCGAATCTCCGTCTGGCACCGCACCA |
| LCW0403_066_GFP- | GSTSESPSGTAPGTSP | GGTTCTACTAGCGAATCTCCGTCTGGCACTGCTCCAG |
| N_B06.ab1 | SGESSTAPGTSPSGES | GTACTTCTCCTAGCGGTGAATCTTCTACCGCTCCAGG |
| | STAP | TACTTCCCCTAGCGGCGAATCTTCTACCGCTCCA |
| LCW0403_067_GFP- | GSTSESPSGTAPGTST | GGTTCTACTAGCGAATCTCCTTCTGGTACCGCTCCAG |
| N_C06.ab1 | PESGSASPGSTSSTAE | GTACTTCTACCCCTGAAAGCGGCTCCGCTTCTCCAGG |
| | SPGP | TTCCACTAGCTCTACCGCTGAATCTCCGGGTCCA |
| LCW0403_068_GFP- | GSTSSTAESPGPGSTS | GGTTCCACTAGCTCTACTGCTGAATCTCCTGGCCCAG |
| N_D06.ab1 | STAESPGPGSTSESPS | GTTCTACCAGCTCTACCGCTGAATCTCCTGGCCCAGG |
| | GTAP | TTCTACCAGCGAATCTCCGTCTGGCACCGCACCA |
| LCW0403_069_GFP- | GSTSESPSGTAPGTST | GGTTCTACTAGCGAATCCCCGTCTGGTACCGCACCA |
| N_E06.ab1 | PESGSASPGTSTPESG | GGTACTTCTACCCCGGAAAGCGGCTCTGCTTCTCCAG |
| | SASP | GTACTTCTACCCCGGAAAGCGGCTCCGCATCTCCA |
| LCW0403_070_GFP- | GSTSESPSGTAPGTST | GGTTCTACTAGCGAATCCCCGTCTGGTACTGCTCCAG |
| N_F06.ab1 | PESGSASPGTSTPESG | GTACTTCTACTCCTGAAAGCGGTTCCGCTTCTCCAGG |
| | SASP | TACCTCTACTCCGGAAAGCGGTTCTGCATCTCCA |

### Example 4: Construction of XTEN_AG36 Segments

[0400] A codon library encoding sequences of 36 amino acid length was constructed. The sequences were designated XTEN_AG36. Its segments have the amino acid sequence [X]₃ where X is a 12mer peptide with the sequence: GTPGSGTASSSP (SEQ ID NO: 31), GSSTPSGATGSP (SEQ ID NO: 32), GSSPSASTGTGP (SEQ ID NO: 33), or GASPGTSSTGSP (SEQ ID NO: 34). The insert was obtained by annealing the following pairs of phosphorylated synthetic oligonucleotide pairs:

AG1for:

(SEQ ID NO: 1644)

AGGTACYCCKGGYAGCGGTACYGCWTCTTCYTCTCC
AG1rev:

(SEQ ID NO: 1645)

ACCTGGAGARGAAGAWGCRGTACCGCTRCCMGGRGT
AG2for:

(SEQ ID NO: 1646)

AGGTAGCTCTACYCCKTCTGGTGCWACYGGYTCYCC
AG2rev:

(SEQ ID NO: 1647)

ACCTGGRGARCCRGTWGCACCAGAMGGRGTAGAGCT
AG3for:

(SEQ ID NO: 1648)

AGGTTCTAGCCCKTCTGCWTCYACYGGTACYGGYCC
AG3rev:

(SEQ ID NO: 1649)

ACCTGGRCCRGTACCRGTRGAWGCAGAMGGGCTAGA
AG4for:

(SEQ ID NO: 1650)

AGGTGCWTCYCCKGGYACYAGCTCTACYGGTTCTCC
AG4rev:

(SEQ ID NO: 1651)

ACCTGGAGAACCRGTAGAGCTRGTRCCMGGRGAWGC

[0401] We also annealed the phosphorylated oligonucleotide 3KpnIstopperFor: AGGTTCGTCTTCACTCGAGGGTAC (SEQ ID NO: 1626) and the non-phosphorylated oligonucleotide pr_3 KpnIstopperRev: CCTCGAGTGAAGACGA (SEQ ID NO: 1627). The annealed oligonucleotide pairs were ligated, which resulted in a mixture of products with varying length that represents the varying number of 12mer repeats ligated to one BbsI/KpnI segment. The products corresponding to the length of 36 amino acids were isolated from the mixture by preparative agarose gel electrophoresis and ligated into the BsaI/KpnI digested stuffer vector pCW0359. Most of the clones in the resulting library designated LCW0404 showed green fluorescence after induction which shows that the sequence of XTEN_AG36 had been ligated in frame with the GFP gene and most sequences of XTEN_AG36 show good expression.

[0402] We screened 96 isolates from library LCW0404 for high level of fluorescence by stamping them onto agar plate containing IPTG. The same isolates were evaluated by PCR and 48 isolates were identified that contained segments with 36 amino acids as well as strong fluorescence. These isolates were sequenced and 44 clones were identified that contained correct XTEN_AG36 segments. The file names of the nucleotide and amino acid constructs and the sequences for these segments are listed in Table 16.

TABLE 16
DNA and Amino Acid Sequences for AG 36-mer motifs (SEQ ID NOS 441-528,
respectively, in order of appearance)

| File name | Amino acid sequence | Nucleotide sequence |
|---|---|---|
| LCW0404_001_GFP- | GASPGTSSTGSPGTPGS | GGTGCATCCCCGGGCACTAGCTCTACCGGTTCTCCA |
| N_A07.ab1 | GTASSSPGSSTPSGATG | GGTACTCCTGGTAGCGGTACTGCTTCTTCTTCTCCAG |
| | SP | GTAGCTCTACTCCTTCTGGTGCTACTGGTTCTCCA |
| LCW0404_003_GFP- | GSSTPSGATGSPGSSPS | GGTAGCTCTACCCCTTCTGGTGCTACCGGCTCTCCAG |
| N_B07.ab1 | ASTGTGPGSSTPSGATG | GTTCTAGCCCGTCTGCTTCTACCGGTACCGGTCCAGG |
| | SP | TAGCTCTACCCCTTCTGGTGCTACTGGTTCTCCA |
| LCW0404_006_GFP- | GASPGTSSTGSPGSSPS | GGTGCATCTCCGGGTACTAGCTCTACCGGTTCTCCAG |
| N_C07.ab1 | ASTGTGPGSSTPSGATG | GTTCTAGCCCTTCTGCTTCCACTGGTACCGGCCCAGG |
| | SP | TAGCTCTACCCCGTCTGGTGCTACTGGTTCCCCA |
| LCW0404_007_GFP- | GTPGSGTASSSPGSSTPS | GGTACTCCGGGCAGCGGTACTGCTTCTTCCTCTCCAG |
| N_D07.ab1 | GATGSPGASPGTSSTGSP | GTAGCTCTACCCCTTCTGGTGCAACTGGTTCCCCAGG |
| | | TGCATCCCCTGGTACTAGCTCTACCGGTTCTCCA |
| LCW0404_009_GFP- | GTPGSGTASSSPGASPG | GGTACCCCTGGCAGCGGTACTGCTTCTTCTTCTCCAG |
| N_E07.ab1 | TSSTGSPGSRPSASTGT | GTGCTTCCCCTGGTACCAGCTCTACCGGTTCTCCAGG |
| | GP | TTCTAGACCTTCTGCATCCACCGGTACTGGTCCA |
| LCW0404_011_GFP- | GASPGTSSTGSPGSSTPS | GGTGCATCTCCTGGTACCAGCTCTACCGGTTCTCCAG |
| N_F07.ab1 | GATGSPGASPGTSSTGSP | GTAGCTCTACTCCTTCTGGTGCTACTGGCTCTCCAGG |
| | | TGCTTCCCCGGGTACCAGCTCTACCGGTTCTCCA |
| LCW0404_012_GFP- | GTPGSGTASSSPGSSTPS | GGTACCCCGGGCAGCGGTACCGCATCTTCCTCTCCA |
| N_G07.ab1 | GATGSPGSSTPSGATGSP | GGTAGCTCTACCCCGTCTGGTGCTACCGGTTCCCCAG |
| | | GTAGCTCTACCCCGTCTGGTGCAACCGGCTCCCCA |
| LCW0404_014_GFP- | GASPGTSSTGSPGASPG | GGTGCATCTCCGGGCACTAGCTCTACTGGTTCTCCAG |
| N_H07.ab1 | TSSTGSPGASPGTSSTGSP | GTGCATCCCCTGGCACTAGCTCTACTGGTTCTCCAGG |
| | | TGCTTCTCCTGGTACCAGCTCTACTGGTTCTCCA |
| LCW0404_015_GFP- | GSSTPSGATGSPGSSPS | GGTAGCTCTACTCCGTCTGGTGCAACCGGCTCCCCA |
| N_A08.ab1 | ASTGTGPGASPGTSSTG | GGTTCTAGCCCGTCTGCTTCCACTGGTACTGGCCCAG |
| | SP | GTGCTTCCCCGGGCACCAGCTCTACTGGTTCTCCA |
| LCW0404_016_GFP- | GSSTPSGATGSPGSSTPS | GGTAGCTCTACTCCTTCTGGTGCTACCGGTTCCCCAG |
| N_B08.ab1 | GATGSPGTPGSGTASSSP | GTAGCTCTACTCCTTCTGGTGCTACTGGTTCCCCAGG |
| | | TACTCCGGGCAGCGGTACTGCTTCTTCCTCTCCA |
| LCW0404_017_GFP- | GSSTPSGATGSPGSSTPS | GGTAGCTCTACTCCGTCTGGTGCAACCGGTTCCCCAG |
| N_C08.ab1 | GATGSPGASPGTSSTGSP | GTAGCTCTACTCCTTCTGGTGCTACTGGCTCCCCAGG |
| | | TGCATCCCCTGGCACCAGCTCTACCGGTTCTCCA |
| LCW0404_018_GFP- | GTPGSGTASSSPGSSPS | GGTACTCCTGGTAGCGGTACCGCATCTTCCTCTCCAG |
| N_D08.ab1 | ASTGTGPGSSTPSGATG | GTTCTAGCCCTTCTGCATCTACCGGTACCGGTCCAGG |
| | SP | TAGCTCTACTCCTTCTGGTGCTACTGGCTCTCCA |
| LCW0404_023_GFP- | GASPGTSSTGSPGSSPS | GGTGCTTCCCCGGGCACTAGCTCTACCGGTTCTCCAG |
| N_F08.ab1 | ASTGTGPGTPGSGTASS | GTTCTAGCCCTTCTGCATCTACTGGTACTGGCCCAGG |
| | SP | TACTCCGGGCAGCGGTACTGCTTCTTCCTCTCCA |
| LCW0404_025_GFP- | GSSTPSGATGSPGSSTPS | GGTAGCTCTACTCCGTCTGGTGCTACCGGCTCTCCAG |
| N_G08.ab1 | GATGSPGASPGTSSTGSP | GTAGCTCTACCCCTTCTGGTGCAACCGGCTCCCCAGG |
| | | TGCTTCTCCGGGTACCAGCTCTACTGGTTCTCCA |
| LCW0404_029_GFP- | GTPGSGTASSSPGSSTPS | GGTACCCCTGGCAGCGGTACCGCTTCTTCCTCTCCAG |
| N_A09.ab1 | GATGSPGSSPSASTGTGP | GTAGCTCTACCCCGTCTGGTGCTACTGGCTCTCCAGG |
| | | TTCTAGCCCGTCTGCATCTACCGGTACCGGCCCA |
| LCW0404_030_GFP- | GSSTPSGATGSPGTPGS | GGTAGCTCTACTCCTTCTGGTGCAACCGGCTCCCCAG |
| N_B09.ab1 | GTASSSPGTPGSGTASS | GTACCCCGGGCAGCGGTACCGCATCTTCCTCTCCAG |
| | SP | GTACTCCGGGTAGCGGTACTGCTTCTTCTTCTCCA |
| LCW0404_031_GFP- | GTPGSGTASSSPGSSTPS | GGTACCCCGGGTAGCGGTACTGCTTCTTCCTCTCCAG |
| N_C09.ab1 | GATGSPGASPGTSSTGSP | GTAGCTCTACCCCTTCTGGTGCAACCGGCTCTCCAGG |
| | | TGCTTCTCCGGGCACCAGCTCTACCGGTTCTCCA |
| LCW0404_034_GFP- | GSSTPSGATGSPGSSTPS | GGTAGCTCTACCCCGTCTGGTGCTACCGGCTCTCCAG |
| N_D09.ab1 | GATGSPGASPGTSSTGSP | GTAGCTCTACCCCGTCTGGTGCAACCGGCTCCCCAG |
| | | GTGCATCCCCGGGTACTAGCTCTACCGGTTCTCCA |
| LCW0404_035_GFP- | GASPGTSSTGSPGTPGS | GGTGCTTCTCCGGGCACCAGCTCTACTGGTTCTCCAG |
| N_E09.ab1 | GTASSSPGSSTPSGATG | GTACCCCGGGCAGCGGTACCGCATCTTCTTCTCCAG |
| | SP | GTAGCTCTACTCCTTCTGGTGCAACTGGTTCTCCA |
| LCW0404_036_GFP- | GSSPSASTGTGPGSSTPS | GGTTCTAGCCCGTCTGCTTCCACCGGTACTGGCCCAG |
| N_F09.ab1 | GATGSPGTPGSGTASSSP | GTAGCTCTACCCCGTCTGGTGCAACTGGTTCCCCAGG |
| | | TACCCCTGGTAGCGGTACCGCTTCTTCTTCTCCA |
| LCW0404_037_GFP- | GASPGTSSTGSPGSSPS | GGTGCTTCTCCGGGCACCAGCTCTACTGGTTCTCCAG |
| N_G09.ab1 | ASTGTGPGSSTPSGATG | GTTCTAGCCCTTCTGCATCCACCGGTACCGGTCCAGG |
| | SP | TAGCTCTACCCCTTCTGGTGCAACCGGCTCTCCA |
| LCW0404_040_GFP- | GASPGTSSTGSPGSSTPS | GGTGCATCCCCGGGCACCAGCTCTACCGGTTCTCCA |
| N_H09.ab1 | GATGSPGSSTPSGATGSP | GGTAGCTCTACCCCGTCTGGTGCTACCGGCTCTCCAG |
| | | GTAGCTCTACCCCGTCTGGTGCTACTGGCTCTCCA |
| LCW0404_041_GFP- | GTPGSGTASSSPGSSTPS | GGTACCCCTGGTAGCGGTACTGCTTCTTCCTCTCCAG |
| N_A10.ab1 | GATGSPGTPGSGTASSSP | GTAGCTCTACTCCGTCTGGTGCTACCGGTTCTCCAGG |
| | | TACCCCGGGTAGCGGTACCGCATCTTCTTCTCCA |
| LCW0404_043_GFP- | GSSPSASTGTGPGSSTPS | GGTTCTAGCCCTTCTGCTTCCACCGGTACTGGCCCAG |
| N_C10.ab1 | GATGSPGSSTPSGATGSP | GTAGCTCTACCCCTTCTGGTGCTACCGGCTCCCCAGG |
| | | TAGCTCTACTCCTTCTGGTGCAACTGGCTCTCCA |
| LCW0404_045_GFP- | GASPGTSSTGSPGSSPS | GGTGCTTCTCCTGGCACCAGCTCTACTGGTTCTCCAG |
| N_D10.ab1 | ASTGTGPGSSPSASTGT | GTTCTAGCCCTTCTGCTTCTACCGGTACTGGTCCAGG |
| | GP | TTCTAGCCCTTCTGCATCCACTGGTACTGGTCCA |
| LCW0404_047_GFP- | GTPGSGTASSSPGASPG | GGTACTCCTGGCAGCGGTACCGCTTCTTCTTCTCCAG |
| N_F10.ab1 | TSSTGSPGASPGTSSTGSP | GTGCTTCTCCTGGTACTAGCTCTACTGGTTCTCCAGG |
| | | TGCTTCTCCGGGCACTAGCTCTACTGGTTCTCCA |
| LCW0404_048_GFP- | GSSTPSGATGSPGASPG | GGTAGCTCTACCCCGTCTGGTGCTACCGGTTCCCCAG |
| N_G10.ab1 | TSSTGSPGSSTPSGATGSP | GTGCTTCTCCTGGTACTAGCTCTACCGGTTCTCCAGG |
| | | TAGCTCTACCCCGTCTGGTGCTACTGGCTCTCCA |
| LCW0404_049_GFP- | GSSTPSGATGSPGTPGS | GGTAGCTCTACCCCGTCTGGTGCTACTGGTTCTCCAG |
| N_H10.ab1 | GTASSSPGSSTPSGATG | GTACTCCGGGCAGCGGTACTGCTTCTTCCTCTCCAGG |
| | SP | TAGCTCTACCCCTTCTGGTGCTACTGGCTCTCCA |
| LCW0404_050_GFP- | GASPGTSSTGSPGSSPS | GGTGCATCTCCTGGTACCAGCTCTACTGGTTCTCCAG |
| N_A11.ab1 | ASTGTGPGSSTPSGATG | GTTCTAGCCCTTCTGCTTCTACCGGTACCGGTCCAGG |
| | SP | TAGCTCTACTCCTTCTGGTGCTACCGGTTCTCCA |
| LCW0404_051_GFP- | GSSTPSGATGSPGSSTPS | GGTAGCTCTACCCCGTCTGGTGCTACTGGCTCTCCAG |
| N_B11.ab1 | GATGSPGSSTPSGATGSP | GTAGCTCTACTCCTTCTGGTGCTACTGGTTCCCCAGG |
| | | TAGCTCTACCCCGTCTGGTGCAACTGGCTCTCCA |
| LCW0404_052_GFP- | GASPGTSSTGSPGTPGS | GGTGCATCCCCGGGTACCAGCTCTACCGGTTCTCCA |
| N_C11.ab1 | GTASSSPGASPGTSSTG | GGTACTCCTGGCAGCGGTACTGCATCTTCCTCTCCAG |
| | SP | GTGCTTCTCCGGGCACCAGCTCTACTGGTTCTCCA |
| LCW0404_053_GFP- | GSSTPSGATGSPGSSPS | GGTAGCTCTACTCCTTCTGGTGCAACTGGTTCTCCAG |
| N_D11.ab1 | ASTGTGPGASPGTSSTG | GTTCTAGCCCGTCTGCATCCACTGGTACCGGTCCAGG |
| | SP | TGCTTCCCCTGGCACCAGCTCTACCGGTTCTCCA |
| LCW0404_057_GFP- | GASPGTSSTGSPGSSTPS | GGTGCATCTCCTGGTACTAGCTCTACTGGTTCTCCAG |
| N_E11.ab1 | GATGSPGSSPSASTGTGP | GTAGCTCTACTCCGTCTGGTGCAACCGGCTCTCCAGG |
| | | TTCTAGCCCTTCTGCATCTACCGGTACTGGTCCA |
| LCW0404_060_GFP- | GTPGSGTASSSPGSSTPS | GGTACTCCTGGCAGCGGTACCGCATCTTCCTCTCCAG |
| N_F11.ab1 | GATGSPGASPGTSSTGSP | GTAGCTCTACTCCGTCTGGTGCAACTGGTTCCCCAGG |
| | | TGCTTCTCCGGGTACCAGCTCTACCGGTTCTCCA |
| LCW0404_062_GFP- | GSSTPSGATGSPGTPGS | GGTAGCTCTACCCCGTCTGGTGCAACCGGCTCCCCA |
| N_G11.ab1 | GTASSSPGSSTPSGATG | GGTACTCCTGGTAGCGGTACCGCTTCTTCTTCTCCAG |
| | SP | GTAGCTCTACTCCGTCTGGTGCTACCGGCTCCCCA |
| LCW0404_066_GFP- | GSSPSASTGTGPGSSPS | GGTTCTAGCCCTTCTGCATCCACCGGTACCGGCCCAG |
| N_H11.ab1 | ASTGTGPGASPGTSSTG | GTTCTAGCCCGTCTGCTTCTACCGGTACTGGTCCAGG |
| | SP | TGCTTCTCCGGGTACTAGCTCTACTGGTTCTCCA |
| LCW0404_067_GFP- | GTPGSGTASSSPGSSTPS | GGTACCCCGGGTAGCGGTACCGCTTCTTCTTCTCCAG |
| N_A12.ab1 | GATGSPGSNPSASTGTGP | GTAGCTCTACTCCGTCTGGTGCTACCGGCTCTCCAGG |
| | | TTCTAACCCTTCTGCATCCACCGGTACCGGCCCA |
| LCW0404_068_GFP- | GSSPSASTGTGPGSSTPS | GGTTCTAGCCCTTCTGCATCTACTGGTACTGGCCCAG |
| N_B12.ab1 | GATGSPGASPGTSSTGSP | GTAGCTCTACTCCTTCTGGTGCTACCGGCTCTCCAGG |
| | | TGCTTCTCCGGGTACTAGCTCTACCGGTTCTCCA |
| LCW0404_069_GFP- | GSSTPSGATGSPGASPG | GGTAGCTCTACCCCTTCTGGTGCAACCGGCTCTCCAG |
| N_C12.ab1 | TSSTGSPGTPGSGTASSSP | GTGCATCCCCGGGTACCAGCTCTACCGGTTCTCCAG |
| | | GTACTCCGGGTAGCGGTACCGCTTCTTCCTCTCCA |
| LCW0404_070_GFP- | GSSTPSGATGSPGSSTPS | GGTAGCTCTACTCCGTCTGGTGCAACCGGTTCCCCAG |
| N_D12.ab1 | GATGSPGSSTPSGATGSP | GTAGCTCTACCCCTTCTGGTGCAACCGGCTCCCCAGG |
| | | TAGCTCTACCCCTTCTGGTGCAACTGGCTCTCCA |
| LCW0404_073_GFP- | GASPGTSSTGSPGTPGS | GGTGCTTCTCCTGGCACTAGCTCTACCGGTTCTCCAG |
| N_E12.ab1 | GTASSSPGSSTPSGATG | GTACCCCTGGTAGCGGTACCGCATCTTCCTCTCCAGG |
| | SP | TAGCTCTACTCCTTCTGGTGCTACTGGTTCCCCA |
| LCW0404_075_GFP- | GSSTPSGATGSPGSSPS | GGTAGCTCTACCCCGTCTGGTGCTACTGGCTCCCCAG |
| N_F12.ab1 | ASTGTGPGSSPSASTGT | GTTCTAGCCCTTCTGCATCCACCGGTACCGGTCCAGG |
| | GP | TTCTAGCCCGTCTGCATCTACTGGTACTGGTCCA |
| LCW0404_080_GFP- | GASPGTSSTGSPGSSPS | GGTGCTTCCCCGGGCACCAGCTCTACTGGTTCTCCAG |
| N_G12.ab1 | ASTGTGPGSSPSASTGT | GTTCTAGCCCGTCTGCTTCTACTGGTACTGGTCCAGG |
| | GP | TTCTAGCCCTTCTGCTTCCACTGGTACTGGTCCA |
| LCW0404_081_GFP- | GASPGTSSTGSPGSSPS | GGTGCTTCCCCGGGTACCAGCTCTACCGGTTCTCCAG |
| N_H12.ab1 | ASTGTGPGTPGSGTASS | GTTCTAGCCCTTCTGCTTCTACCGGTACCGGTCCAGG |
| | SP | TACCCCTGGCAGCGGTACCGCATCTTCCTCTCCA |

### Example 5: Construction of XTEN_AE864

[0403] XTEN_AE864 was constructed from serial dimerization of XTEN_AE36 to AE72, 144, 288, 576 and 864. A collection of XTEN_AE72 segments was constructed from 37 different segments of XTEN_AE36. Cultures of E. coli harboring all 37 different 36-amino acid segments were mixed and plasmid was isolated. This plasmid pool was digested with BsaI/NcoI to generate the small fragment as the insert. The same plasmid pool was digested with BbsI/NcoI to generate the large fragment as the vector. The insert and vector fragments were ligated resulting in a doubling of the length and the ligation mixture was transformed into BL21Gold(DE3) cells to obtain colonies of XTEN_AE72.

[0404] This library of XTEN_AE72 segments was designated LCW0406. All clones from LCW0406 were combined and dimerized again using the same process as described above yielding library LCW0410 of XTEN_AE144. All clones from LCW0410 were combined and dimerized again using the same process as described above yielding library LCW0414 of XTEN_AE288. Two isolates LCW0414.001 and LCW0414.002 were randomly picked from the library and sequenced to verify the identities. All clones from LCW0414 were combined and dimerized again using the same process as described above yielding library LCW0418 of XTEN_AE576. We screened 96 isolates from library LCW0418 for high level of GFP fluorescence. 8 isolates with right sizes of inserts by PCR and strong fluorescence were sequenced and 2 isolates (LCW0418.018 and LCW0418.052) were chosen for future use based on sequencing and expression data.

[0405] The specific clone pCW0432 of XTEN_AE864 was constructed by combining LCW0418.018 of XTEN_AE576 and LCW0414.002 of XTEN_AE288 using the same dimerization process as described above.

### Example 6: Construction of XTEN_AM144

[0406] A collection of XTEN_AM144 segments was constructed starting from 37 different segments of XTEN_AE36, 44 segments of XTEN_AF36, and 44 segments of XTEN_AG36.

[0407] Cultures of E. coli that harboring all 125 different 36-amino acid segments were mixed and plasmid was isolated. This plasmid pool was digested with BsaI/NcoI to generate the small fragment as the insert. The same plasmid pool was digested with BbsI/NcoI to generate the large fragment as the vector. The insert and vector fragments were ligated resulting in a doubling of the length and the ligation mixture was transformed into BL21Gold(DE3) cells to obtain colonies of XTEN_AM72.

[0408] This library of XTEN_AM72 segments was designated LCW0461. All clones from LCW0461 were combined and dimerized again using the same process as described above yielding library LCW0462. 1512 Isolates from library LCW0462 were screened for protein expression. Individual colonies were transferred into 96 well plates and cultured overnight as starter cultures. These starter cultures were diluted into fresh autoinduction medium and cultured for 20-30 h. Expression was measured using a fluorescence plate reader with excitation at 395 nm and emission at 510 nm. 192 isolates showed high level expression and were submitted for DNA sequencing. Most clones in library LCW0462 showed good expression and similar physicochemical properties suggesting that most combinations of XTEN_AM36 segments yield useful XTEN sequences. Thirty isolates from LCW0462 were chosen as a preferred collection of XTEN_AM144 segments for the construction of multifunctional proteins that contain multiple XTEN segments. The file names of the nucleotide and amino acid constructs and the sequences for these segments are listed in Table 17.

TABLE 17
DNA and amino acid sequences for AM144 segments (SEQ ID NOS 529-594,
respectively, in order of appearance)

| Clone | Sequence Trimmed | Protein Sequence |
|---|---|---|
| LCW462_r1 | GGTACCCCGGGCAGCGGTACCGCATCTTCCTCTCCAGGTAGC | GTPGSGTASSSPGS |
| | TCTACCCCGTCTGGTGCTACCGGTTCCCCAGGTAGCTCTACCC | STPSGATGSPGSSTP |
| | CGTCTGGTGCAACCGGCTCCCCAGGTAGCCCGGCTGGCTCTC | SGATGSPGSPAGSP |
| | CTACCTCTACTGAGGAAGGTACTTCTGAAAGCGCTACTCCTG | TSTEEGTSESATPES |
| | AGTCTGGTCCAGGTACCTCTACTGAACCGTCCGAAGGTAGCG | GPGTSTEPSEGSAP |
| | CTCCAGGTTCTAGCCCTTCTGCATCCACCGGTACCGGCCCAGG | GSSPSASTGTGPGS |
| | TTCTAGCCCGTCTGCTTCTACCGGTACTGGTCCAGGTGCTTCT | SPSASTGTGPGASP |
| | CCGGGTACTAGCTCTACTGGTTCTCCAGGTACCTCTACCGAAC | GTSSTGSPGTSTEPS |
| | CGTCCGAGGGTAGCGCACCAGGTACCTCTACTGAACCGTCTG | EGSAPGTSTEPSEG |
| | AGGGTAGCGCTCCAGGTAGCGAACCGGCAACCTCCGGTTCTG | SAPGSEPATSGSETP |
| | AAACTCCA | |
| LCW462_r5 | GGTTCTACCAGCGAATCCCCTTCTGGCACTGCACCAGGTTCTA | GSTSESPSGTAPGST |
| | CTAGCGAATCCCCTTCTGGTACCGCACCAGGTACTTCTCCGAG | SESPSGTAPGTSPSG |
| | CGGCGAATCTTCTACTGCTCCAGGTACCTCTACTGAACCTTCC | ESSTAPGTSTEPSEG |
| | GAAGGCAGCGCTCCAGGTACCTCTACCGAACCGTCCGAGGGC | SAPGTSTEPSEGSAP |
| | AGCGCACCAGGTACTTCTGAAAGCGCAACCCCTGAATCCGGT | GTSESATPESGPGA |
| | CCAGGTGCATCTCCTGGTACCAGCTCTACCGGTTCTCCAGGTA | SPGTSSTGSPGSSTP |
| | GCTCTACTCCTTCTGGTGCTACTGGCTCTCCAGGTGCTTCCCC | SGATGSPGASPGTS |
| | GGGTACCAGCTCTACCGGTTCTCCAGGTTCTACTAGCGAATCT | STGSPGSTSESPSGT |
| | CCTTCTGGCACTGCACCAGGTTCTACCAGCGAATCTCCGTCTG | APGSTSESPSGTAP |
| | GCACTGCACCAGGTACCTCTACCCCTGAAAGCGGTTCCGCTT | GTSTPESGSASP |
| | CTCCA | |
| LCW462_r9 | GGTACTTCTACCGAACCTTCCGAGGGCAGCGCACCAGGTACT | GTSTEPSEGSAPGT |
| | TCTGAAAGCGCTACCCCTGAGTCCGGCCCAGGTACTTCTGAA | SESATPESGPGTSES |
| | AGCGCTACTCCTGAATCCGGTCCAGGTACCTCTACTGAACCTT | ATPESGPGTSTEPSE |
| | CTGAGGGCAGCGCTCCAGGTACTTCTGAAAGCGCTACCCCGG | GSAPGTSESATPES |
| | AGTCCGGTCCAGGTACTTCTACTGAACCGTCCGAAGGTAGCG | GPGTSTEPSEGSAP |
| | CACCAGGTACTTCTACTGAACCTTCCGAAGGTAGCGCTCCAG | GTSTEPSEGSAPGS |
| | GTAGCGAACCTGCTACTTCTGGTTCTGAAACCCCAGGTAGCC | EPATSGSETPGSPA |
| | CGGCTGGCTCTCCGACCTCCACCGAGGAAGGTGCTTCTCCTG | GSPTSTEEGASPGT |
| | GCACCAGCTCTACTGGTTCTCCAGGTTCTAGCCCTTCTGCTTC | SSTGSPGSSPSASTG |
| | TACCGGTACTGGTCCAGGTTCTAGCCCTTCTGCATCCACTGGT | TGPGSSPSASTGTGP |
| | ACTGGTCCA | |
| LCW462_r10 | GGTAGCGAACCGGCAACCTCTGGCTCTGAAACCCCAGGTACC | GSEPATSGSETPGT |
| | TCTGAAAGCGCTACTCCGGAATCTGGTCCAGGTACTTCTGAA | SESATPESGPGTSES |
| | AGCGCTACTCCGGAATCCGGTCCAGGTTCTACCAGCGAATCT | ATPESGPGSTSESPS |
| | CCTTCTGGCACCGCTCCAGGTTCTACTAGCGAATCCCCGTCTG | GTAPGSTSESPSGT |
| | GTACCGCACCAGGTACTTCTCCTAGCGGCGAATCTTCTACCGC | APGTSPSGESSTAP |
| | ACCAGGTGCATCTCCGGGTACTAGCTCTACCGGTTCTCCAGGT | GASPGTSSTGSPGS |
| | TCTAGCCCTTCTGCTTCCACTGGTACCGGCCCAGGTAGCTCTA | SPSASTGTGPGSSTP |
| | CCCCGTCTGGTGCTACTGGTTCCCCAGGTAGCTCTACTCCGTC | SGATGSPGSSTPSG |
| | TGGTGCAACCGGTTCCCCAGGTAGCTCTACTCCTTCTGGTGCT | ATGSPGSSTPSGAT |
| | ACTGGCTCCCCAGGTGCATCCCCTGGCACCAGCTCTACCGGTT | GSPGASPGTSSTGSP |
| | CTCCA | |
| LCW462_r15 | GGTGCTTCTCCGGGCACCAGCTCTACTGGTTCTCCAGGTTCTA | GASPGTSSTGSPGS |
| | GCCCTTCTGCATCCACCGGTACCGGTCCAGGTAGCTCTACCCC | SPSASTGTGPGSSTP |
| | TTCTGGTGCAACCGGCTCTCCAGGTACTTCTGAAAGCGCTACC | SGATGSPGTSESAT |
| | CCGGAATCTGGCCCAGGTAGCGAACCGGCTACTTCTGGTTCT | PESGPGSEPATSGSE |
| | GAAACCCCAGGTAGCGAACCGGCTACCTCCGGTTCTGAAACT | TPGSEPATSGSETP |
| | CCAGGTACTTCTGAAAGCGCTACTCCGGAGTCCGGTCCAGGT | GTSESATPESGPGT |
| | ACCTCTACCGAACCGTCCGAAGGCAGCGCTCCAGGTACTTCT | STEPSEGSAPGTSTE |
| | ACTGAACCTTCTGAGGGTAGCGCTCCAGGTACCTCTACCGAA | PSEGSAPGTSTEPSE |
| | CCGTCCGAGGGTAGCGCACCAGGTACCTCTACTGAACCGTCT | GSAPGTSTEPSEGS |
| | GAGGGTAGCGCTCCAGGTAGCGAACCGGCAACCTCCGGTTCT | APGSEPATSGSETP |
| | GAAACTCCA | |
| LCW462_r16 | GGTACCTCTACCGAACCTTCCGAAGGTAGCGCTCCAGGTAGC | GTSTEPSEGSAPGSP |
| | CCGGCAGGTTCTCCTACTTCCACTGAGGAAGGTACTTCTACCG | AGSPTSTEEGTSTEP |
| | AACCTTCTGAGGGTAGCGCACCAGGTACCTCTGAAAGCGCAA | SEGSAPGTSESATP |
| | CTCCTGAGTCTGGCCCAGGTAGCGAACCTGCTACCTCCGGCT | ESGPGSEPATSGSE |
| | CTGAGACTCCAGGTACCTCTGAAAGCGCAACCCCGGAATCTG | TPGTSESATPESGP |
| | GTCCAGGTAGCCCGGCTGGCTCTCCTACCTCTACTGAGGAAG | GSPAGSPTSTEEGT |
| | GTACTTCTGAAAGCGCTACTCCTGAGTCTGGTCCAGGTACCTC | SESATPESGPGTSTE |
| | TACTGAACCGTCCGAAGGTAGCGCTCCAGGTAGCGAACCTGC | PSEGSAPGSEPATS |
| | TACTTCTGGTTCTGAAACTCCAGGTACTTCTACCGAACCGTCC | GSETPGTSTEPSEGS |
| | GAGGGTAGCGCTCCAGGTAGCGAACCTGCTACTTCTGGTTCT | APGSEPATSGSETP |
| | GAAACTCCA | |
| LCW462_r20 | GGTACTTCTACCGAACCGTCCGAAGGCAGCGCTCCAGGTACC | GTSTEPSEGSAPGT |
| | TCTACTGAACCTTCCGAGGGCAGCGCTCCAGGTACCTCTACC | STEPSEGSAPGTSTE |
| | GAACCTTCTGAAGGTAGCGCACCAGGTACTTCTACCGAACCG | PSEGSAPGTSTEPSE |
| | TCCGAAGGCAGCGCTCCAGGTACCTCTACTGAACCTTCCGAG | GSAPGTSTEPSEGS |
| | GGCAGCGCTCCAGGTACCTCTACCGAACCTTCTGAAGGTAGC | APGTSTEPSEGSAP |
| | GCACCAGGTACTTCTACCGAACCTTCCGAGGGCAGCGCACCA | GTSTEPSEGSAPGT |
| | GGTACTTCTGAAAGCGCTACCCCTGAGTCCGGCCCAGGTACT | SESATPESGPGTSES |
| | TCTGAAAGCGCTACTCCTGAATCCGGTCCAGGTACTTCTACTG | ATPESGPGTSTEPSE |
| | AACCTTCCGAAGGTAGCGCTCCAGGTAGCGAACCTGCTACTT | GSAPGSEPATSGSE |
| | CTGGTTCTGAAACCCCAGGTAGCCCGGCTGGCTCTCCGACCT | TPGSPAGSPTSTEE |
| | CCACCGAGGAA | |
| LCW462_r23 | GGTACTTCTACCGAACCGTCCGAGGGCAGCGCTCCAGGTACT | GTSTEPSEGSAPGT |
| | TCTACTGAACCTTCTGAAGGCAGCGCTCCAGGTACTTCTACTG | STEPSEGSAPGTSTE |
| | AACCTTCCGAAGGTAGCGCACCAGGTTCTACCAGCGAATCCC | PSEGSAPGSTSESPS |
| | CTTCTGGTACTGCTCCAGGTTCTACCAGCGAATCCCCTTCTGG | GTAPGSTSESPSGT |
| | CACCGCACCAGGTACTTCTACCCCTGAAAGCGGCTCCGCTTCT | APGTSTPESGSASP |
| | CCAGGTAGCGAACCTGCAACCTCTGGCTCTGAAACCCCAGGT | GSEPATSGSETPGT |
| | ACCTCTGAAAGCGCTACTCCTGAATCTGGCCCAGGTACTTCTA | SESATPESGPGTSTE |
| | CTGAACCGTCCGAGGGCAGCGCACCAGGTACTTCTACTGAAC | PSEGSAPGTSTEPSE |
| | CGTCTGAAGGTAGCGCACCAGGTACTTCTGAAAGCGCAACCC | GSAPGTSESATPES |
| | CGGAATCCGGCCCAGGTACCTCTGAAAGCGCAACCCCGGAGT | GPGTSESATPESGP |
| | CCGGCCCA | |
| LCW462_r24 | GGTAGCTCTACCCCTTCTGGTGCTACCGGCTCTCCAGGTTCTA | GSSTPSGATGSPGS |
| | GCCCGTCTGCTTCTACCGGTACCGGTCCAGGTAGCTCTACCCC | SPSASTGTGPGSSTP |
| | TTCTGGTGCTACTGGTTCTCCAGGTAGCCCTGCTGGCTCTCCG | SGATGSPGSPAGSP |
| | ACTTCTACTGAGGAAGGTAGCCCGGCTGGTTCTCCGACTTCTA | TSTEEGSPAGSPTST |
| | CTGAGGAAGGTACTTCTACCGAACCTTCCGAAGGTAGCGCTC | EEGTSTEPSEGSAP |
| | CAGGTGCTTCCCCGGGCACTAGCTCTACCGGTTCTCCAGGTTC | GASPGTSSTGSPGS |
| | TAGCCCTTCTGCATCTACTGGTACTGGCCCAGGTACTCCGGGC | SPSASTGTGPGTPG |
| | AGCGGTACTGCTTCTTCCTCTCCAGGTTCTACTAGCTCTACTG | SGTASSSPGSTSSTA |
| | CTGAATCTCCTGGCCCAGGTACTTCTCCTAGCGGTGAATCTTC | ESPGPGTSPSGESST |
| | TACCGCTCCAGGTACCTCTACTCCGGAAAGCGGTTCTGCATCT | APGTSTPESGSASP |
| | CCA | |
| LCW462_r27 | GGTACCTCTACTGAACCTTCTGAGGGCAGCGCTCCAGGTACT | GTSTEPSEGSAPGT |
| | TCTGAAAGCGCTACCCCGGAGTCCGGTCCAGGTACTTCTACT | SESATPESGPGTSTE |
| | GAACCGTCCGAAGGTAGCGCACCAGGTACTTCTACTGAACCG | PSEGSAPGTSTEPSE |
| | TCTGAAGGTAGCGCACCAGGTACTTCTGAAAGCGCAACCCCG | GSAPGTSESATPES |
| | GAATCCGGCCCAGGTACCTCTGAAAGCGCAACCCCGGAGTCC | GPGTSESATPESGP |
| | GGCCCAGGTACTCCTGGCAGCGGTACCGCTTCTTCTTCTCCAG | GTPGSGTASSSPGA |
| | GTGCTTCTCCTGGTACTAGCTCTACTGGTTCTCCAGGTGCTTC | SPGTSSTGSPGASP |
| | TCCGGGCACTAGCTCTACTGGTTCTCCAGGTAGCCCTGCTGGC | GTSSTGSPGSPAGS |
| | TCTCCGACTTCTACTGAGGAAGGTAGCCCGGCTGGTTCTCCG | PTSTEEGSPAGSPTS |
| | ACTTCTACTGAGGAAGGTACTTCTACCGAACCTTCCGAAGGT | TEEGTSTEPSEGSAP |
| | AGCGCTCCA | |
| LCW462_r28 | GGTAGCCCAGCAGGCTCTCCGACTTCCACTGAGGAAGGTACT | GSPAGSPTSTEEGT |
| | TCTACTGAACCTTCCGAAGGCAGCGCACCAGGTACCTCTACT | STEPSEGSAPGTSTE |
| | GAACCTTCTGAGGGCAGCGCTCCAGGTACCTCTACCGAACCG | PSEGSAPGTSTEPSE |
| | TCTGAAGGTAGCGCACCAGGTACCTCTGAAAGCGCAACTCCT | GSAPGTSESATPES |
| | GAGTCCGGTCCAGGTACTTCTGAAAGCGCAACCCCGGAGTCT | GPGTSESATPESGP |
| | GGCCCAGGTACCCCGGGTAGCGGTACTGCTTCTTCCTCTCCAG | GTPGSGTASSSPGS |
| | GTAGCTCTACCCCTTCTGGTGCAACCGGCTCTCCAGGTGCTTC | STPSGATGSPGASP |
| | TCCGGGCACCAGCTCTACCGGTTCTCCAGGTACCTCTACTGAA | GTSSTGSPGTSTEPS |
| | CCTTCTGAGGGCAGCGCTCCAGGTACTTCTGAAAGCGCTACC | EGSAPGTSESATPE |
| | CCGGAGTCCGGTCCAGGTACTTCTACTGAACCGTCCGAAGGT | SGPGTSTEPSEGSAP |
| | AGCGCACCA | |
| LCW462_r38 | GGTAGCGAACCGGCAACCTCCGGCTCTGAAACTCCAGGTACT | GSEPATSGSETPGT |
| | TCTGAAAGCGCTACTCCGGAATCCGGCCCAGGTAGCGAACCG | SESATPESGPGSEPA |
| | GCTACTTCCGGCTCTGAAACCCCAGGTAGCTCTACCCCGTCTG | TSGSETPGSSTPSGA |
| | GTGCAACCGGCTCCCCAGGTACTCCTGGTAGCGGTACCGCTT | TGSPGTPGSGTASS |
| | CTTCTTCTCCAGGTAGCTCTACTCCGTCTGGTGCTACCGGCTC | SPGSSTPSGATGSP |
| | CCCAGGTGCATCTCCTGGTACCAGCTCTACCGGTTCTCCAGGT | GASPGTSSTGSPGS |
| | AGCTCTACTCCTTCTGGTGCTACTGGCTCTCCAGGTGCTTCCC | STPSGATGSPGASP |
| | CGGGTACCAGCTCTACCGGTTCTCCAGGTAGCGAACCTGCTA | GTSSTGSPGSEPATS |
| | CTTCTGGTTCTGAAACTCCAGGTACTTCTACCGAACCGTCCGA | GSETPGTSTEPSEGS |
| | GGGTAGCGCTCCAGGTAGCGAACCTGCTACTTCTGGTTCTGA | APGSEPATSGSETP |
| | AACTCCA | |
| LCW462_r39 | GGTACCTCTACTGAACCTTCCGAAGGCAGCGCTCCAGGTACC | GTSTEPSEGSAPGT |
| | TCTACCGAACCGTCCGAGGGCAGCGCACCAGGTACTTCTGAA | STEPSEGSAPGTSES |
| | AGCGCAACCCCTGAATCCGGTCCAGGTAGCCCTGCTGGCTCT | ATPESGPGSPAGSP |
| | CCGACTTCTACTGAGGAAGGTAGCCCGGCTGGTTCTCCGACT | TSTEEGSPAGSPTST |
| | TCTACTGAGGAAGGTACTTCTACCGAACCTTCCGAAGGTAGC | EEGTSTEPSEGSAP |
| | GCTCCAGGTAGCCCGGCTGGTTCTCCGACTTCCACCGAGGAA | GSPAGSPTSTEEGT |
| | GGTACCTCTACTGAACCTTCTGAGGGTAGCGCTCCAGGTACC | STEPSEGSAPGTSTE |
| | TCTACTGAACCTTCCGAAGGCAGCGCTCCAGGTGCTTCCCCG | PSEGSAPGASPGTS |
| | GGCACCAGCTCTACTGGTTCTCCAGGTTCTAGCCCGTCTGCTT | STGSPGSSPSASTGT |
| | CTACTGGTACTGGTCCAGGTTCTAGCCCTTCTGCTTCCACTGG | GPGSSPSASTGTGP |
| | TACTGGTCCA | |
| LCW462_r41 | GGTAGCTCTACCCCGTCTGGTGCTACCGGTTCCCCAGGTGCTT | GSSTPSGATGSPGA |
| | CTCCTGGTACTAGCTCTACCGGTTCTCCAGGTAGCTCTACCCC | SPGTSSTGSPGSSTP |
| | GTCTGGTGCTACTGGCTCTCCAGGTAGCCCTGCTGGCTCTCCA | SGATGSPGSPAGSP |
| | ACCTCCACCGAAGAAGGTACCTCTGAAAGCGCAACCCCTGAA | TSTEEGTSESATPES |
| | TCCGGCCCAGGTAGCGAACCGGCAACCTCCGGTTCTGAAACC | GPGSEPATSGSETP |
| | CCAGGTGCATCTCCTGGTACTAGCTCTACTGGTTCTCCAGGTA | GASPGTSSTGSPGS |
| | GCTCTACTCCGTCTGGTGCAACCGGCTCTCCAGGTTCTAGCCC | STPSGATGSPGSSPS |
| | TTCTGCATCTACCGGTACTGGTCCAGGTTCTACCAGCGAATCC | ASTGTGPGSTSESPS |
| | CCTTCTGGTACTGCTCCAGGTTCTACCAGCGAATCCCCTTCTG | GTAPGSTSESPSGT |
| | GCACCGCACCAGGTACTTCTACCCCTGAAAGCGGCTCCGCTT | APGTSTPESGSASP |
| | CTCCA | |
| LCW462_r42 | GGTTCTACCAGCGAATCTCCTTCTGGCACCGCTCCAGGTTCTA | GSTSESPSGTAPGST |
| | CTAGCGAATCCCCGTCTGGTACCGCACCAGGTACTTCTCCTAG | SESPSGTAPGTSPSG |
| | CGGCGAATCTTCTACCGCACCAGGTACCTCTGAAAGCGCTAC | ESSTAPGTSESATPE |
| | TCCGGAGTCTGGCCCAGGTACCTCTACTGAACCGTCTGAGGG | SGPGTSTEPSEGSAP |
| | TAGCGCTCCAGGTACTTCTACTGAACCGTCCGAAGGTAGCGC | GTSTEPSEGSAPGT |
| | ACCAGGTACCTCTACTGAACCTTCTGAGGGCAGCGCTCCAGG | STEPSEGSAPGTSES |
| | TACTTCTGAAAGCGCTACCCCGGAGTCCGGTCCAGGTACTTCT | ATPESGPGTSTEPSE |
| | ACTGAACCGTCCGAAGGTAGCGCACCAGGTAGCTCTACCCCG | GSAPGSSTPSGATG |
| | TCTGGTGCTACCGGTTCCCCAGGTGCTTCTCCTGGTACTAGCT | SPGASPGTSSTGSP |
| | CTACCGGTTCTCCAGGTAGCTCTACCCCGTCTGGTGCTACTGG | GSSTPSGATGSP |
| | CTCTCCA | |
| LCW462_r43 | GGTTCTACTAGCTCTACTGCAGAATCTCCGGGCCCAGGTACCT | GSTSSTAESPGPGTS |
| | CTCCTAGCGGTGAATCTTCTACCGCTCCAGGTACTTCTCCGAG | PSGESSTAPGTSPSG |
| | CGGTGAATCTTCTACCGCTCCAGGTTCTACTAGCTCTACCGCT | ESSTAPGSTSSTAES |
| | GAATCTCCGGGTCCAGGTTCTACCAGCTCTACTGCAGAATCTC | PGPGSTSSTAESPGP |
| | CTGGCCCAGGTACTTCTACTCCGGAAAGCGGTTCCGCTTCTCC | GTSTPESGSASPGTS |
| | AGGTACTTCTCCTAGCGGTGAATCTTCTACCGCTCCAGGTTCT | PSGESSTAPGSTSST |
| | ACCAGCTCTACTGCTGAATCTCCTGGCCCAGGTACTTCTACCC | AESPGPGTSTPESGS |
| | CGGAAAGCGGCTCCGCTTCTCCAGGTTCTACCAGCTCTACCG | ASPGSTSSTAESPGP |
| | CTGAATCTCCTGGCCCAGGTTCTACTAGCGAATCTCCGTCTGG | GSTSESPSGTAPGTS |
| | CACCGCACCAGGTACTTCCCCTAGCGGTGAATCTTCTACTGCA | PSGESSTAP |
| | CCA | |
| LCW462_r45 | GGTACCTCTACTCCGGAAAGCGGTTCCGCATCTCCAGGTTCTA | GTSTPESGSASPGST |
| | CCAGCGAATCCCCGTCTGGCACCGCACCAGGTTCTACTAGCT | SESPSGTAPGSTSST |
| | CTACTGCTGAATCTCCGGGCCCAGGTACCTCTACTGAACCTTC | AESPGPGTSTEPSE |
| | CGAAGGCAGCGCTCCAGGTACCTCTACCGAACCGTCCGAGGG | GSAPGTSTEPSEGS |
| | CAGCGCACCAGGTACTTCTGAAAGCGCAACCCCTGAATCCGG | APGTSESATPESGP |
| | TCCAGGTACCTCTGAAAGCGCTACTCCGGAGTCTGGCCCAGG | GTSESATPESGPGT |
| | TACCTCTACTGAACCGTCTGAGGGTAGCGCTCCAGGTACTTCT | STEPSEGSAPGTSTE |
| | ACTGAACCGTCCGAAGGTAGCGCACCAGGTACTTCTGAAAGC | PSEGSAPGTSESATP |
| | GCTACTCCGGAGTCCGGTCCAGGTACCTCTACCGAACCGTCC | ESGPGTSTEPSEGS |
| | GAAGGCAGCGCTCCAGGTACTTCTACTGAACCTTCTGAGGGT | APGTSTEPSEGSAP |
| | AGCGCTCCC | |
| LCW462_r47 | GGTACCTCTACCGAACCGTCCGAGGGTAGCGCACCAGGTACC | GTSTEPSEGSAPGT |
| | TCTACTGAACCGTCTGAGGGTAGCGCTCCAGGTAGCGAACCG | STEPSEGSAPGSEPA |
| | GCAACCTCCGGTTCTGAAACTCCAGGTACTTCTACTGAACCGT | TSGSETPGTSTEPSE |
| | CTGAAGGTAGCGCACCAGGTACTTCTGAAAGCGCAACCCCGG | GSAPGTSESATPES |
| | AATCCGGCCCAGGTACCTCTGAAAGCGCAACCCCGGAGTCCG | GPGTSESATPESGP |
| | GCCCAGGTGCATCTCCGGGTACTAGCTCTACCGGTTCTCCAG | GASPGTSSTGSPGS |
| | GTTCTAGCCCTTCTGCTTCCACTGGTACCGGCCCAGGTAGCTC | SPSASTGTGPGSSTP |
| | TACCCCGTCTGGTGCTACTGGTTCCCCAGGTAGCTCTACTCCG | SGATGSPGSSTPSG |
| | TCTGGTGCAACCGGTTCCCCAGGTAGCTCTACTCCTTCTGGTG | ATGSPGSSTPSGAT |
| | CTACTGGCTCCCCAGGTGCATCCCCTGGCACCAGCTCTACCG | GSPGASPGTSSTGSP |
| | GTTCTCCA | |
| LCW462_r54 | GGTAGCGAACCGGCAACCTCTGGCTCTGAAACTCCAGGTAGC | GSEPATSGSETPGS |
| | GAACCTGCAACCTCCGGCTCTGAAACCCCAGGTACTTCTACT | EPATSGSETPGTSTE |
| | GAACCTTCTGAGGGCAGCGCACCAGGTAGCGAACCTGCAACC | PSEGSAPGSEPATS |
| | TCTGGCTCTGAAACCCCAGGTACCTCTGAAAGCGCTACTCCT | GSETPGTSESATPES |
| | GAATCTGGCCCAGGTACTTCTACTGAACCGTCCGAGGGCAGC | GPGTSTEPSEGSAP |
| | GCACCAGGTAGCTCTACTCCGTCTGGTGCTACCGGCTCTCCAG | GSSTPSGATGSPGS |
| | GTAGCTCTACCCCTTCTGGTGCAACCGGCTCCCCAGGTGCTTC | STPSGATGSPGASP |
| | TCCGGGTACCAGCTCTACTGGTTCTCCAGGTAGCTCTACCCCG | GTSSTGSPGSSTPSG |
| | TCTGGTGCTACCGGTTCCCCAGGTGCTTCTCCTGGTACTAGCT | ATGSPGASPGTSST |
| | CTACCGGTTCTCCAGGTAGCTCTACCCCGTCTGGTGCTACTGG | GSPGSSTPSGATGSP |
| | CTCTCCA | |
| LCW462_r55 | GGTACTTCTACCGAACCGTCCGAGGGCAGCGCTCCAGGTACT | GTSTEPSEGSAPGT |
| | TCTACTGAACCTTCTGAAGGCAGCGCTCCAGGTACTTCTACTG | STEPSEGSAPGTSTE |
| | AACCTTCCGAAGGTAGCGCACCAGGTACTTCTGAAAGCGCTA | PSEGSAPGTSESATP |
| | CTCCGGAGTCCGGTCCAGGTACCTCTACCGAACCGTCCGAAG | ESGPGTSTEPSEGS |
| | GCAGCGCTCCAGGTACTTCTACTGAACCTTCTGAGGGTAGCG | APGTSTEPSEGSAP |
| | CTCCAGGTTCTACTAGCGAATCTCCGTCTGGCACTGCTCCAGG | GSTSESPSGTAPGTS |
| | TACTTCTCCTAGCGGTGAATCTTCTACCGCTCCAGGTACTTCC | PSGESSTAPGTSPSG |
| | CCTAGCGGCGAATCTTCTACCGCTCCAGGTAGCCCGGCTGGC | ESSTAPGSPAGSPTS |
| | TCTCCTACCTCTACTGAGGAAGGTACTTCTGAAAGCGCTACTC | TEEGTSESATPESGP |
| | CTGAGTCTGGTCCAGGTACCTCTACTGAACCGTCCGAAGGTA | GTSTEPSEGSAP |
| | GCGCTCCA | |
| LCW462_r57 | GGTACTTCTACTGAACCTTCCGAAGGTAGCGCTCCAGGTAGC | GTSTEPSEGSAPGS |
| | GAACCTGCTACTTCTGGTTCTGAAACCCCAGGTAGCCCGGCT | EPATSGSETPGSPA |
| | GGCTCTCCGACCTCCACCGAGGAAGGTAGCCCGGCAGGCTCT | GSPTSTEEGSPAGSP |
| | CCGACCTCTACTGAGGAAGGTACTTCTGAAAGCGCAACCCCG | TSTEEGTSESATPES |
| | GAGTCCGGCCCAGGTACCTCTACCGAACCGTCTGAGGGCAGC | GPGTSTEPSEGSAP |
| | GCACCAGGTACCTCTACTGAACCTTCCGAAGGCAGCGCTCCA | GTSTEPSEGSAPGT |
| | GGTACCTCTACCGAACCGTCCGAGGGCAGCGCACCAGGTACT | STEPSEGSAPGTSES |
| | TCTGAAAGCGCAACCCCTGAATCCGGTCCAGGTAGCTCTACT | ATPESGPGSSTPSG |
| | CCGTCTGGTGCAACCGGCTCCCCAGGTTCTAGCCCGTCTGCTT | ATGSPGSSPSASTG |
| | CCACTGGTACTGGCCCAGGTGCTTCCCCGGGCACCAGCTCTA | TGPGASPGTSSTGSP |
| | CTGGTTCTCCA | |
| LCW462_r61 | GGTAGCGAACCGGCTACTTCCGGCTCTGAGACTCCAGGTAGC | GSEPATSGSETPGSP |
| | CCTGCTGGCTCTCCGACCTCTACCGAAGAAGGTACCTCTGAA | AGSPTSTEEGTSES |
| | AGCGCTACCCCTGAGTCTGGCCCAGGTACCTCTACTGAACCTT | ATPESGPGTSTEPSE |
| | CCGAAGGCAGCGCTCCAGGTACCTCTACCGAACCGTCCGAGG | GSAPGTSTEPSEGS |
| | GCAGCGCACCAGGTACTTCTGAAAGCGCAACCCCTGAATCCG | APGTSESATPESGP |
| | GTCCAGGTACCTCTACTCCGGAAAGCGGTTCCGCATCTCCAG | GTSTPESGSASPGST |
| | GTTCTACCAGCGAATCCCCGTCTGGCACCGCACCAGGTTCTA | SESPSGTAPGSTSST |
| | CTAGCTCTACTGCTGAATCTCCGGGCCCAGGTACTTCTGAAA | AESPGPGTSESATP |
| | GCGCTACTCCGGAGTCCGGTCCAGGTACCTCTACCGAACCGT | ESGPGTSTEPSEGS |
| | CCGAAGGCAGCGCTCCAGGTACTTCTACTGAACCTTCTGAGG | APGTSTEPSEGSAP |
| | GTAGCGCTCCA | |
| LCW462_r64 | GGTACTTCTACCGAACCGTCCGAGGGCAGCGCTCCAGGTACT | GTSTEPSEGSAPGT |
| | TCTACTGAACCTTCTGAAGGCAGCGCTCCAGGTACTTCTACTG | STEPSEGSAPGTSTE |
| | AACCTTCCGAAGGTAGCGCACCAGGTACCTCTACCGAACCGT | PSEGSAPGTSTEPSE |
| | CTGAAGGTAGCGCACCAGGTACCTCTGAAAGCGCAACTCCTG | GSAPGTSESATPES |
| | AGTCCGGTCCAGGTACTTCTGAAAGCGCAACCCCGGAGTCTG | GPGTSESATPESGP |
| | GCCCAGGTACTCCTGGCAGCGGTACCGCATCTTCCTCTCCAG | GTPGSGTASSSPGS |
| | GTAGCTCTACTCCGTCTGGTGCAACTGGTTCCCCAGGTGCTTC | STPSGATGSPGASP |
| | TCCGGGTACCAGCTCTACCGGTTCTCCAGGTTCCACCAGCTCT | GTSSTGSPGSTSSTA |
| | ACTGCTGAATCTCCTGGTCCAGGTACCTCTCCTAGCGGTGAAT | ESPGPGTSPSGESST |
| | CTTCTACTGCTCCAGGTACTTCTACTCCTGAAAGCGGCTCTGC | APGTSTPESGSASP |
| | TTCTCCA | |
| LCW462_r67 | GGTAGCCCGGCAGGCTCTCCGACCTCTACTGAGGAAGGTACT | GSPAGSPTSTEEGT |
| | TCTGAAAGCGCAACCCCGGAGTCCGGCCCAGGTACCTCTACC | SESATPESGPGTSTE |
| | GAACCGTCTGAGGGCAGCGCACCAGGTACTTCTGAAAGCGCA | PSEGSAPGTSESATP |
| | ACCCCTGAATCCGGTCCAGGTAGCGAACCGGCTACTTCTGGC | ESGPGSEPATSGSE |
| | TCTGAGACTCCAGGTACTTCTACCGAACCGTCCGAAGGTAGC | TPGTSTEPSEGSAP |
| | GCACCAGGTAGCCCGGCTGGTTCTCCGACTTCCACCGAGGAA | GSPAGSPTSTEEGT |
| | GGTACCTCTACTGAACCTTCTGAGGGTAGCGCTCCAGGTACC | STEPSEGSAPGTSTE |
| | TCTACTGAACCTTCCGAAGGCAGCGCTCCAGGTACTTCTACC | PSEGSAPGTSTEPSE |
| | GAACCGTCCGAGGGCAGCGCTCCAGGTACTTCTACTGAACCT | GSAPGTSTEPSEGS |
| | TCTGAAGGCAGCGCTCCAGGTACTTCTACTGAACCTTCCGAA | APGTSTEPSEGSAP |
| | GGTAGCGCACCA | |
| LCW462_r69 | GGTACTTCTCCGAGCGGTGAATCTTCTACCGCACCAGGTTCTA | GTSPSGESSTAPGST |
| | CTAGCTCTACCGCTGAATCTCCGGGCCCAGGTACTTCTCCGAG | SSTAESPGPGTSPSG |
| | CGGTGAATCTTCTACTGCTCCAGGTACCTCTGAAAGCGCTACT | ESSTAPGTSESATPE |
| | CCGGAGTCTGGCCCAGGTACCTCTACTGAACCGTCTGAGGGT | SGPGTSTEPSEGSAP |
| | AGCGCTCCAGGTACTTCTACTGAACCGTCCGAAGGTAGCGCA | GTSTEPSEGSAPGSS |
| | CCAGGTTCTAGCCCTTCTGCATCTACTGGTACTGGCCCAGGTA | PSASTGTGPGSSTPS |
| | GCTCTACTCCTTCTGGTGCTACCGGCTCTCCAGGTGCTTCTCC | GATGSPGASPGTSS |
| | GGGTACTAGCTCTACCGGTTCTCCAGGTACTTCTACTCCGGAA | TGSPGTSTPESGSAS |
| | AGCGGTTCCGCATCTCCAGGTACTTCTCCTAGCGGTGAATCTT | PGTSPSGESSTAPGT |
| | CTACTGCTCCAGGTACCTCTCCTAGCGGCGAATCTTCTACTGC | SPSGESSTAP |
| | TCCA | |
| LCW462_r70 | GGTACCTCTGAAAGCGCTACTCCGGAGTCTGGCCCAGGTACC | GTSESATPESGPGT |
| | TCTACTGAACCGTCTGAGGGTAGCGCTCCAGGTACTTCTACTG | STEPSEGSAPGTSTE |
| | AACCGTCCGAAGGTAGCGCACCAGGTAGCCCTGCTGGCTCTC | PSEGSAPGSPAGSP |
| | CGACTTCTACTGAGGAAGGTAGCCCGGCTGGTTCTCCGACTT | TSTEEGSPAGSPTST |
| | CTACTGAGGAAGGTACTTCTACCGAACCTTCCGAAGGTAGCG | EEGTSTEPSEGSAP |
| | CTCCAGGTTCTAGCCCTTCTGCTTCCACCGGTACTGGCCCAGG | GSSPSASTGTGPGS |
| | TAGCTCTACCCCTTCTGGTGCTACCGGCTCCCCAGGTAGCTCT | STPSGATGSPGSSTP |
| | ACTCCTTCTGGTGCAACTGGCTCTCCAGGTAGCGAACCGGCA | SGATGSPGSEPATS |
| | ACTTCCGGCTCTGAAACCCCAGGTACTTCTGAAAGCGCTACT | GSETPGTSESATPES |
| | CCTGAGTCTGGCCCAGGTAGCGAACCTGCTACCTCTGGCTCT | GPGSEPATSGSETP |
| | GAAACCCCA | |
| LCW462_r72 | GGTACTTCTACCGAACCGTCCGAAGGCAGCGCTCCAGGTACC | GTSTEPSEGSAPGT |
| | TCTACTGAACCTTCCGAGGGCAGCGCTCCAGGTACCTCTACC | STEPSEGSAPGTSTE |
| | GAACCTTCTGAAGGTAGCGCACCAGGTAGCTCTACCCCGTCT | PSEGSAPGSSTPSG |
| | GGTGCTACCGGTTCCCCAGGTGCTTCTCCTGGTACTAGCTCTA | ATGSPGASPGTSST |
| | CCGGTTCTCCAGGTAGCTCTACCCCGTCTGGTGCTACTGGCTC | GSPGSSTPSGATGS |
| | TCCAGGTACTTCTGAAAGCGCAACCCCTGAATCCGGTCCAGG | PGTSESATPESGPGS |
| | TAGCGAACCGGCTACTTCTGGCTCTGAGACTCCAGGTACTTCT | EPATSGSETPGTSTE |
| | ACCGAACCGTCCGAAGGTAGCGCACCAGGTTCTACTAGCGAA | PSEGSAPGSTSESPS |
| | TCTCCTTCTGGCACTGCACCAGGTTCTACCAGCGAATCTCCGT | GTAPGSTSESPSGT |
| | CTGGCACTGCACCAGGTACCTCTACCCCTGAAAGCGGTTCCG | APGTSTPESGSASP |
| | CTTCTCCA | |
| LCW462_r73 | GGTACCTCTACTCCTGAAAGCGGTTCTGCATCTCCAGGTTCCA | GTSTPESGSASPGST |
| | CTAGCTCTACCGCAGAATCTCCGGGCCCAGGTTCTACTAGCTC | SSTAESPGPGSTSST |
| | TACTGCTGAATCTCCTGGCCCAGGTTCTAGCCCTTCTGCATCT | AESPGPGSSPSAST |
| | ACTGGTACTGGCCCAGGTAGCTCTACTCCTTCTGGTGCTACCG | GTGPGSSTPSGATG |
| | GCTCTCCAGGTGCTTCTCCGGGTACTAGCTCTACCGGTTCTCC | SPGASPGTSSTGSP |
| | AGGTAGCGAACCGGCAACCTCCGGCTCTGAAACCCCAGGTAC | GSEPATSGSETPGT |
| | CTCTGAAAGCGCTACTCCTGAATCCGGCCCAGGTAGCCCGGC | SESATPESGPGSPA |
| | AGGTTCTCCGACTTCCACTGAGGAAGGTTCTACTAGCGAATC | GSPTSTEEGSTSESP |
| | TCCTTCTGGCACTGCACCAGGTTCTACCAGCGAATCTCCGTCT | SGTAPGSTSESPSGT |
| | GGCACTGCACCAGGTACCTCTACCCCTGAAAGCGGTTCCGCT | APGTSTPESGSASP |
| | TCTCCC | |
| LCW462_r78 | GGTAGCCCGGCTGGCTCTCCTACCTCTACTGAGGAAGGTACT | GSPAGSPTSTEEGT |
| | TCTGAAAGCGCTACTCCTGAGTCTGGTCCAGGTACCTCTACTG | SESATPESGPGTSTE |
| | AACCGTCCGAAGGTAGCGCTCCAGGTTCTACCAGCGAATCTC | PSEGSAPGSTSESPS |
| | CTTCTGGCACCGCTCCAGGTTCTACTAGCGAATCCCCGTCTGG | GTAPGSTSESPSGT |
| | TACCGCACCAGGTACTTCTCCTAGCGGCGAATCTTCTACCGCA | APGTSPSGESSTAP |
| | CCAGGTACCTCTACCGAACCTTCCGAAGGTAGCGCTCCAGGT | GTSTEPSEGSAPGSP |
| | AGCCCGGCAGGTTCTCCTACTTCCACTGAGGAAGGTACTTCT | AGSPTSTEEGTSTEP |
| | ACCGAACCTTCTGAGGGTAGCGCACCAGGTAGCGAACCTGCA | SEGSAPGSEPATSG |
| | ACCTCTGGCTCTGAAACCCCAGGTACCTCTGAAAGCGCTACT | SETPGTSESATPESG |
| | CCTGAATCTGGCCCAGGTACTTCTACTGAACCGTCCGAGGGC | PGTSTEPSEGSAP |
| | AGCGCACCA | |
| LCW462_r79 | GGTACCTCTACCGAACCTTCCGAAGGTAGCGCTCCAGGTAGC | GTSTEPSEGSAPGSP |
| | CCGGCAGGTTCTCCTACTTCCACTGAGGAAGGTACTTCTACCG | AGSPTSTEEGTSTEP |
| | AACCTTCTGAGGGTAGCGCACCAGGTACCTCCCCTAGCGGCG | SEGSAPGTSPSGESS |
| | AATCTTCTACTGCTCCAGGTACCTCTCCTAGCGGCGAATCTTC | TAPGTSPSGESSTAP |
| | TACCGCTCCAGGTACCTCCCCTAGCGGTGAATCTTCTACCGCA | GTSPSGESSTAPGST |
| | CCAGGTTCTACCAGCGAATCCCCTTCTGGTACTGCTCCAGGTT | SESPSGTAPGSTSES |
| | CTACCAGCGAATCCCCTTCTGGCACCGCACCAGGTACTTCTAC | PSGTAPGTSTPESGS |
| | CCCTGAAAGCGGCTCCGCTTCTCCAGGTAGCGAACCTGCAAC | ASPGSEPATSGSETP |
| | CTCTGGCTCTGAAACCCCAGGTACCTCTGAAAGCGCTACTCCT | GTSESATPESGPGT |
| | GAATCTGGCCCAGGTACTTCTACTGAACCGTCCGAGGGCAGC | STEPSEGSAP |
| | GCACCA | |
| LCW462_r87 | GGTAGCGAACCGGCAACCTCTGGCTCTGAAACCCCAGGTACC | GSEPATSGSETPGT |
| | TCTGAAAGCGCTACTCCGGAATCTGGTCCAGGTACTTCTGAA | SESATPESGPGTSES |
| | AGCGCTACTCCGGAATCCGGTCCAGGTACTTCTCCGAGCGGT | ATPESGPGTSPSGES |
| | GAATCTTCTACCGCACCAGGTTCTACTAGCTCTACCGCTGAAT | STAPGSTSSTAESPG |
| | CTCCGGGCCCAGGTACTTCTCCGAGCGGTGAATCTTCTACTGC | PGTSPSGESSTAPGS |
| | TCCAGGTTCTACTAGCGAATCCCCGTCTGGTACTGCTCCAGGT | TSESPSGTAPGTSPS |
| | ACTTCCCCTAGCGGTGAATCTTCTACTGCTCCAGGTTCTACCA | GESSTAPGSTSSTA |
| | GCTCTACCGCAGAATCTCCGGGTCCAGGTAGCTCTACTCCGTC | ESPGPGSSTPSGAT |
| | TGGTGCAACCGGTTCCCCAGGTAGCTCTACCCCTTCTGGTGCA | GSPGSSTPSGATGS |
| | ACCGGCTCCCCAGGTAGCTCTACCCCTTCTGGTGCAAACTGG | PGSSTPSGANWLS |
| | CTCTCC | |
| LCW462_r88 | GGTAGCCCTGCTGGCTCTCCGACTTCTACTGAGGAAGGTAGC | GSPAGSPTSTEEGSP |
| | CCGGCTGGTTCTCCGACTTCTACTGAGGAAGGTACTTCTACCG | AGSPTSTEEGTSTEP |
| | AACCTTCCGAAGGTAGCGCTCCAGGTACCTCTACTGAACCTT | SEGSAPGTSTEPSE |
| | CCGAAGGCAGCGCTCCAGGTACCTCTACCGAACCGTCCGAGG | GSAPGTSTEPSEGS |
| | GCAGCGCACCAGGTACTTCTGAAAGCGCAACCCCTGAATCCG | APGTSESATPESGP |
| | GTCCAGGTGCATCTCCTGGTACCAGCTCTACCGGTTCTCCAGG | GASPGTSSTGSPGS |
| | TAGCTCTACTCCTTCTGGTGCTACTGGCTCTCCAGGTGCTTCC | STPSGATGSPGASP |
| | CCGGGTACCAGCTCTACCGGTTCTCCAGGTAGCTCTACCCCGT | GTSSTGSPGSSTPSG |
| | CTGGTGCTACTGGTTCTCCAGGTACTCCGGGCAGCGGTACTG | ATGSPGTPGSGTAS |
| | CTTCTTCCTCTCCAGGTAGCTCTACCCCTTCTGGTGCTACTGG | SSPGSSTPSGATGSP |
| | CTCTCCA | |
| LCW462_r89 | GGTAGCTCTACCCCGTCTGGTGCTACTGGTTCTCCAGGTACTC | GSSTPSGATGSPGT |
| | CGGGCAGCGGTACTGCTTCTTCCTCTCCAGGTAGCTCTACCCC | PGSGTASSSPGSSTP |
| | TTCTGGTGCTACTGGCTCTCCAGGTAGCCCGGCTGGCTCTCCT | SGATGSPGSPAGSP |
| | ACCTCTACTGAGGAAGGTACTTCTGAAAGCGCTACTCCTGAG | TSTEEGTSESATPES |
| | TCTGGTCCAGGTACCTCTACTGAACCGTCCGAAGGTAGCGCT | GPGTSTEPSEGSAP |
| | CCAGGTACCTCTGAAAGCGCAACTCCTGAGTCTGGCCCAGGT | GTSESATPESGPGS |
| | AGCGAACCTGCTACCTCCGGCTCTGAGACTCCAGGTACCTCT | EPATSGSETPGTSES |
| | GAAAGCGCAACCCCGGAATCTGGTCCAGGTACTTCTACTGAA | ATPESGPGTSTEPSE |
| | CCGTCTGAAGGTAGCGCACCAGGTACTTCTGAAAGCGCAACC | GSAPGTSESATPES |
| | CCGGAATCCGGCCCAGGTACCTCTGAAAGCGCAACCCCGGAG | GPGTSESATPESGP |
| | TCCGGCCCA | |

### Example 7: Construction of XTEN_AM288

[0409] The entire library LCW0462 was dimerized as described in Example 6 resulting in a library of XTEN_AM288 clones designated LCW0463. 1512 isolates from library LCW0463 were screened using the protocol described in Example 6. 176 highly expressing clones were sequenced and 40 preferred XTEN_AM288 segments were chosen for the construction of multifunctional proteins that contain multiple XTEN segments with 288 amino acid residues.

### Example 8: Construction of XTEN_AM432

[0410] We generated a library of XTEN_AM432 segments by recombining segments from library LCW0462 of XTEN_AM144 segments and segments from library LCW0463 of XTEN_AM288 segments. This new library of XTEN_AM432 segment was designated LCW0464. Plasmids were isolated from cultures of E. coli harboring LCW0462 and LCW0463, respectively. 1512 isolates from library LCW0464 were screened using the protocol described in Example 6. 176 highly expressing clones were sequenced and 39 preferred XTEN_AM432 segment were chosen for the construction of longer XTENs and for the construction of multifunctional proteins that contain multiple XTEN segments with 432 amino acid residues.

[0411] In parallel we constructed library LMS0100 of XTEN_AM432 segments using preferred segments of XTEN_AM144 and XTEN_AM288. Screening this library yielded 4 isolates that were selected for further construction

### Example 9: Construction of XTEN_AM875

[0412] The sniffer vector pCW0359 was digested with BsaI and KpnI to remove the sniffer segment and the resulting vector fragment was isolated by agarose gel purification.

[0413] We annealed the phosphorylated oligonucleotide BsaI-AscI-KpnIforP: AGGTGCAAGCGCAAGCGGCGCGCCAAGCACGGGAGGTTCGTCTTCACTCGAGGGTAC (SEQ ID NO: 1652) and the non-phosphorylated oligonucleotide BsaI-AscI-KpnIrev: CCTCGAGTGAAGACGAACCTCCCGTGCTTGGCGCGCCGCTTGCGCTTGC (SEQ ID NO: 1653) for introducing the sequencing island A (SI-A) which encodes amino acids GASASGAPSTG (SEQ ID NO: 1654) and has the restriction enzyme AscI recognition nucleotide sequence GGCGCGCC inside. The annealed oligonucleotide pairs were ligated with BsaI and KpnI digested sniffer vector pCW0359 prepared above to yield pCW0466 containing SI-A. We then generated a library of XTEN_AM443 segments by recombining 43 preferred XTEN_AM432 segments from Example 8 and SI-A segments from pCW0466 at C-terminus using the same dimerization process described in Example 5. This new library of XTEN_AM443 segments was designated LCW0479.

[0414] We generated a library of XTEN_AM875 segments by recombining segments from library LCW0479 of XTEN_AM443 segments and 43 preferred XTEN_AM432 segments from Example 8 using the same dimerization process described in example 5. This new library of XTEN_AM875 segment was designated LCW0481.

### Example 10: Construction of XTEN_AM1318

[0415] We annealed the phosphorylated oligonucleotide BsaI-FseI-KpnIforP: AGGTCCAGAACCAACGGGGCCGGCCCCAAGCGGAGGTTCGTCTTCACTCGAGGGTAC (SEQ ID NO: 1655) and the non-phosphorylated oligonucleotide BsaI-FseI-KpnIrev: CCTCGAGTGAAGACGAACCTCCGCTTGGGGCCGGCCCCGTTGGTTCTGG (SEQ ID NO: 1656) for introducing the sequencing island B (SI-B) which encodes amino acids GPEPTGPAPSG (SEQ ID NO: 1657) and has the restriction enzyme FseI recognition nucleotide sequence GGCCGGCC inside. The annealed oligonucleotide pairs were ligated with BsaI and KpnI digested sniffer vector pCW0359 as used in Example 9 to yield pCW0467 containing SI-B. We then generated a library of XTEN_AM443 segments by recombining 43 preferred XTEN_AM432 segments from Example 8 and SI-B segments from pCW0467 at C-terminus using the same dimerization process described in example 5. This new library of XTEN_AM443 segments was designated LCW0480.

[0416] We generated a library of XTEN_AM1318 segments by recombining segments from library LCW0480 of XTEN_AM443 segments and segments from library LCW0481 of XTEN_AM875 segments using the same dimerization process as in Example 5. This new library of XTEN_AM1318 segment was designated LCW0487.

### Example 11: Construction of XTEN_AD864

[0417] Using the several consecutive rounds of dimerization, we assembled a collection of XTEN_AD864 sequences starting from segments of XTEN_AD36 listed in Example 1. These sequences were assembled as described in Example 5. Several isolates from XTEN_AD864 were evaluated and found to show good expression and excellent solubility under physiological conditions. One intermediate construct of XTEN_AD576 was sequenced. This clone was evaluated in a PK experiment in cynomolgus monkeys and a half-life of about 20 h was measured.

### Example 12: Construction of XTEN_AF864

[0418] Using the several consecutive rounds of dimerization, we assembled a collection of XTEN_AF864 sequences starting from segments of XTEN_AF36 listed in Example 3. These sequences were assembled as described in Example 5. Several isolates from XTEN_AF864 were evaluated and found to show good expression and excellent solubility under physiological conditions. One intermediate construct of XTEN_AF540 was sequenced. This clone was evaluated in a PK experiment in cynomolgus monkeys and a half-life of about 20 h was measured. A full length clone of XTEN_AF864 had excellent solubility and showed half-life exceeding 60 h in cynomolgus monkeys. A second set of XTEN_AF sequences was assembled including a sequencing island as described in Example 9.

### Example 13: Construction of XTEN_AG864

[0419] Using the several consecutive rounds of dimerization, we assembled a collection of XTEN_AG864 sequences starting from segments of XTEN_AD36 listed in Example 1. These sequences were assembled as described in Example 5. Several isolates from XTEN_AG864 were evaluated and found to show good expression and excellent solubility under physiological conditions. A full length clone of XTEN_AG864 had excellent solubility and showed half-life exceeding 60 h in cynomolgus monkeys.

### Example 14: Methods of Producing and Evaluating CFXTEN with Internal and Terminal XTEN

[0420] The design, construction and evaluation of CFXTEN comprising FVIII and one or more XTEN is accomplished using a systematic approach. The regions suitable for XTEN insertion sites include, but are to limited to regions at or proximal to the known domain boundaries of FVIII, exon boundaries, known surface loops, regions with a low degree of order, and hydrophilic regions. By analysis of the foregoing, different regions across the sequence of the FVIII B domain deleted (BDD) sequence have been identified as insertion sites for XTEN, non-limiting examples of which are listed in Tables 5-8, and shown schematically in FIGS. 8 and 9. Initially, individual constructs are created (using methods described, below) in which DNA encoding a single XTEN or XTEN fragment of a length ranging from 6 to 2004 amino acid residues is inserted into the FVIII sequence corresponding to or near (e.g., within 6 amino acids) each of the single insertion sites identified in Table 5, Table 6, Table 7, Table 8, and Table 9, and the resulting constructs are expressed and the recovered protein then evaluated for their effects on retention of procoagulant activity using, e.g., one of the in vitro assays of Table 49. For example, using the methods described below, constructs are made in which an XTEN sequence is inserted within the A1, A2, B, A3, C1 and C2 domain sequences of FVIII, as well as linked to the C-terminus, and the resulting expressed fusion proteins are evaluated in a chromogenic assay of Table 49, compared to a FVIII not linked to XTEN. CFXTEN fusion proteins can be further classified acting to high, intermediate and low categories based on the activities they exhibit. In those cases where the CFXTEN exhibits activity that is comparable or modestly reduced compared to FVIII, the insertion site is deemed favorable. In those cases where the activity is intermediate, the insertion site can be adjusted from 1-6 amino acids towards the N- or C-terminus of the insertion site and/or the length or net charge of the XTEN may be altered and the resulting construct(s) re-evaluated to determine whether the activity is improved. Alternatively, the XTEN is inserted into the construct with flanking cleavage sites; preferably sites that are susceptible to cleavage by proteases found in clotting assays, such that the XTEN is released during the activation of the FVIII component, thereby providing additional information about the suitability of the XTEN insertion site in the fusion protein.

[0421] Once all of the individual insertion sites are evaluated and the favorable insertion sites are identified, libraries of constructs are created with two, three, four, five or more XTEN inserted in the permutations of favorable sites. The length and net charge of the XTEN (e.g., XTEN of the AE versus AG family) are varied in order to ascertain the effects of these variables on FVIII activity and physicochemical properties of the fusion protein. CFXTEN constructs that retain a desired degree of in vitro procoagulant FVIII activity are then evaluated in vivo using mouse and/or dog models of hemophilia A, as described in Examples below, or other models known in the art. In addition, constructs are assayed in the presence of FVIII inhibitors and other anti-FVIII antibodies to determine constructs that retain activity. In addition, CFXTEN constructs are made that incorporate cleavage sequences at or near the junction(s) of FVIII and XTEN (e.g., sequences from Table 8) designed to release the XTEN and are evaluated for enhancement of FVIII activity and effects on terminal half-life. By the iterative process of making constructs combining different insertion sites, varying the length and composition qualities of the XTEN (e.g., different XTEN families), and evaluation, the skilled artisan obtains, by the foregoing methods, CFXTEN with desired properties, such as but not limited to of procoagulant FVIII activity, reduced binding with FVIII inhibitors, enhanced pharmacokinetic properties, ability to administer to a subject by different routes, and/or enhanced pharmaceutical properties.

### Example 15: Methods of Producing and Evaluating CFXTEN Containing FVIII and AE_XTEN

[0422] A general scheme for producing and evaluating CFXTEN compositions is presented in FIG. 15, and forms the basis for the general description of this Example. Using the disclosed methods and those known to one of ordinary skill in the art, together with guidance provided in the illustrative examples, a skilled artesian can create and evaluate CFXTEN fusion proteins comprising XTEN and FVIII or variants of FVIII known in the art. The Example is, therefore, to be construed as merely illustrative, and not limitative of the methods in any way whatsoever; numerous variations will be apparent to the ordinarily skilled artisan. In this Example, a CFXTEN of a factor VIII BDD linked to an XTEN of the AE family of motifs is created.

[0423] The general scheme for producing polynucleotides encoding XTEN is presented in FIGS. 11 and 12. FIG. 14 is a schematic flowchart of representative steps in the assembly of an XTEN polynucleotide construct in one of the embodiments of the invention. Individual oligonucleotides 501 are annealed into sequence motifs 502 such as a 12-amino acid motif (“12-mer”), which is ligated to additional sequence motifs from a library that can multimerize to create a pool that encompasses the desired length of the XTEN 504, as well as ligated to a smaller concentration of an oligo containing BbsI, and KpnI restriction sites 503. The motif libraries include specific sequence XTEN families; e.g., AD, AE, AF, AG, AM, or AQ sequences of Table 3. As illustrated in FIG. 14, the XTEN length, in this case, is 36 amino acid residues, but longer lengths are also achieved by this general process. For example, multimerization is performed by ligation, overlap extension, PCR assembly or similar cloning techniques known in the art that, in this case, result in a construct with 288 amino acid residues. The resulting pool of ligation products is gel-purified and the band with the desired length of XTEN is cut, resulting in an isolated XTEN gene with a stopper sequence 505. The XTEN gene can be cloned into a stuffer vector. In this case, the vector encodes an optional CBD sequence 506 and a GFP gene 508. Digestion is then performed with BbsI/HindIII to remove 507 and 508 and place the stop codon. The resulting product is then cloned into a BsaI/HindIII digested vector containing a gene encoding the FVIII, resulting in the gene 500 encoding a CFXTEN fusion protein with a 288 amino acid XTEN linked to the C-terminus of the factor VIII. As would be apparent to one of ordinary skill in the art, the methods are applied to create constructs in alternative configurations and with varying XTEN lengths or in multiple locations.

[0424] DNA sequences encoding FVIII are conveniently obtained by standard procedures known in the art from a cDNA library prepared from an appropriate cellular source, from a genomic library, or may be created synthetically (e.g., automated nucleic acid synthesis) using DNA sequences obtained from publicly available databases, patents, or literature references. In the present example, a FVIII B domain deleted (BDD) variant is prepared as described in Example 17. A gene or polynucleotide encoding the FVIII portion of the protein or its complement is then cloned into a construct, such as those described herein, which can be a plasmid or other vector under control of appropriate transcription and translation sequences for high level protein expression in a biological system. A second gene or polynucleotide coding for the XTEN portion or its complement is genetically fused to the nucleotides encoding the terminus of the FVIII gene by cloning it into the construct adjacent and in frame with the gene coding for the CF, through a ligation or multimerization step. In this manner, a chimeric DNA molecule coding for (or complementary to) the CFXTEN fusion protein is generated within the construct. Optionally, a gene encoding for a second XTEN is inserted and ligated in-frame internally to the nucleotides encoding the FVIII-encoding region. The constructs are designed in different configurations to encode various insertion sites of the XTEN in the FVIII sequence, including those of Table 5, Table 6, Table 7, Table 8, and Table 9 or those illustrated in FIGS. 8-9. Optionally, this chimeric DNA molecule is transferred or cloned into another construct that is a more appropriate expression vector; e.g., a vector appropriate for a mammalian host cell such as CHO, BHK and the like. At this point, a host cell capable of expressing the chimeric DNA molecule is transformed with the chimeric DNA molecule, described more completely, below, or by well-known methods, depending on the type of cellular host, as described supra.

[0425] Host cells containing the XTEN-FVIII expression vector are cultured in conventional nutrient media modified as appropriate for activating the promoter. The culture conditions, such as temperature, pH and the like, are those previously used with the host cell selected for expression, and will be apparent to the ordinarily skilled artisan. After expression of the fusion protein, culture broth is harvested and separated from the cell mass and the resulting crude extract retained for purification of the fusion protein.

[0426] Gene expression is measured in a sample directly, for example, by conventional Southern blotting, Northern blotting to quantitate the transcription of mRNA [Thomas, Proc. Natl. Acad. Sci. USA, 77:5201-5205 (1980)], dot blotting (DNA analysis), or in situ hybridization, using an appropriately labeled probe, based on the sequences provided herein. Alternatively, gene expression is measured by immunological of fluorescent methods, such as immunohistochemical staining of cells to quantitate directly the expression of gene product. Antibodies useful for immunohistochemical staining and/or assay of sample fluids may be either monoclonal or polyclonal, and may be prepared in any mammal. Conveniently, the antibodies may be prepared against the FVIII sequence polypeptide using a synthetic peptide based on the sequences provided herein or against exogenous sequence fused to FVIII and encoding a specific antibody epitope. Examples of selectable markers are well known to one of skill in the art and include reporters such as enhanced green fluorescent protein (EGFP), beta-galactosidase (β-gal) or chloramphenicol acetyltransferase (CAT).

[0427] The CFXTEN polypeptide product is purified via methods known in the art. Procedures such as gel filtration, affinity purification, salt fractionation, ion exchange chromatography, size exclusion chromatography, hydroxyapatite adsorption chromatography, hydrophobic interaction chromatography or gel electrophoresis are all techniques that may be used in the purification. Specific methods of purification are described in Robert K. Scopes, Protein Purification: Principles and Practice, Charles R. Castor, ed., Springer-Verlag 1994, and Sambrook, et al., supra. Multi-step purification separations are also described in Baron, et al., Crit. Rev. Biotechnol. 10:179-90 (1990) and Below, et al., J. Chromatogr. A. 679:67-83 (1994).

[0428] As illustrated in FIG. 15, the isolated CFXTEN fusion proteins are characterized for their chemical and activity properties. An isolated fusion protein is characterized, e.g., for sequence, purity, apparent molecular weight, solubility and stability using standard methods known in the art. The fusion protein meeting expected standards is evaluated for activity, which can be measured in vitro or in vivo by measuring one of the factor VIII-associated parameters described herein, using one or more assays disclosed herein, or using the assays of the Examples or Table 49.

[0429] In addition, the CFXTEN FVIII fusion protein is administered to one or more animal species to determine standard pharmacokinetic parameters and pharmacodynamic properties, as described in Examples 25 and 26.

[0430] By the iterative process of producing, expressing, and recovering CFXTEN constructs, followed by their characterization using methods disclosed herein or others known in the art, the CFXTEN compositions comprising CF and an XTEN are produced and evaluated to confirm the expected properties such as enhanced solubility, enhanced stability, improved pharmacokinetics and reduced immunogenicity, leading to an overall enhanced therapeutic activity compared to the corresponding unfused FVIII. For those fusion proteins not possessing the desired properties, a different sequence or configuration is constructed, expressed, isolated and evaluated by these methods in order to obtain a composition with such properties.

### Example 16: Construction of Expression Plasmids for BDD FVIII

[0431] I. Construction of B Domain Deleted FVIII (BDD FVIII) Expression Vectors

[0432] The expression vector encoding BDD FVIII was created by cloning the BDD FVIII open reading frame into the pcDNA4 vector (Invitrogen, CA) containing a polyA to allow for optimal mammalian expression of the FVIII gene, resulting in a construct designated pBC0100. Several natural sites were identified within this construct for cloning use, including BsiWI 48, AflII 381, PshAI 1098, KpnI 1873, BamHI 1931, PflMI 3094, ApaI 3574, XbaI 4325, NotI 4437, XhoI 4444, BstEII 4449, AgeI 4500, PmeI 4527. To facilitate assay development, nucleotides encoding Myc and His tag were introduced into the FVIII open reading frame. pBC0100 was PCR amplified using the following primers: 1) F8-BsiWI-F: tattccCGTACGgccgccaccATGCAAATAGAGCTCTCCACCT (SEQ ID NO: 1658); 2) F8-nostop-XhoI-R1: GGTGACCTCGAGcgtagaggtcctgtgcctcg (SEQ ID NO: 1659) to introduce BsiWI and XhoI in appropriate locations. The PCR product was digested with BsiWI and XhoI. PcDNA4-Myc-His/C was digested with Acc65I and XhoI, which generated two products of 5003 and 68 bps. The 5003 bps product was ligated with the digested PCR'ed FVIII fragment and used for DH5alpha transformation. The enzymes Acc65I and BsiWI create compatible ends but this ligation destroys the site for future digestion. The resulting construct was designated pBC0102 (pcDNA4-FVIII_3-Myc-His). To facilitate the design and execution of future cloning strategies, especially ones involving the creation of BDD FVIII expression constructs that contain multiple XTEN insertions, we selected additional unique restriction enzyme sites to incorporate, including BsiWI 908, NheI 1829 and ClaI 3281. The introduction of these sites was done via the QuikChange method (Agilent, CA) individually. The resulting construct was designated pBC0112 (pcDNA4-FVIII_4-Myc-His). To avoid problems that may arise from the linker peptides that connects between Myc/His and FVIII/Myc, and to remove restriction enzyme sites that are preferred for future XTEN insertion, we mutated the sequences encoding the peptide sequences from ARGHPF (SEQ ID NO: 1660) to GAGSPGAETA (SEQ ID NO: 178) (between FVIII and Myc), NMHTG (SEQ ID NO: 1661) to SPATG (SEQ ID NO: 1662) (between Myc and His) via the QuikChange method. The construct was designated pBC0114 (pcDNA4-FVIII_4-GAGSPGAETA-Myc-SPATG-His (‘GAGSPGAETA’ and ‘SPATG’ disclosed as SEQ ID NOS 178 and 1662, respectively)) (sequence in Table 21), which was used as the base vector for the design and creation of other expression vectors incorporating XTEN sequences. Expression and FVIII activity data for this construct are presented in

[0433] II. Construction of B Domain Deleted FVIII (BDD FVIII) Expression Vectors

[0434] The gene encoding BDD FVIII is synthesized by GeneArts (Regensburg, Germany) in the cloning vector pMK (pMK-BDD FVIII). The BDD FVIII proteins contain 1457 amino acids at a total molecular weight of 167539.66. There are 6 domains within the wild-type FVIII protein, the A1, A2, B, A3, C1 and C2 domains. In the BDD FVIII protein, most of the B domain has been deleted as it was shown to be an unstructured domain and the removal of the domain does not alter critical functions of this protein. The pMK vector used by GeneArts contains no promoter, and can not be used as an expression vector. Restriction enzyme sites NheI on the 5′ end and SfiI, SalI and XhoI on the 3′ end are introduced to facilitate subcloning of the DNA sequence encoding BDD FVIII into expression vectors, such as CET1019-HS (Millipore). Several unique restriction enzyme sites are also introduced into the FVIII sequence to allow further manipulation (e.g., insertion, mutagenesis) of the DNA sequences. Unique sites listed with their cut site include, but are not limited to: SacI 391, AfiII 700, SpeI 966, PshAI 1417, Acc65I 2192, KpnI 2192, BamHI 2250, HindIII 2658, PfoI 2960, PflMI 3413, ApaI 3893, Bsp1201 3893, SwaI 4265, OliI 4626, XbaI 4644, and BstBI 4673. The HindIII site resides at the very end of the A2 domain and can potentially be used for modification of the B domain. The synthesized pMK-BDD FVIII from GeneArts does not contain a stop codon. The stop codon is introduced by amplifying a 127 bp fragment of FVIII using the following primers: 5′-GTGAACTCTCTAGACCCACCG-3′ (SEQ ID NO: 1663); 5′-CTCCTCGAGGTCGACTCAGTAGAGGTCCTGTGCCTCG-3′ (SEQ ID NO: 1664). The fragment is digested with XbaI and SalI and ligated to XbaI/SalI digested pMK-BDD FVIII. The ligated DNA mixture is used to transform DH5a bacterial cells. Transformants are screened by DNA miniprep and the desired constructs are confirmed by DNA sequencing. The construct named pBC0027 (pMK-BDD FVIII-STOP) contains coding sequences that encode the BDD FVIII protein. The pBC0027 construct is then digested with NheI/SalI, and ligated with NheI/SalI digested CET1019-HS vector (Millipore). The CET1019-HS vector contains a human CMV promoter and a UCOE sequence to facilitate gene expression. The ligated DNA mixture is used to transform DH5a bacterial cells. Transformants are screened by DNA miniprep and the desired constructs are confirmed by DNA sequencing. The final construct is designated pBC0025 (CET1019-HS-BDD FVIII-STOP), which encodes the BDD FVIII protein under the control of a human CMV promoter. Introduction of the pBC0025 construct into mammalian cells is expected to allow expression of the BDD FVIII protein with procoagulant activity.

### Example 17: Construction of Expression Plasmids for BDD FVIII Containing XTEN

[0435] 1. B Domain AE42 Insertion

[0436] Two PCR reactions were run in parallel to insert XTEN_AE42 into the remaining B domain region of the BDD FVIII constructs. The PCR reactions involved the following primers: cgaaagcgctacgcctgagaGTGGCCCTGGCTCTGAGCCAGCCACCTCCGGCTCTGAAACCCCTGCCTC GAGCccaccagtcttgaaacgcc (SEQ ID NO: 1665); TGATATGGTATCATCATAATCGATTTCCTCTTGATCTGACTG (SEQ ID NO: 1666); agcttgaggatccagagttc (SEQ ID NO: 1667); tctcaggcgtagcgctttcgCTTGTCCCCTCTTCTGTTGAGGTGGGGGAGCCAGCAGGAGAACCTGGCG CGCCgttttgagagaagcttcttggt (SEQ ID NO: 1668). The PCR products then served as templates, and a second PCR was performed to introduce the XTEN_AE42 into the FVIII encoding nucleotide sequences flanked by BamHI and ClaI. This PCR product was digested with BamHI and ClaI simultaneously with the digestion of PBC0114 with the same two enzymes. The PCR product was ligated to the digested vector. This construct was designated pBC0135 (pcDNA4-FVIII_4 XTEN_AE42-GAGSPGAETA-Myc-SPATG-His) (‘GAGSPGAETA’ and ‘SPATG’ disclosed as SEQ ID NOS 178 and 1662, respectively), and encodes the BDD FVIII with an AE42 XTEN incorporated within the residual B-domain.

[0437] 2. AE42 Insertion and R1648A Mutation

[0438] The QuikChange method (Agilent, CA) was employed to introduce an R1648A mutation into PBC0135. This construct was designated pBC0149 (pcDNA4-FVIII_4 XTEN_AE42-GAGSPGAETA-Myc-SPATG-His_R1648A) (‘GAGSPGAETA’ and ‘SPATG’ disclosed as SEQ ID NOS 178 and 1662, respectively), eliminating that FVIII processing site.

[0439] 3. B Domain AE288 Insertion

[0440] XTEN_AE288 was PCR amplified using the following primers: tctcaaaacGGCGCGCCAggtacctcagagtctgctacc (SEQ ID NO: 1669) and tggtggGCTCGAGGCtggcgcactgccttc (SEQ ID NO: 1670). PBC0075 was used as the template for this PCR reaction. The PCR product was digested with AscI and XhoI, and PBC0135 was digested with the same enzymes. The PCR product was ligated to the PBC0135 fragment. This construct was designated pBC0136 (pcDNA4-FVIII_4 XTEN_AE288-GAGSPGAETA-Myc-SPATG-His) (‘GAGSPGAETA’ and ‘SPATG’ disclosed as SEQ ID NOS 178 and 1662, respectively), and encodes the BDD FVIII with an AE288 XTEN incorporated within the residual B-domain.

[0441] 4. AE288 Insertion and R1648A Mutation

[0442] XTEN_AE288 was PCR amplified using the following primers: tctcaaaacGGCGCGCCAggtacctcagagtctgctacc (SEQ ID NO: 1671) and tggtggGCTCGAGGCtggcgcactgccttc (SEQ ID NO: 1672). Construct pBC0075 was used as the template for this PCR reaction. The PCR product was digested with AscI and XhoI, and pBC0149 was digested with the same enzymes. The PCR product was ligated to the pBC0149 fragment. This construct was designated pBC0137 (pcDNA4-FVIII_4 XTEN_AE288-GAGSPGAETA-Myc-SPATG-His R1648A) (‘GAGSPGAETA’ and ‘SPATG’ disclosed as SEQ ID NOS 178 and 1662, respectively) and contains an AE288 XTEN sequence internal to the B domain, with the R1648A mutation eliminating that FVIII processing site.

[0443] 3. B Domain AE144, AG144, AG288 Insertions with and without R1648A Mutations

[0444] Select XTEN fragments were PCR amplified to introduce AscI and XhoI sites to the 5′ and 3′ end respectively. The PCR product was digested with AscI and XhoI, and pBC0135 (for R1648) or pBC0149 (for A1648) were digested with the same enzymes. The PCR product was ligated to the pBC0135 or pBC0149 vector. These constructs were designated pSD0005, 6, 7, 8, 17 and 18.

[0445] Construction of Expression Plasmids for BDD FVIII with XTEN Insertion at the C Terminus

[0446] 1. C Terminal AE288 Insertion

[0447] XTEN_AE288 was PCR amplified using the following primers: ggggccgaaacggccggtacctcagagtctgctacc (SEQ ID NO: 1673) and tgttcggccgtttcggcccctggcgcactgccttc (SEQ ID NO: 1674). The construct pBC0075 was used as the template for this PCR reaction. The PCR product was digested with SfiI, and pBC0114 was digested with the same enzyme. The PCR product was ligated to the digested pBC0114 fragment. This construct was designated pBC0145 (pcDNA4-FVIII_4-XTEN_AE288-GAGSPGAETA-Myc-SPATG-His) (‘GAGSPGAETA’ and ‘SPATG’ disclosed as SEQ ID NOS 178 and 1662, respectively), and encodes an AE288 sequence at the C-terminus of the BDD FVIII.

[0448] 2. C Terminal AG288 Insertion

[0449] XTEN_AG288 was designed and synthesized by DNA2.0 (Menlo Park, CA). The synthesized gene was PCR amplified using the following primers: ggggccgaaacggccccgggagcgtcacc (SEQ ID NO: 1675) and tgttcggccgtttcggcccctgacccggttgcccc (SEQ ID NO: 1676). The PCR product was digested with SfiI, and PBC0114 based vector was digested with the same enzyme. The PCR product was ligated to the digested PBC0114 fragment. This construct was designated pBC0146 (pcDNA4-FVIII_4-XTEN_AG288-GAGSPGAETA-Myc-SPATG-His) (‘GAGSPGAETA’ and ‘SPATG’ disclosed as SEQ ID NOS 178 and 1662, respectively), and encodes an AG288 sequence at the C-terminus of the BDD FVIII.

[0450] 3. C terminal AE/AG144, 288, 864 insertions AscI and XhoI sites were introduced into the PBC0114 based vector via QuikChange methods using the primers: 503 7-PBC0114-AscI-XhoI-F: CAGGACCTCTACGGCGCgccagcctcgaGCGAACAAAAACTCATCTCAGAAGAGG (SEQ ID NO: 1677); 5038-PBC0114-AscI-XhoI-R: CCTCTTCTGAGATGAGTTTTTGTTCGCtcgaggctggcGCGCCGTAGAGGTCCTG (SEQ ID NO: 1678). Various XTEN fragments were PCR amplified with AscI and XhoI introduced into the 5′ and 3′ end respectively. The PCR product was ligated to the digested PBC0114 vector. These constructs were designated pSD0013, pSD0014, pSD0015, pSD0016, pSD0019 and pSD0020.

[0451] Construction of Expression Plasmids for BDD FVIII with Inter- and Intra-Domain XTEN Insertions

[0452] 1. AE7, AE42 and AE144 Insertions

[0453] Four distinct strategies are used for insertion of AE42 into the designated sites (e.g., the natural or introduced restriction sites BsiWI 48, AflII 381, PshAI 1098, KpnI 1873, BamHI 1931, PflMI 3094, ApaI 3574, XbaI 4325, NotI 4437, XhoI 4444, BstEII 4449, AgeI 4500, PmeI 4527, BsiWI 908, NheI 1829 and ClaI 3281) within the BDD FVIII encoding sequence, each contributing to the creation of several constructs. By design, these insertions of AE42 create AscI and XhoI sites flanked on either side of the insertion allowing for introduction/substitution of longer XTENs, as well as XTEN with different sequences or incorporated cleavage sequences, as needed. Specifically, the constructs that contain XTEN_144 insertions are listed in Table 21. These insertions were created by replacing either AE7 or AE42 with a PCRed XTEN_144 fragment flanked by AscI and XhoI sites.

[0454] 2. Double PCR-Mediated Method

[0455] Two PCR reactions are run in parallel to insert XTEN_AE42 into the designated site. The two PCR reactions introduce XTEN on either the 3′ or the 5′ end via use of a long primer that contains partial XTEN. The PCR products then serve as templates, and a second PCR is performed to introduce the XTEN_AE42 into the FVIII encoding nucleotide sequences flanked by select restriction enzyme sites. This PCR product is digested with the appropriate enzymes simultaneously with the digestion of PBC0114 using the same two enzymes. The PCR product is ligated to the digested vector. Using this method, constructs are created designated pBC0126, pBC0127, pBC0128, and pBC0129, resulting in AE42 insertions at the R3, R3, P130, L216 locations respectively. The sequences are listed in Table 21. Select XTEN_144 sequences can then be PCRed to introduce AscI and XhoI sites on either end of the fragment, and ligate to digested FVIII-XTEN_AE42 construct. For instance, pSD0053 was created by replacing the AE42 of pBC0129 with XTEN_AE144. Other XTEN_144 constructs were created via the same strategy and are listed in Table 21.

[0456] 3. QuikChange Mediated Two Step Cloning Method

[0457] The QuikChange method is employed to introduce XTEN_AE7 encoding sequences that are flanked by AscI and XhoI into designated sites. The resulting intermediate construct is then digested with AscI and XhoI. XTEN_AE42 or XTEN_AE144 is PCR amplified to introduce the two sites and digested accordingly. The vector and insert are then ligated to create the final constructs. The sequences are listed in Table 21.

[0458] 4. Three PCR Type II Restriction Enzyme Mediated Ligation Method

[0459] Three PCR reactions are performed to create two pieces of FVIII encoding fragments flanked by one type I restriction enzyme that correlates with a unique site within the FVIII_4 gene and one type II enzyme (e.g. BsaI, BbsI, BfuAI), the third PCR reaction created the XTEN_AE42 flanked by two type II restriction enzyme sites. The three PCR fragments are digested with appropriate enzymes and ligated into one linear piece that contains the XTEN_AE42 insertion within a fragment of FVIII encoding sequences. This product is then digested with appropriate unique enzymes within the FVIII encoding sequences and ligated to the PBC0114 construct digested with the same enzymes, and result in constructs designated pBC0130 (with XTEN insertion at residue P333), pBC0132 (with XTEN insertion at residue D403), pBC0133 (with XTEN insertion at residue R490). The sequences are listed in Table 21. Select XTEN_144 sequences can then be PCRed to introduce AscI and XhoI sites on either end of the fragment, and ligate to digested FVIII-XTEN_AE42 construct. For instance, pSD0001 and pSD0003 were created by replacing the AE42 of pBC0132 with XTEN_AE144 and XTEN_AG144 respectively. Other XTEN_144 constructs listed in Table 21 were created via the same strategy.

[0460] 5. Custom Gene Synthesis

[0461] Custom gene synthesis is performed by GeneArt (Regensburg, Germany). The genes are designed so that they include nucleotides encoding the XTEN_AE42 inserted in the designated site(s) and the genes are flanked by two unique restriction enzyme sites selected within the FVIII_4 gene. The synthesized genes and PBC0114 are digested with appropriate enzymes and ligated to create the final product with the BDD FVIII incorporating the XTEN_AE42 between the restriction sites. Select XTEN_144 sequences can then be PCRed to introduce AscI and XhoI sites on either end of the fragment, and ligate to digested FVIII-XTEN_AE42 construct.

[0462] Construction of Expression Plasmids with Dual XTEN Insertions in the B Domain and at the C Terminus

[0463] The construct pBC0136, which encodes the BDD FVIII with an AE288 XTEN incorporated within the residual B-domain, is digested with BamHI and ClaI, and the resulting 1372 bps fragment from this digestion is the insert. The construct pBC0146 is digested with BamHI and ClaI, and the 9791 bps piece from this digestion is the vector. The vector and insert are ligated together to create pBC0209, containing an AE288 insertion within the B domain and an AG288 on the C terminus. The same strategy is utilized to create constructs containing two AE288 insertions in the B domain and at the C terminus, respectively, using PBC0145 as the vector.

[0464] Construction of Expression Plasmids with Multiple XTEN Insertions

[0465] The construct pBC0127, which encodes an AE42 XTEN at the R3 position of FVIII, is digested with BsiWI and AflII, and the resulting 468 bps fragment from this digestion is the insert. The construct pBC0209 is digested with BsiWI and AflII, the 10830 bps piece from this digestion is the vector. The vector and insert are ligated together to create a construct designated pBC0210, containing an AE42 insertion in the A1 domain, an extra three ATR amino acid to restore the signal cleavage sequence, an AE288 XTEN insertion within the B domain and an AG288 on the C terminus. The same methodology is used to create constructs encoding multiple XTEN at the natural and introduced restriction sites; e.g., BsiWI 48, AflII 381, PshAI 1098, KpnI 1873, BamHI 1931, PflMI 3094, ApaI 3574, XbaI 4325, NotI 4437, XhoI 4444, BstEII 4449, AgeI 4500, PmeI 4527, BsiWI 908, NheI 1829 and ClaI 3281.

[0466] Construction of BDD FVIII-Internal-XTEN_AE288 Expression Vectors

[0467] Two BsaI restriction enzyme sites are introduced into the PBC0027 pMK-BDD FVIII construct between the base pair 2673 and 2674 using the QuikChange method following manufacturer's protocol (Agilent Technologies, CA). The inserted DNA sequences are gggtctcccgcgccagggtctccc (SEQ ID NO: 1701), and the resulting construct is designated pBC0205 (sequence in Table 21). The DNA sequence encoding AE288 (or other variants and lengths of XTEN; e.g. AE42, AG42, AG288, AM288) is then PCR'ed with primers that introduce BsaI sites on both the 5′ and 3′. The pBC0205 vector and the insert (XTEN_288) are then digested with BsaI and ligated to create pBC0206, which encodes the FVIII gene with an XTEN_AE288 insertion within the B domain (sequence in Table 21). The pBC0206 construct is then digested with NheI/SalI, and ligated with NheI/SalI digested CET1019-HS vector (Millipore). The CET1019-HS vector contains a human CMV promoter and a UCOE sequence to facilitate gene expression. The ligated DNA mixture is used to transform DH5a bacterial cells. Transformants are screened by DNA miniprep and the desired constructs are confirmed by DNA sequencing. The final construct is designated pBC0207 (CET1019-HS-BDD FVIII-STOP), which encodes the BDD FVIII protein under the control of a human CMV promoter (sequence in Table 21). Introduction of the pBC0207 construct into mammalian cells is expected to allow expression of the BDD FVIII protein with an internal XTEN_AE288. The same protocol is used to introduce, transform and express constructs containing other variants and lengths of XTEN; e.g. AE42, AG42, AG288, AM288, AE864, AG864, or other XTEN of Table 4.

[0468] Construction of BDD FVIII−/−XTEN_AE864 Expression Vectors

[0469] The BDD FVIII fragment with NheI and SfiI flanking the 5′ and 3′ end is generated by digesting the pBC0025 construct. This digested fragment is then ligated to a NheI/SfiI digested pSecTag vector (pBC0048 pSecTag-FVIII−/−XTEN_AE864) encoding the FVIII followed by the XTEN_AE864 sequence. The ligated DNA mixture is used to transform DH5a bacterial cells. Transformants are screened by DNA miniprep and the desired constructs are confirmed by DNA sequencing. The final construct is pBC0060, which encodes the BDD FVIII−/−XTEN_AE864 protein under the control of a human CMV promoter. Introduction of the pBC0060 construct into mammalian cells is expected to express the FVIII protein with a C terminal XTEN fusion (BDD FVIII−/−XTEN_AE864) with procoagulant activity.

[0470] Construction of BDD FVIII−/FXI/-XTEN_AE864 Expression Vectors

[0471] The BDD FVIII fragment with NheI and SfiI flanking the 5′ and 3′ end is generated by digesting the pBC0025 construct. This digested fragment is then ligated to a NheI/SfiI digested pSecTag vector (pBC0047 pSecTag-FVIII−/FXI/-XTEN_AE864) encoding the FVIII followed by the FXI cleavage sequence (/FXI/) and XTEN_AE864. The ligated DNA mixture is used to transform DH5a bacterial cells. Transformants are screened by DNA miniprep and the desired constructs are confirmed by DNA sequencing. The final construct is pBC0051, which encodes the BDD FVIII−/FXI/-XTEN_AE864 protein under the control of a human CMV promoter. Introduction of the pBC0051 construct into mammalian cells is expected to express the FVIII protein with a C terminal XTEN fusion (BDD FVIII−/FXI/-XTEN_AE864), which could be subsequently cleaved by FXI, therefore liberating the BDD FVIII protein with procoagulant activity.

[0472] Construction of BDD FVIII−/FXI/-XTEN Expression Vectors Comprising AE288 or AG288

[0473] The fused AE864 XTEN sequence in pBC0060 is replaced by digesting the XTEN sequences AE288 and AG288 with BsaI and HindIII. A subsequent ligation step using the respective AE288 or AG288 XTEN fragment and BsaI/HindIII digested pBC0051 allows the exchange of the AE288 or AG288 sequences into the BDD FVIII expression vector. The resulting final constructs are pBC0061 for BDD FVIII-AE288 and pBC0062 for BDD FVIII-AG288. Introduction of the pBC0061 construct into mammalian cells is expected to express the FVIII protein with a C-terminal AE288 XTEN fusion (BDD FVIII−/−XTEN_AE288) with procoagulant activity. Introduction of the pBC0062 construct into mammalian cells is expected to express the FVIII protein with a C-terminal AG288 XTEN fusion (BDD FVIII−/−XTEN_AG288) with procoagulant activity.

[0474] Construction of BDD FVIII−/FXI/-XTEN Expression Vectors with Alternate XTEN

[0475] The fused XTEN sequence in pBC0051 is replaced by digesting DNA encoding other XTEN sequences (e.g. other variants and lengths of XTEN; e.g. AE42, AG42, AG288, AM288) with BsaI and HindIII. A ligation using the XTEN fragment and BsaI/HindIII digested pBC0051 allows the exchange of the various XTEN-encoding sequences into the BDD FVIII expression vector, providing the alternate constructs. Introduction of the alternate constructs into mammalian cells is expected to express the FVIII protein with a C-terminal XTEN (BDD FVIII−/FXI/-XTEN) that can be subsequently cleaved by FXI, releasing the FVIII, resulting in procoagulant FVIII fusion with procoagulant activity.

### Example 18: Construction of Expression Plasmids for FVIII Signal Peptide-XTEN-/FXI/-BDD FVIII

[0476] Construction of Expression Vectors for FVIII Signal Peptide-XTEN_AE864

[0477] The coding sequences for the FVIII signal peptide is generated by annealing the following two oligos: 5′-CTAGCATGCAAATAGAGCTCTCCACCTGCTTCTTTCTGTGCCTTTTGCGATTCTGCTTTAGTG GGTCTCC-3′ (SEQ ID NO: 1679); 5′-ACCTGGAGACCCACTAAAGCAGAATCGCAAAAGGCACAGAAAGAAGCAGGTGGAGAGCTC TATTTGCATG-3′ (SEQ ID NO: 1680). The annealed oligos are flanked by the NheI and BsaI restriction enzyme sites on either end, and is ligated to NheI/BsaI digested pCW0645 vector which encodes the FVII-XTEN_AE864. The ligated DNA mixture is used to transform DH5a bacterial cells. Transformants is screened by DNA miniprep and the desired constructs are confirmed by DNA sequencing. The final construct is designated pBC0029, which encodes the signal peptide-XTEN_AE864 protein under the control of a human CMV promoter. This construct is used as an intermediate construct for creating an expression construct with XTEN fused on the N-terminus of the FVIII protein, and can also be used as a master plasmid for creating expression constructs that allow XTEN fusion on the N-terminus of a secreted protein.

[0478] Construction of Signal Peptide-XTEN_AE864-/FXI/-BDD FVIII Expression Vectors

[0479] An 1800 bp fragment within the FVIII coding region is amplified using primers that introduce NheI-BbsI-/FXI/-AgeI sites on the 5′ and endogenous KpnI restriction enzyme on the 3′ end. The NheI/KpnI digested FVIII fragment is ligated with NheI/KpnI digested pBC0027 vector. The ligated DNA mixture is used to transform DH5a bacterial cells. Transformants are screened by DNA miniprep and the desired constructs are confirmed by DNA sequencing. The resulting construct is designated pBC0052, which contains sequences that encode the /FXI/-FVIII protein without the FVIII signal peptide. This construct is used as an intermediate construct for creating an expression construct with XTEN fused on the N-terminus of the FVIII protein.

[0480] The pBC0052 vector is digested with BbsI/XhoI enzymes, and is used to ligate with Bbsi/XhoI digested pBC0029. The ligated DNA mixture is used to transform DH5a bacterial cells. Transformants are screened by DNA miniprep and the desired constructs are confirmed by DNA sequencing. The final construct is designated pBC0053, which encodes the signal peptide-XTEN_AE864-/FXI/-BDD FVIII protein under the control of a human CMV promoter. Introduction of the pBC0053 construct into mammalian cells is expected to express the FVIII protein with an N-terminal XTEN fusion (signal peptide-XTEN_AE864-/FXI/-BDD FVIII), which could be subsequently cleaved by FXI, therefore liberating the BDD FVIII protein.

[0481] Construction of Signal Peptide-XTEN-/FXI/-BDD FVIII Expression Vectors

[0482] The fused XTEN sequence in pBC0053 can be replaced by digesting other XTEN fragments (e.g. AM, AF, AG) with BsaI and BbsI. A ligation using the XTEN fragment and BsaI/BbsI digested pBC0053 allows the exchange of various XTEN pieces (e.g. AM, AF, AG) into the BDD FVIII expression vector. Various XTEN fusions can increase the half lives of these proteins differently, allowing modification of the properties (e.g. efficacy, potency) of these proteins. Introduction of any of these fusion constructs into mammalian cells is expected to express the FVIII protein with an N-terminal XTEN fusion (signal peptide-XTEN-/FXI/-BDD FVIII), in which the fused XTEN peptide can be subsequently cleaved by FXI, generating the BDD FVIII protein.

### Example 19: Construction of BDD FVIII with Interdomain XTEN Insertion

[0483] Construction of BDD FVIII Expression Vectors with an XTEN Insertion at the A2-B Domain Boundaries

[0484] The pBC0027 construct (pMK-BDD FVIII-STOP) is a cloning vector designed to contain the BDD FVIII protein coding sequences, but not a promoter positioned to initiate the expression of BDD FVIII. This construct is used for manipulation of the coding sequences of BDD FVIII as the vector backbone contains very few restriction enzyme sites. therefore allowing easy cloning strategies. The BDD FVIII proteins contain 1457 amino acids at a total molecular weight of 167539.66. There are 6 domains within the wild-type FVIII protein, the A1, A2, B, A3, C1 and C2 domains. In the BDD FVIII protein, most of the B domain has been deleted as it is believed to be an unstructured domain and the removal of the domain does not alter critical functions of this protein. However, the B domain boundaries seem to be excellent positions for creating XTEN fusions to allow extension of the protein half lives.

[0485] Within the pBC0027 construct, there is a unique HindIII restriction enzyme site at the boundary of A2-B junction. The XTEN (e.g., sequences of Tables 4, or 13-17) are amplified using primers that introduce a HindIII and FXI cleavage site on either end of the XTEN coding sequence. The fused XTEN sequence can be altered by amplifying various XTEN fragments. Various XTEN fusions can increase the half lives of these proteins differently, allowing modification of the properties (e.g. efficacy, potency) of these proteins. The HindIII-/FXI/-XTEN-/FXI/-HindIII fragment is digested with HindIII and ligated with HindIII digested pBC0027. The ligated DNA mixture is used to transform DH5a bacterial cells. Transformants are screened by DNA miniprep and the desired constructs are confirmed by DNA sequencing. The final construct is designated pBC0054, which encodes the BDD FVIII protein with an interdomain XTEN fusion (FVIII(A1-A2)-/FXI-XTEN-/FXI/-FVIII(C1-C2)) but not a promoter to initiate gene expression.

[0486] The pBC0054 construct is digested with NheI/SalI and ligated with NheI/SalI digested CET1019-HS vector (Millipore). The CET1019-HS vector contains a human CMV promoter and a UCOE sequence to facilitate gene expression. The ligated DNA mixture is used to transform DH5a bacterial cells. Transformants are screened by DNA miniprep and the desired constructs are confirmed by DNA sequencing. The final construct is designated pBC0055 (CET1019-HS-FVIII(A1-A2)-/FXI/-XTEN-/FXI/-FVIII(C1-C2)), which encodes the BDD FVIII protein with an interdomain (inter-A2/B domain) XTEN fusion (FVIII(A1-A2)-/FXI/-XTEN-/FXI/-FVIII(C1-C2)) under the control of a human CMV promoter. Introduction of the pBC0055 construct into mammalian cells is expected to express the BDD FVIII protein with an interdomain XTEN fusion (FVIII(A1-A2)-/FXI/-XTEN-/FXI/-FVIII(C1-C2)), which could be subsequently cleaved by FXI, therefore liberating the BDD FVIII protein.

[0487] Construction of BDD FVIII Expression Vectors with an XTEN Insertion at the A1-A2 Domain Boundaries

[0488] The pBC0027 construct is designed as a template for two PCR reactions using the following four primers:

(Reaction I)
(SEQ ID NO: 1681)
5′-ATGATGGCATGGAAGCCTAT-3′;
(SEQ ID NO: 1682)
5′-ATCCCTCACCTTCGCCAGAACCTTCAGAACCCTCACCTTCAGAA
CCTTCACCAGAACCTTCACCATCTTCCGCTTCTTCATTATTTTT
CAT-3′.
(Reaction II)
(SEQ ID NO: 1683)
5′-TTCTGGCGAAGGTGAGGGATCTGAAGGCGGTTCTGAAGGTGAAG
GTGGCTCTGAGGGTTCCGAATATGATGATGATCTTACTGATTCTGA
AAT-3′;
(SEQ ID NO: 1684)
5′-TATTCTCTGTGAGGTACCAGC-3′.

[0489] The PCR products generated are 150 bps and 800 bps respectively. The 800 bp product is used as the template for the next round of PCR reaction with the 150 bp product as one primer and 5′-TATTCTCTGTGAGGTACCAGC-3′ (SEQ ID NO: 1685) as the other. The product for the second round of PCR is 930 bps and is digested with PshAI and ACC65I restriction enzymes. This PshAI/Acc65I flanked DNA fragment is ligated with PshAI/Acc65I digested pBC0027. The ligated DNA mixture is used to transform DH5a bacterial cells. Transformants is screened by DNA miniprep and the desired constructs are confirmed by DNA sequencing. The final construct is designated pBC0058 (pMK-BDD FVIII-D345-XTEN_Y36), which encodes the BDD FVIII protein with an interdomain (inter-A1/A2 domain) XTEN fusion after the D345 residue.

[0490] The pBC0058 construct is digested with NheI/SalI, and ligated with NheI/SalI digested CET1019-HS vector (Millipore). The CET1019-HS vector contains a human CMV promoter and a UCOE sequence to facilitate gene expression. The ligated DNA mixture is used to transform DH5a bacterial cells. Transformants are screened by DNA miniprep and the desired constructs are confirmed by DNA sequencing. The final construct is designated pBC0059 (CET1019-HS-BDD FVIII D345-XTEN_Y36), which encodes the BDD FVIII protein with an interdomain (inter-A1/A2 domain) XTEN fusion after the D345 residue under the control of a human CMV promoter. Introduction of the pBC0059 construct into mammalian cells is expected to express the BDD FVIII protein with an interdomain XTEN fusion (BDD FVIII D345-XTEN_Y36).

### Example 20: Construction of FVIII with Intradomain XTEN Insertion

[0491] Construction of BDD FVIII Expression Vectors with an XTEN Insertion after P598 (within the A2 Domain)

[0492] The coding sequences for XTEN_Y36 is amplified using PCR techniques with the following primers:

(SEQ ID NO: 1686)
5′-GAAGCTGGTACCTCACAGAGAATATACAACGCTTTCTCCCCA
ATCCAGGTGAAGGTTCTGGTGAAGG-3′
(SEQ ID NO: 1687)
5′-AACTCTGGATCCTCAAGCTGCACTCCAGCTTCGGAACCCTCA
GAGCC-3′.

[0493] The 184 bp PCR product is flanked by the KpnI and BamHI restriction enzyme sites on either end, and is ligated to KpnII/BamHI digested pBC0027 vector which encodes the BDD FVIII gene. The ligated DNA mixture is used to transform DH5a bacterial cells. Transformants are screened by DNA miniprep and the desired constructs are confirmed by DNA sequencing. The final construct is designated pBC0056, which contains DNA sequences encoding the FVIII protein with an XTEN_Y36 fusion after the P598 residue. This cloning strategy is used to introduce various forms of XTEN into the BDD FVIII protein by altering the template for the PCR reaction and changing the primers accordingly.

[0494] The pBC0056 construct is digested with NheI/SalI, and ligated with NheI/SalI digested CET1019-HS vector (Millipore). The CET1019-HS vector contains a human CMV promoter and a UCOE sequence to facilitate gene expression. The ligated DNA mixture is used to transform DH5a bacterial cells. Transformants are screened by DNA miniprep and the desired constructs are confirmed by DNA sequencing. The final construct is designated pBC0057 (CET1019-HS-FVIII P598-XTEN_Y32), which encodes the BDD FVIII protein with an intradomain (within A2 domain) XTEN fusion under the control of a human CMV promoter. Introduction of the pBC0057 construct into mammalian cells is expected to express the BDD FVIII protein with an intradomain XTEN fusion (FVIII P598-XTEN_Y32).

[0495] Construction of BDD FVIII Expression Vectors with Other Intradomain XTEN Insertions

[0496] To introduce various XTEN segments into other intradomain sites within BDD FVIII (e.g., the XTEN of Tables 4, or 13-17), primers are designed that amplify XTEN with an overhang that can anneal with BDD FVIII. The coding sequence of FVIII (pMK-BDD FVIII) is designed with various unique restriction enzyme sites to allow these specific insertions. The unique restriction enzymes are listed below with their cut site: NheI 376, SacI 391, AfiII 700, SpeI 966, PshAI 1417, Acc65I 2192, KpnI 2192, BamHI 2250, HindIII 2658, PfoI 2960, PflMI 3413, ApaI 3893, Bsp1201 3893, SwaI 4265, OliI 4626, XbaI 4644, BstBI 4673, SalI4756, and XhoI 4762. The NheI and SalI sites on either end of the coding sequence are used to insert the DNA fragment into a human CMV promoter driven vector, the CET1019-HS (Millipore) for expression in mammalian cells. These constructs express the BDD FVIII protein with an XTEN fusion with sequences listed in Table 21.

### Example 21: Construction of FVIII with XTEN Insertions

[0497] CFXTEN with Two XTEN:

[0498] To obtain CFXTEN with two XTEN insertions in various regions (from N-termini to C-termini: A1-R1, A1-R2, A2-R1, A2-R2, B domain, a3, A3-R1, A3-R2, C-termini), constructs that expressed fusions with single-XTEN insertions that retained FVIII activity were utilized. The coding sequence of FVIII (pBC0114 pcDNA4-FVIII_4-X10-Myc-SPATG-His extra RE) (‘SPATG’ disclosed as SEQ ID NO: 1662) was designed with various unique restriction enzyme sites to allow these specific combinations. The unique restriction enzymes are listed in Table 18 below with their relative sites between different regions: BsiWI (between N-termini and A1-R1), AflII (between A1-R1 and A1-R2), NheI (between A1-R2 and A2-R1), KpnI (between A2-R1 and A2-R2), BamHI (between A2-R2 and B domain), ClaI (between a3 and A3-R1), PflMI (between A3-R1 and A3-R2), XbaI (between A3-R2 and C-termini), AgeI (between FVIII C-termini and stop codon). Building blocks and restriction enzymes for cloning the libraries were chosen, as listed in the table below. The chosen components in each region were mixed at molar ratio of 1:1, and two sets of DNA mixtures were digested with unique restriction enzymes. DNA fragments were separated with 1% agarose gel and purified by Qiagen gel extraction kit. DNA with XTEN insertion in the first desired region was regarded as the insert (the smaller DNA fragment in agarose gel), while DNA with XTEN insertion in the second desired region was regarded as vector (the bigger DNA fragment in agarose gel). The insert and vector were ligated in order to reconstitute the plasmid. The ligated DNA mixture was used to transform DH5α E. coli competent host cells. Transformants were screened by rolling circle amplification (RCA) and Sanger sequencing to cover approximately 3-4 times the potential library size. Unique clones were identified and minipreped. Two distinct restriction digestions were then used to further confirm the integrity of XTEN in each region. The amino acid and the encoding DNA sequences for the resulting CFXTEN fusion proteins are listed in Table 21.

[0499] CFXTEN with One or Two XTEN Insertions within the B/a3 Domain and C Terminus:

[0500] The B/a3 domain and C-terminus of FVIII are unstructured regions that tolerated XTEN insertions well. The B/a3 domain further mediated interactions with other cofactors, including the von Willibrand Factor. To investigate the optimal XTEN insertions at the B/a3 domain, select deletions and mutations of the region were made via PCR-based mutagenesis methods. Select PCR reactions and the vectors were digested with unique restriction enzymes as listed in Table 18. DNA fragments were separated with 1% agarose gel and purified by Qiagen gel extraction kit. DNA with XTEN insertion in the first desired region was regarded as the insert (the smaller DNA fragment in agarose gel), while DNA with XTEN insertion in the second desired region was regarded as vector (the bigger DNA fragment in agarose gel). The insert and vector were ligated in order to reconstitute the plasmid. The ligated DNA mixture was used to transform DH5α E. coli competent host cells. Transformants were screened by colony PCR and Sanger sequencing to cover approximately 8× the potential library size. Unique clones were identified and minipreped. One three-enzyme restriction digestion was then used to further confirm the integrity of XTEN in each region. The amino acid and the encoding DNA sequences for the resulting CFXTEN fusion proteins are listed in Table 21.

TABLE 18
Cloning design for FVIII libraries with two XTEN insertions

| Library | | Vector components | Restriction |
|---|---|---|---|
| ID | Insert components (XTEN region) | (XTEN region) | enzymes |
| LSD0001 | pSD0005, pSD0006, pSD0007, pSD0008, | pSD0013 (C-termini) | NheI + ClaI |
| | pSD0017, pSD0018, pBC0136, pBC0137 | | |
| | (B-domain) | | |
| LSD0002 | pSD0005, pSD0006, pSD0007, pSD0008, | pSD0014 (C-termini) | NheI + ClaI |
| | pSD0017, pSD0018, pBC0136, pBC0137 | | |
| | (B-domain) | | |
| LSD0003 | pSD0005, pSD0006, pSD0007, pSD0008, | pSD0019 (C-termini) | NheI + ClaI |
| | pSD0017, pSD0018, pBC0136, pBC0137 | | |
| | (B-domain) | | |
| LSD0004 | pSD0005, pSD0006, pSD0007, pSD0008, | pSD0020 (C-termini) | NheI + ClaI |
| | pSD0017, pSD0018, pBC0136, pBC0137 | | |
| | (B-domain) | | |
| LSD0005 | pSD0045, pSD0046, pSD0048, pSD0049, | pSD0001 (A2-R1) | BsiWI + AflII |
| | pSD0050, pSD0051, pSD0052 (A1-R1) | | |
| LSD0006 | pSD0045, pSD0046, pSD0048, pSD0049, | pSD0002 (A2-R1) | BsiWI + AflII |
| | pSD0050, pSD0051, pSD0052 (A1-R1) | | |
| LSD0007 | pSD0045, pSD0046, pSD0048, pSD0049, | pSD0003 (A2-R1) | BsiWI + AflII |
| | pSD0050, pSD0051, pSD0052 (A1-R1) | | |
| LSD0008 | pSD0045, pSD0046, pSD0048, pSD0049, | pSD0004 (A2-R1) | BsiWI + AflII |
| | pSD0050, pSD0051, pSD0052 (A1-R1) | | |
| LSD0037 | pSD0045, pSD0046, pSD0049, pSD0050, | pSD0032 (A2-R1) | BsiWI + AflII |
| | pSD0051, pSD0052 (A1-R1) | | |
| LSD0038 | pSD0039 (a3) | pSD0045, pSD0046, pSD0049, | BamHI + ClaI |
| | | pSD0050, pSD0051, pSD0052 (A1-R1) | |
| LSD0039 | pSD0039 (a3) | pSD0032, pSD0001, pSD0003 (A2-R1) | BamHI + ClaI |
| LSD0040 | pSD0040, pSD0010, pSD0041 (A3-R1) | pSD0045, pSD0046, pSD0049, | ClaI + XbaI |
| | | pSD0050, pSD0051, pSD0052 (A1-R1) | |
| LSD0041 | pSD0040, pSD0010, pSD0041 (A3-R1) | pSD0032, pSD0001, pSD0003 (A2-R1) | ClaI + XbaI |
| LSD0042 | pSD0062, pSD0063, pSD0043, pSD0044 | pSD0045, pSD0046, pSD0049, | ClaI + XbaI |
| | (A3-R2) | pSD0050, pSD0051, pSD0052 (A1-R1) | |
| LSD0043 | pSD0062, pSD0063, pSD0043, pSD0044 | pSD0032, pSD0001, pSD0003 (A2-R1) | ClaI + XbaI |
| | (A3-R2) | | |
| LSD0044 | pSD0062, pSD0063, pSD0043, pSD0044 | pSD0040, pSD0010, pSD0041 (A3-R1) | PflMI + XbaI |
| | (A3-R2) | | |
| LSD0045 | pSD0039 (a3) | pSD0040, pSD0010, pSD0041 (A3-R1) | BamHI + ClaI |
| LSD0046 | pSD0039 (a3) | pSD0062, pSD0063, pSD0043, | BamHI + ClaI |
| | | pSD0044 (A3-R2) | |
| LSD0047 | pSD0046 (A1-R1) | pSD0001, pSD0003 (A2-R1) | BsiWI + AflII |
| LSD0048 | pSD0045, pSD0051 (A1-R1) | pSD0003 (A2-R1) | BsiWI + AflII |
| pNL0006 | PCR product | LSD0003.006 (B Domain and C | BamHI + PflMI |
| | | termini) | |
| pNL0007 | PCR product | LSD0003.006 (B Domain and C | ClaI + PflMI |
| | | termini) | |
| pNL0008 | PCR product | LSD0003.009 (B Domain and C | ClaI + PflMI |
| | | termini) | |
| pNL0009 | PCR product | pSD0039 (a3 Domain) | BamHI + AscI |
| pNL0010 | LSD0003.006 (B Domain and C termini) | pNL0009 (a3 Domain) | XbaI + AgeI |

### Example 22: Construction of BDD FVIII Expression Vectors with 3-5 XTEN Insertions at Sites 18/26, 403, 745/1656, 1720, 1900 or 2332

[0501] FVIII-fusion constructs with XTEN insertions at sites 18/26, 403, 745/1656, 1720, 1900 or 2332 were chosen to recombine and generate constructs with 3, 4, 5 or 6 XTEN insertions.

[0502] Construction of BDD FVIII Expression Vectors with 3-5 XTEN Insertions at Sites 26, 403, 1656, 1720, or 1900

[0503] The chosen constructs with single XTEN at the desired sites were: pSD0050, pSD0001, pSD0039, pSD0010, and pSD0062. Constructs with double XTENs at the desired sites included LSD0005.002, LSD0038.001, LSD0040.002, LSD0042.013, LSD0039.010, LSD0041.008, LSD0043.008, LSD0045.002, LSD0046.002, and LSD0044.002. Building blocks and restriction enzymes for cloning the constructs were chosen, as listed in Table 19 below. Chosen components were digested with unique restriction enzymes. DNA of inserts and vectors were separated with 1% agarose gel and purified by Qiagen gel extraction kit. The insert and vector were ligated, and then transformed into DH5α E. coli competent host cells. Four colonies for each construct were analyzed by RCA and DNA sequencing. Clones with desired XTEN insertions were minipreped. Restriction digestions were then used to further confirm the integrity of XTEN in each region. The amino acid and the encoding DNA sequences for the resulting CFXTEN fusion proteins are listed in Table 21. The resulting constructs were numbered pSD0077 to pSD0092.

[0504] Construction of BDD FVIII Expression Vectors with 4-6 XTEN Insertions at Sites 18, 403, 1656, 1720, 1900 or 2332

[0505] Constructs pSD0077 to pSD0092 served as building blocks to generate 4- to 6-XTEN constructs with insertions at 18, 403, 1656, 1720, 1900 and 2332. Building block constructs and restriction enzymes for cloning the constructs were chosen, as listed in Table 19 below. Chosen components were digested with unique restriction enzymes. DNA of inserts and vectors were separated with 1% agarose gel and purified by Qiagen gel extraction kit. The insert and vector were ligated, and then transformed into DH5α E. coli competent host cells. Eight colonies for each construct were analyzed by colony PCR and DNA sequencing. Clones with desired XTEN insertions were minipreped. Restriction digestions were then used to further confirm the integrity of XTEN in each region. The amino acid and the encoding DNA sequences for the resulting CFXTEN fusion proteins are listed in Table 21. The resulting constructs were numbered pBC0247 to pBC0257, pNL0022, 23, 24, 25, and 30

[0506] Construction of BDD FVIII Expression Vectors with 4-6 XTEN Insertions at Sites 18, 403, 745, 1720, 1900 or 2332

[0507] Constructs pBC0247 to pBC0252, pBC0255, pNL0022 to pNL0025 served as building blocks to generate 4- to 6-XTEN constructs with insertions at 18, 403, 745, 1720, 1900 and 2332. Building block constructs and restriction enzymes for cloning the constructs were chosen, as listed in Table 19 below. Chosen components were digested with unique restriction enzymes. DNA of inserts and vectors were separated with 1% agarose gel and purified by Qiagen gel extraction kit. The insert and vector were ligated, and then transformed into DH5α E. coli competent host cells. Eight colonies for each construct were analyzed by colony PCR and DNA sequencing. Clones with desired XTEN insertions were minipreped. Restriction digestions were then used to further confirm the integrity of XTEN in each region. The amino acid and the encoding DNA sequences for the resulting CFXTEN fusion proteins are listed in Table 21. The resulting constructs were numbered pBC0258 to pBC0268.

TABLE 19
Cloning design for FVIII libraries with 3-5 XTEN insertions
at sites 26, 403, 1656, 1720, or 1900

| Construct | | Vector components | Restriction |
|---|---|---|---|
| Name | Insert components (XTEN region) | (XTEN region) | enzymes |
| pSD0077 | pSD0050 (A1-R1) | LSD0039.010 (A2-R1, a3) | BsiWI + AflII |
| pSD0078 | pSD0010 (A3-R1) | LSD0005.002 (A1-R1, A2-R1) | ClaI + XbaI |
| pSD0079 | pSD0062 (A3-R2) | LSD0005.002 (A1-R1, A2-R1) | ClaI + XbaI |
| pSD0080 | pSD0050 (A1-R1) | LSD0045.002 (a3, A3-R1) | BsiWI + AflII |
| pSD0081 | pSD0050 (A1-R1) | LSD0046.002 (a3, A3-R2) | BsiWI + AflII |
| pSD0082 | pSD0050 (A1-R1) | LSD0044.002 (A3-R1, A3-R2) | BsiWI + AflII |
| pSD0083 | pSD0010 (A3-R1) | LSD0039.010 (A2-R1, a3) | ClaI + XbaI |
| pSD0084 | pSD0062 (A3-R2) | LSD0039.010 (A2-R1, a3) | ClaI + XbaI |
| pSD0085 | pSD0062 (A3-R2) | LSD0041.008 (A2-R1, A3-R1) | PflMI + XbaI |
| pSD0086 | pSD0062 (A3-R2) | LSD0045.002 (a3, A3-R1) | PflMI + XbaI |
| pSD0087 | LSD0039.010 (A2-R1, a3) | LSD0040.002 (A1-R1, A3-R1) | NheI + ClaI |
| pSD0088 | LSD0039.010 (A2-R1, a3) | LSD0042.013 (A1-R1, A3-R2) | NheI + ClaI |
| pSD0089 | LSD0044.002 (A3-R1, A3-R2) | LSD0005.002 (A1-R1, A2-R1) | ClaI + XbaI |
| pSD0090 | LSD0044.002 (A3-R1, A3-R2) | LSD0038.001 (A1-R1, a3) | ClaI + XbaI |
| pSD0091 | LSD0044.002 (A3-R1, A3-R2) | LSD0039.010 (A2-R1, a3) | ClaI + XbaI |
| pSD0092 | LSD0044.002 (A3-R1, A3-R2) | pSD0077 (A1-R1, A2-R1, a3) | ClaI + XbaI |
| pBC0247 | pSD0077 | LSD0050.003 | NheI + BstBI |
| pBC0248 | pSD0078 | LSD0050.003 | NheI + BstBI |
| pBC0249 | pSD0079 | LSD0050.003 | NheI + BstBI |
| pBC0250 | pSD0080 | LSD0050.003 | NheI + BstBI |
| pBC0251 | pSD0082 | LSD0050.003 | NheI + BstBI |
| pBC0252 | pSD0080 | LSD0050.003 | NheI + BstBI |
| pBC0253 | pSD0087 | LSD0050.003 | NheI + BstBI |
| pBC0254 | pSD0088 | LSD0050.003 | NheI + BstBI |
| pBC0255 | pSD0089 | LSD0050.003 | NheI + BstBI |
| pBC0256 | pSD0090 | LSD0050.003 | NheI + BstBI |
| pBC0257 | pSD0092 | LSD0050.003 | NheI + BstBI |
| pNL0022 | LSD0003.009 | pSD0083 | XbaI + AgeI |
| pNL0023 | LSD0003.009 | pSD0084 | XbaI + AgeI |
| pNL0024 | LSD0003.009 | pSD0085 | XbaI + AgeI |
| pNL0025 | LSD0003.009 | pSD0086 | XbaI + AgeI |
| pNL0030 | LSD0003.009 | pSD0091 | XbaI + AgeI |
| pBC0258 | LSD0003.006 | pBC0247 | BamHI + ClaI |
| pBC0259 | LSD0003.006 | pBC0248 | BamHI + ClaI |
| pBC0260 | LSD0003.006 | pBC0249 | BamHI + ClaI |
| pBC0261 | LSD0003.006 | pBC0250 | BamHI + ClaI |
| pBC0262 | LSD0003.006 | pBC0251 | BamHI + ClaI |
| pBC0263 | LSD0003.006 | pBC0252 | BamHI + ClaI |
| pBC0264 | LSD0003.006 | pBC0255 | BamHI + ClaI |
| pBC0265 | LSD0003.006 | pNL0022 | BamHI + ClaI |
| pBC0266 | LSD0003.006 | pNL0023 | BamHI + ClaI |
| pBC0267 | LSD0003.006 | pNL0024 | BamHI + ClaI |
| pBC0268 | LSD0003.006 | pNL0025 | BamHI + ClaI |

### Example 23: Construction of CFXTEN Expression Vectors with Three or Four XTENs: The First XTEN in the B Domain, the Second XTEN at the C-Terminus, and the Third or Fourth XTEN Insertion within the A1 or A2 or A3 Domains

[0508] Libraries of CFXTEN fusion proteins were constructed with three XTEN insertions by combining coagulation-active clones with XTEN insertions in the A1, A2, or A3 domains and clones with XTEN inserted within the B domain and at the C-terminus. Additional libraries were constructed with a fourth XTEN added in the A1, A2, or A3 domains to select members of the 3 XTEN libraries. The design of the cloning scheme is summarized in the table below. DNA was prepared for the inserts and vectors by restriction enzyme digestion and agarose gel purification. After ligating the inserts with the corresponding vectors, the ligated DNA mixture was used to transform DH5α competent E. coli host cells. Transformants were screened by RCA and sequencing to cover approximately 3-4 times the potential library size. Unique clones were identified and mini-prepped. Three distinct restriction digestions were then used to further confirm the integrity of each XTEN. The amino acid and the encoding DNA sequences for the resulting CFXTEN fusion proteins are listed in Table 21.

TABLE 20
Cloning design for FVIII libraries with 3 XTEN insertions at sites B domain, C-termini,
and A1/A2/A3 domain

| Library | Insert components (XTEN | Vector components | Restriction |
|---|---|---|---|
| ID | region) | (XTEN region) | enzymes |
| LSD0049 | LSD0003.006 (B domain and C- | pSD0045, pSD0046, pSD0049, pSD0050, | BamHI + AgeI |
| | termini) | pSD0051, pSD0052 (A1-R1) | |
| LSD0050 | LSD0003.009 (B domain and C- | pSD0045, pSD0046, pSD0049, pSD0050, | BamHI + AgeI |
| | termini) | pSD0051, pSD0052 (A1-R1) | |
| LSD0051 | LSD0003.006 (B domain and C- | pSD0032, pSD0001, pSD0003 (A2-R1) | BamHI + AgeI |
| | termini) | | |
| LSD0052 | LSD0003.009 (B domain and C- | pSD0032, pSD0001, pSD0003 (A2-R1) | BamHI + AgeI |
| | termini) | | |
| LSD0053 | pSD0040, pSD0010, pSD0041 | LSD0003.006 (B domain and C-termini) | ClaI + XbaI |
| | (A3-R1) | | |
| LSD0054 | pSD0040, pSD0010, pSD0041 | LSD0003.009 (B domain and C-termini) | ClaI + XbaI |
| | (A3-R1) | | |
| LSD0055 | pSD0062, pSD0063, pSD0043, | LSD0003.006 (B domain and C-termini) | ClaI + XbaI |
| | pSD0044 (A3-R2) | | |
| LSD0056 | pSD0062, pSD0063, pSD0043, | LSD0003.009 (B domain and C-termini) | ClaI + XbaI |
| | pSD0044 (A3-R2) | | |
| LSD0057 | pSD0001 (A2-R1) | LSD0049.021, LSD0049.002, LSD0049.011, | NheI + BamHI |
| | | LSD0049.012 (A1-R1, B domain and C-termini) | |
| LSD0058 | pSD0003 (A2-R1) | LSD0049.021, LSD0049.002, LSD0049.011, | NheI + BamHI |
| | | LSD0049.012 (A1-R1, B domain and C-termini) | |
| LSD0059 | pNL0005 (A2-R1) | LSD0049.021, LSD0049.002, LSD0049.011, | NheI + BamHI |
| | | LSD0049.012 (A1-R1, B domain and C-termini) | |
| LSD0060 | pBC0246 (A2-R1) | LSD0049.021, LSD0049.002, LSD0049.011, | NheI + BamHI |
| | | LSD0049.012 (A1-R1, B domain and C-termini) | |
| LSD0061 | pSD0009 (A3-R1) | LSD0049.021, LSD0049.002, LSD0049.011, | ClaI + XbaI |
| | | LSD0049.012 (A1-R1, B domain and C-termini) | |
| LSD0062 | pSD0010 (A3-R1) | LSD0049.021, LSD0049.002, LSD0049.011, | ClaI + XbaI |
| | | LSD0049.012 (A1-R1, B domain and C-termini) | |
| LSD0063 | pNL0004 (A3-R2) | LSD0049.021, LSD0049.002, LSD0049.011, | ClaI + XbaI |
| | | LSD0049.012 (A1-R1, B domain and C-termini) | |
| LSD0064 | pSD0063 (A3-R2) | LSD0049.021, LSD0049.002, LSD0049.011, | ClaI + XbaI |
| | | LSD0049.012 (A1-R1, B domain and C-termini) | |
| LSD0065 | pNL0002 (A3-R2) | LSD0049.021, LSD0049.002, LSD0049.011, | ClaI + XbaI |
| | | LSD0049.012 (A1-R1, B domain and C-termini) | |
| LSD0066 | pSD0043 (A3-R2) | LSD0049.021, LSD0049.002, LSD0049.011, | ClaI + XbaI |
| | | LSD0049.012 (A1-R1, B domain and C-termini) | |
| LSD0067 | pNL0003 (A3-R2) | LSD0049.021, LSD0049.002, LSD0049.011, | ClaI + XbaI |
| | | LSD0049.012 (A1-R1, B domain and C-termini) | |
| LSD0068 | pSD0044 (A3-R2) | LSD0049.021, LSD0049.002, LSD0049.011, | ClaI + XbaI |
| | | LSD0049.012 (A1-R1, B domain and C-termini) | |
| LSD0069 | pSD0009 (A3-R1) | LSD0051.002, pBC0244, pBC0245 (A2-R1, B | ClaI + XbaI |
| | | domain and C-termini) | |
| LSD0070 | pSD0010 (A3-R1) | LSD0051.002, pBC0244, pBC0245 (A2-R1, B | ClaI + XbaI |
| | | domain and C-termini) | |
| LSD0071 | pNL0004 (A3-R2) | LSD0051.002, pBC0244, pBC0245 (A2-R1, B | ClaI + XbaI |
| | | domain and C-termini) | |
| LSD0072 | pSD0063 (A3-R2) | LSD0051.002, pBC0244, pBC0245 (A2-R1, B | ClaI + XbaI |
| | | domain and C-termini) | |
| LSD0073 | pNL0002 (A3-R2) | LSD0051.002, pBC0244, pBC0245 (A2-R1, B | ClaI + XbaI |
| | | domain and C-termini) | |
| LSD0074 | pSD0043 (A3-R2) | LSD0051.002, pBC0244, pBC0245 (A2-R1, B | ClaI + XbaI |
| | | domain and C-termini) | |
| LSD0075 | pNL0003 (A3-R2) | LSD0051.002, pBC0244, pBC0245 (A2-R1, B | ClaI + XbaI |
| | | domain and C-termini) | |
| LSD0076 | pSD0044 (A3-R2) | LSD0051.002, pBC0244, pBC0245 (A2-R1, B | ClaI + XbaI |
| | | domain and C-termini) | |
| pSD0093 | pNL0004 (A3-R2) | LSD0053.022 (A3-R1, B domain and C-termini) | PflMI + XbaI |
| pSD0094 | pSD0063 (A3-R2) | LSD0053.022 (A3-R1, B domain and C-termini) | PflMI + XbaI |
| pSD0095 | pNL0002 (A3-R2) | LSD0053.022 (A3-R1, B domain and C-termini) | PflMI + XbaI |
| pSD0096 | pSD0043 (A3-R2) | LSD0053.022 (A3-R1, B domain and C-termini) | PflMI + XbaI |
| pSD0097 | pNL0003 (A3-R2) | LSD0053.022 (A3-R1, B domain and C-termini) | PflMI + XbaI |
| pSD0098 | pSD0044 (A3-R2) | LSD0053.022 (A3-R1, B domain and C-termini) | PflMI + XbaI |
| pCS0001 | pBC0168 (A1) | LSD0055.021 (A3-R1, B domain and C-termini) | BsiWI + BamHI |
| pCS0002 | pBC0134 (A2_R2) | LSD0055.021 (A3-R1, B domain and C-termini) | BsiWI + BamHI |
| pCS0003 | pBC0179 (C1) | LSD0055.021 (A3-R1, B domain and C-termini) | ApaI + XbaI |
| pCS0004 | pBC0143 (C1) | LSD0055.021 (A3-R1, B domain and C-termini) | ApaI + XbaI |
| pCS0005 | pBC0182 (C2) | LSD0055.021 (A3-R1, B domain and C-termini) | ApaI + XbaI |
| pCS0006 | pBC0144 (C2) | LSD0055.021 (A3-R1, B domain and C-termini) | ApaI + XbaI |
| pBC0269 | pBC0165 (A1_R1) | LSD0003.006 (B domain and C-termini) | BsiWI + BamHI |
| pBC0270 | pBC0132 (A2_R1) | LSD0003.006 (B domain and C-termini) | BsiWI + BamHI |
| pBC0271 | pBC0138 (A3_R1) | LSD0003.006 (B domain and C-termini) | ClaI + XbaI |
| pBC0272 | pBC0176 (A3_R2) | LSD0003.006 (B domain and C-termini) | ClaI + XbaI |
| pBC0273 | pSD0001 (A2_R1) | LSD0003.006 (B domain and C-termini) | BsiWI + BamHI |
| pBC0274 | pSD0009 (A3_R1) | LSD0003.006 (B domain and C-termini) | ClaI + XbaI |
| pBC0275 | pNL0004 (A3_R2) | LSD0003.006 (B domain and C-termini) | ClaI + XbaI |
| pBC0276 | pBC0280 (A1_R1) | LSD0003.006 (B domain and C-termini) | BsiWI + BamHI |
| pBC0277 | pBC0281 (A2_R1) | LSD0003.006 (B domain and C-termini) | BsiWI + BamHI |
| pBC0278 | pBC0282 (A3_R1) | LSD0003.006 (B domain and C-termini) | ClaI + XbaI |
| pBC0279 | pBC0283 (A3_R2) | LSD0003.006 (B domain and C-termini) | ClaI + XbaI |
| | | pBC0285, 286, 287, 288, 289, 290, 291, 292, | |
| L09_01 | pBC0284 (CT) | 293 (B domain and A3 R2) | XbaI + Aget |
| L09_01 | pSD0014 (CT) | pBC0285, 286, 287, 288, 289, 290, 291, 292, | |
| | | 293 (B domain and A3 R2) | XbaI + Aget |
| L09_01 | pSD0020 (CT) | pBC0285, 286, 287, 288, 289, 290, 291, 292, | |
| | | 293 (B domain and A3 R2) | XbaI + Aget |

TABLE 21
DNA and Amino Acid Sequences
of FVIII-XTEN Constructs

| | Amino acid | DNA |
|---|---|---|
| | sequence | sequence |
| Construct | disclosed as | disclosed as |
| Name | SEQ ID NO: | SEQ ID NO: |
| pBC0114 | 595 | 596 |
| pBC0126 | 597 | 598 |
| pBC0127 | 599 | 600 |
| pBC0165 | 601 | 602 |
| pBC0183 | 603 | 604 |
| pBC0184 | 605 | 606 |
| pBC0166 | 607 | 608 |
| pBC0185 | 609 | 610 |
| pBC0167 | 611 | 612 |
| pBC0128 | 613 | 614 |
| pBC0168 | 615 | 616 |
| pBC0129 | 617 | 618 |
| pBC0169 | 619 | 620 |
| pBC0130 | 621 | 622 |
| pBC0131 | 623 | 624 |
| pBC0132 | 625 | 626 |
| pBC0170 | 627 | 628 |
| pBC0133 | 629 | 630 |
| pBC0171 | 631 | 632 |
| pBC0134 | 633 | 634 |
| pBC0172 | 635 | 636 |
| pBC0135 | 637 | 638 |
| pBC0149 | 639 | 640 |
| pBC0136 | 641 | 642 |
| pBC0137 | 643 | 644 |
| pBC0138 | 645 | 646 |
| pBC0139 | 647 | 648 |
| pBC0140 | 649 | 650 |
| pBC0173 | 651 | 652 |
| pBC0174 | 653 | 654 |
| pBC0175 | 655 | 656 |
| pBC0176 | 657 | 658 |
| pBC0177 | 659 | 660 |
| pBC0178 | 661 | 662 |
| pBC0141 | 663 | 664 |
| pBC0179 | 665 | 666 |
| pBC0180 | 667 | 668 |
| pBC0142 | 669 | 670 |
| pBC0143 | 671 | 672 |
| pBC0181 | 673 | 674 |
| pBC0182 | 675 | 676 |
| pBC0144 | 677 | 678 |
| pBC0145 | 679 | 680 |
| pBC0146 | 681 | 682 |
| pSD0001 | 683 | 684 |
| pSD0002 | 685 | 686 |
| pSD0003 | 687 | 688 |
| pSD0004 | 689 | 690 |
| pSD0005 | 691 | 692 |
| pSD0006 | 693 | 694 |
| pSD0007 | 695 | 696 |
| pSD0008 | 697 | 698 |
| pSD0009 | 699 | 700 |
| pSD0010 | 701 | 702 |
| pSD0011 | 703 | 704 |
| pSD0012 | 705 | 706 |
| pSD0013 | 707 | 708 |
| pSD0014 | 709 | 710 |
| pSD0017 | 711 | 712 |
| pSD0018 | 713 | 714 |
| pSD0019 | 715 | 716 |
| pSD0020 | 717 | 718 |
| pSD0015 | 719 | 720 |
| pSD0016 | 721 | 722 |
| pSD0021 | 723 | 724 |
| pSD0022 | 725 | 726 |
| pSD0023 | 727 | 728 |
| pSD0024 | 729 | 730 |
| pSD0025 | 731 | 732 |
| pSD0026 | 733 | 734 |
| pSD0027 | 735 | 736 |
| pSD0028 | 737 | 738 |
| pSD0029 | 739 | 740 |
| pSD0030 | 741 | 742 |
| pSD0031 | 743 | 744 |
| pSD0032 | 745 | 746 |
| pSD0033 | 747 | 748 |
| pSD0034 | 749 | 750 |
| pSD0035 | 751 | 752 |
| pSD0036 | 753 | 754 |
| pSD0037 | 755 | 756 |
| pSD0038 | 757 | 758 |
| pSD0039 | 759 | 760 |
| pSD0040 | 761 | 762 |
| pSD0041 | 763 | 764 |
| pSD0042 | 765 | 766 |
| pSD0043 | 767 | 768 |
| pSD0044 | 769 | 770 |
| pSD0062 | 771 | 772 |
| pSD0063 | 773 | 774 |
| pSD0045 | 775 | 776 |
| pSD0046 | 777 | 778 |
| pSD0047 | 779 | 780 |
| pSD0048 | 781 | 782 |
| pSD0049 | 783 | 784 |
| pSD0050 | 785 | 786 |
| pSD0051 | 787 | 788 |
| pSD0052 | 789 | 790 |
| pSD0053 | 791 | 792 |
| pSD0054 | 793 | 794 |
| pSD0055 | 795 | 796 |
| pSD0056 | 797 | 798 |
| pSD0057 | 799 | 800 |
| pSD0058 | 801 | 802 |
| pSD0059 | 803 | 804 |
| pSD0060 | 805 | 806 |
| pSD0061 | 807 | 808 |
| LSD0001.002 | 809 | 810 |
| LSD0001.005 | 811 | 812 |
| LSD0001.006 | 813 | 814 |
| LSD0001.011 | 815 | 816 |
| LSD0001.012 | 817 | 818 |
| LSD0001.013 | 819 | 820 |
| LSD0001.016 | 821 | 822 |
| LSD0001.021 | 823 | 824 |
| LSD0002.001 | 825 | 826 |
| LSD0002.002 | 827 | 828 |
| LSD0002.014 | 829 | 830 |
| LSD0003.004 | 831 | 832 |
| LSD0003.006 | 833 | 834 |
| LSD0003.009 | 835 | 836 |
| LSD0003.014 | 837 | 838 |
| LSD0004.010 | 839 | 840 |
| LSD0004.011 | 841 | 842 |
| LSD0004.014 | 843 | 844 |
| LSD0004.016 | 845 | 846 |
| LSD0004.022 | 847 | 848 |
| LSD0003.016 | 849 | 850 |
| LSD0005.002 | 851 | 852 |
| LSD0005.004 | 853 | 854 |
| LSD0005.005 | 855 | 856 |
| LSD0005.011 | 857 | 858 |
| LSD0005.018 | 859 | 860 |
| LSD0006.002 | 861 | 862 |
| LSD0006.005 | 863 | 864 |
| LSD0006.007 | 865 | 866 |
| LSD0006.011 | 867 | 868 |
| LSD0007.002 | 869 | 870 |
| LSD0007.004 | 871 | 872 |
| LSD0007.013 | 873 | 874 |
| LSD0008.001 | 875 | 876 |
| LSD0008.002 | 877 | 878 |
| LSD0008.006 | 879 | 880 |
| LSD0008.009 | 881 | 882 |
| LSD0008.017 | 883 | 884 |
| LSD0002.025 | 885 | 886 |
| LSD0002.013 | 887 | 888 |
| LSD0003.025 | 889 | 890 |
| LSD0004.025 | 891 | 892 |
| LSD0003.005 | 893 | 894 |
| LSD0007.008 | 895 | 896 |
| LSD0044.002 | 897 | 898 |
| LSD0044.005 | 899 | 900 |
| LSD0044.039 | 901 | 902 |
| LSD0044.022 | 903 | 904 |
| LSD0044.003 | 905 | 906 |
| LSD0044.001 | 907 | 908 |
| LSD0038.001 | 909 | 910 |
| LSD0038.003 | 911 | 912 |
| LSD0038.008 | 913 | 914 |
| LSD0038.012 | 915 | 916 |
| LSD0038.013 | 917 | 918 |
| LSD0038.015 | 919 | 920 |
| LSD0039.001 | 921 | 922 |
| LSD0039.003 | 923 | 924 |
| LSD0039.010 | 925 | 926 |
| LSD0045.001 | 927 | 928 |
| LSD0045.002 | 929 | 930 |
| LSD0042.014 | 931 | 932 |
| LSD0042.023 | 933 | 934 |
| LSD0042.006 | 935 | 936 |
| LSD0042.013 | 937 | 938 |
| LSD0042.001 | 939 | 940 |
| LSD0042.039 | 941 | 942 |
| LSD0042.047 | 943 | 944 |
| LSD0042.003 | 945 | 946 |
| LSD0042.004 | 947 | 948 |
| LSD0042.008 | 949 | 950 |
| LSD0042.038 | 951 | 952 |
| LSD0042.082 | 953 | 954 |
| LSD0042.040 | 955 | 956 |
| LSD0037.002 | 957 | 958 |
| LSD0037.009 | 959 | 960 |
| LSD0037.011 | 961 | 962 |
| LSD0047.002 | 963 | 964 |
| LSD0047.005 | 965 | 966 |
| LSD0048.007 | 967 | 968 |
| LSD0046.001 | 969 | 970 |
| LSD0046.002 | 971 | 972 |
| LSD0046.003 | 973 | 974 |
| LSD0040.011 | 975 | 976 |
| LSD0040.042 | 977 | 978 |
| LSD0040.002 | 979 | 980 |
| LSD0040.008 | 981 | 982 |
| LSD0040.021 | 983 | 984 |
| LSD0040.037 | 985 | 986 |
| LSD0040.046 | 987 | 988 |
| LSD0040.003 | 989 | 990 |
| LSD0040.006 | 991 | 992 |
| LSD0040.007 | 993 | 994 |
| LSD0040.010 | 995 | 996 |
| LSD0040.039 | 997 | 998 |
| LSD0040.052 | 999 | 1000 |
| LSD0041.001 | 1001 | 1002 |
| LSD0041.004 | 1003 | 1004 |
| LSD0041.006 | 1005 | 1006 |
| LSD0041.008 | 1007 | 1008 |
| LSD0041.010 | 1009 | 1010 |
| LSD0041.014 | 1011 | 1012 |
| LSD0041.016 | 1013 | 1014 |
| LSD0041.035 | 1015 | 1016 |
| LSD0043.001 | 1017 | 1018 |
| LSD0043.002 | 1019 | 1020 |
| LSD0043.005 | 1021 | 1022 |
| LSD0043.006 | 1023 | 1024 |
| LSD0043.007 | 1025 | 1026 |
| LSD0043.008 | 1027 | 1028 |
| LSD0043.015 | 1029 | 1030 |
| LSD0043.029 | 1031 | 1032 |
| LSD0043.043 | 1033 | 1034 |
| pSD0077 | 1035 | 1036 |
| pSD0078 | 1037 | 1038 |
| pSD0079 | 1039 | 1040 |
| pSD0080 | 1041 | 1042 |
| pSD0081 | 1043 | 1044 |
| pSD0082 | 1045 | 1046 |
| pSD0083 | 1047 | 1048 |
| pSD0084 | 1049 | 1050 |
| pSD0085 | 1051 | 1052 |
| pSD0086 | 1053 | 1054 |
| pSD0087 | 1055 | 1056 |
| pSD0088 | 1057 | 1058 |
| pSD0089 | 1059 | 1060 |
| pSD0090 | 1061 | 1062 |
| pSD0091 | 1063 | 1064 |
| pSD0092 | 1065 | 1066 |
| LSD0049.002 | 1067 | 1068 |
| LSD0049.008 | 1069 | 1070 |
| LSD0049.011 | 1071 | 1072 |
| LSD0049.012 | 1073 | 1074 |
| LSD0049.020 | 1075 | 1076 |
| LSD0049.021 | 1077 | 1078 |
| LSD0050.002 | 1079 | 1080 |
| LSD0050.003 | 1081 | 1082 |
| LSD0050.007 | 1083 | 1084 |
| LSD0050.010 | 1085 | 1086 |
| LSD0050.012 | 1087 | 1088 |
| LSD0050.014 | 1089 | 1090 |
| LSD0051.002 | 1091 | 1092 |
| LSD0051.003 | 1093 | 1094 |
| LSD0052.001 | 1095 | 1096 |
| LSD0052.003 | 1097 | 1098 |
| LSD0053.021 | 1099 | 1100 |
| LSD0053.022 | 1101 | 1102 |
| LSD0053.024 | 1103 | 1104 |
| LSD0054.021 | 1105 | 1106 |
| LSD0054.025 | 1107 | 1108 |
| LSD0054.026 | 1109 | 1110 |
| LSD0055.021 | 1111 | 1112 |
| LSD0055.022 | 1113 | 1114 |
| LSD0055.026 | 1115 | 1116 |
| LSD0056.021 | 1117 | 1118 |
| LSD0056.024 | 1119 | 1120 |
| LSD0056.025 | 1121 | 1122 |
| pNL0001 | 1123 | 1124 |
| pNL0002 | 1125 | 1126 |
| pNL0003 | 1127 | 1128 |
| pNL0004 | 1129 | 1130 |
| pNL0005 | 1131 | 1132 |
| pNL0006 | 1133 | 1134 |
| pNL0007 | 1135 | 1136 |
| pNL0008 | 1137 | 1138 |
| pNL0009 | 1139 | 1140 |
| pNL0010 | 1141 | 1142 |
| pBC0244 | 1143 | 1144 |
| pBC0245 | 1145 | 1146 |
| pBC0246 | 1147 | 1148 |
| pBC0247 | 1149 | 1150 |
| pBC0248 | 1151 | 1152 |
| pBC0249 | 1153 | 1154 |
| pBC0250 | 1155 | 1156 |
| pBC0251 | 1157 | 1158 |
| pBC0252 | 1159 | 1160 |
| pBC0253 | 1161 | 1162 |
| pBC0254 | 1163 | 1164 |
| pBC0255 | 1165 | 1166 |
| pBC0256 | 1167 | 1168 |
| pBC0257 | 1169 | 1170 |
| pBC0259 | 1171 | 1172 |
| pBC0260 | 1173 | 1174 |
| pBC0262 | 1175 | 1176 |
| pBC0263 | 1177 | 1178 |
| pBC0264 | 1179 | 1180 |
| pBC0266 | 1181 | 1182 |
| pBC0267 | 1183 | 1184 |
| pBC0268 | 1185 | 1186 |
| pNL0016 | 1187 | 1188 |
| pNL0017 | 1189 | 1190 |
| pNL0018 | 1191 | 1192 |
| pNL0022 | 1193 | 1194 |
| pNL0023 | 1195 | 1196 |
| pNL0024 | 1197 | 1198 |
| pNL0025 | 1199 | 1200 |
| pNL0030 | 1201 | 1202 |
| LSD0057.001 | 1203 | 1204 |
| LSD0057.004 | 1205 | 1206 |
| LSD0057.005 | 1207 | 1208 |
| LSD0057.010 | 1209 | 1210 |
| LSD0058.003 | 1211 | 1212 |
| LSD0058.005 | 1213 | 1214 |
| LSD0058.006 | 1215 | 1216 |
| LSD0059.002 | 1217 | 1218 |
| LSD0059.003 | 1219 | 1220 |
| LSD0059.005 | 1221 | 1222 |
| LSD0059.006 | 1223 | 1224 |
| LSD0060.001 | 1225 | 1226 |
| LSD0060.003 | 1227 | 1228 |
| LSD0060.004 | 1229 | 1230 |
| LSD0061.002 | 1231 | 1232 |
| LSD0061.007 | 1233 | 1234 |
| LSD0061.008 | 1235 | 1236 |
| LSD0061.012 | 1237 | 1238 |
| LSD0062.001 | 1239 | 1240 |
| LSD0062.002 | 1241 | 1242 |
| LSD0062.006 | 1243 | 1244 |
| LSD0062.007 | 1245 | 1246 |
| LSD0063.001 | 1247 | 1248 |
| LSD0063.003 | 1249 | 1250 |
| LSD0063.011 | 1251 | 1252 |
| LSD0064.017 | 1253 | 1254 |
| LSD0064.018 | 1255 | 1256 |
| LSD0064.020 | 1257 | 1258 |
| LSD0064.021 | 1259 | 1260 |
| LSD0065.001 | 1261 | 1262 |
| LSD0065.007 | 1263 | 1264 |
| LSD0065.014 | 1265 | 1266 |
| LSD0066.001 | 1267 | 1268 |
| LSD0066.002 | 1269 | 1270 |
| LSD0066.009 | 1271 | 1272 |
| LSD0066.011 | 1273 | 1274 |
| LSD0067.004 | 1275 | 1276 |
| LSD0067.005 | 1277 | 1278 |
| LSD0067.006 | 1279 | 1280 |
| LSD0067.008 | 1281 | 1282 |
| LSD0068.001 | 1283 | 1284 |
| LSD0068.002 | 1285 | 1286 |
| LSD0068.005 | 1287 | 1288 |
| LSD0068.010 | 1289 | 1290 |
| LSD0069.004 | 1291 | 1292 |
| LSD0069.008 | 1293 | 1294 |
| LSD0070.003 | 1295 | 1296 |
| LSD0070.004 | 1297 | 1298 |
| LSD0070.005 | 1299 | 1300 |
| LSD0071.001 | 1301 | 1302 |
| LSD0071.002 | 1303 | 1304 |
| LSD0071.008 | 1305 | 1306 |
| LSD0072.001 | 1307 | 1308 |
| LSD0072.002 | 1309 | 1310 |
| LSD0072.003 | 1311 | 1312 |
| LSD0073.002 | 1313 | 1314 |
| LSD0073.004 | 1315 | 1316 |
| LSD0073.006 | 1317 | 1318 |
| LSD0074.007 | 1319 | 1320 |
| LSD0074.010 | 1321 | 1322 |
| LSD0074.011 | 1323 | 1324 |
| LSD0075.003 | 1325 | 1326 |
| LSD0075.004 | 1327 | 1328 |
| LSD0075.007 | 1329 | 1330 |
| LSD0076.002 | 1331 | 1332 |
| LSD0076.003 | 1333 | 1334 |
| pSD0093 | 1335 | 1336 |
| pSD0094 | 1337 | 1338 |
| pSD0095 | 1339 | 1340 |
| pSD0096 | 1341 | 1342 |
| pSD0097 | 1343 | 1344 |
| pSD0098 | 1345 | 1346 |
| pSD0099 | 1347 | 1348 |
| pSD0100 | 1349 | 1350 |
| pSD0101 | 1351 | 1352 |
| pSD0102 | 1353 | 1354 |
| pSD0103 | 1355 | 1356 |
| pSD0104 | 1357 | 1358 |
| pCS0001 | 1359 | 1360 |
| pCS0002 | 1361 | 1362 |
| pCS0003 | 1363 | 1364 |
| pCS0004 | 1365 | 1366 |
| pCS0005 | 1367 | 1368 |
| pCS0006 | 1369 | 1370 |
| pBC0269 | 1371 | 1372 |
| pBC0270 | 1373 | 1374 |
| pBC0271 | 1375 | 1376 |
| pBC0272 | 1377 | 1378 |
| pBC0273 | 1379 | 1380 |
| pBC0274 | 1381 | 1382 |
| pBC0275 | 1383 | 1384 |
| pBC0276 | 1385 | 1386 |
| pBC0277 | 1387 | 1388 |
| pBC0278 | 1389 | 1390 |
| pBC0279 | 1391 | 1392 |
| pBC0280 | 1393 | 1394 |
| pBC0281 | 1395 | 1396 |
| pBC0282 | 1397 | 1398 |
| pBC0283 | 1399 | 1400 |
| pBC0284 | 1401 | 1402 |
| pBC0285 | 1403 | 1404 |
| pBC0286 | 1405 | 1406 |
| pBC0287 | 1407 | 1408 |
| pBC0288 | 1409 | 1410 |
| pBC0289 | 1411 | 1412 |
| pBC0290 | 1413 | 1414 |
| pBC0291 | 1415 | 1416 |
| pBC0292 | 1417 | 1418 |
| pBC0293 | 1419 | 1420 |
| pBC0294 | 1421 | 1422 |
| pBC0295 | 1423 | 1424 |
| pBC0296 | 1425 | 1426 |
| pBC0297 | 1427 | 1428 |
| pBC0298 | 1429 | 1430 |
| pBC0299 | 1431 | 1432 |
| pBC0300 | 1433 | 1434 |
| pBC0301 | 1435 | 1436 |
| pBC0302 | 1437 | 1438 |
| pBC0303 | 1439 | 1440 |
| pBC0304 | 1441 | 1442 |
| pBC0305 | 1443 | 1444 |
| pBC0306 | 1445 | 1446 |
| pBC0307 | 1447 | 1448 |
| pBC0308 | 1449 | 1450 |
| pBC0309 | 1451 | 1452 |
| pBC0310 | 1453 | 1454 |
| pBC0311 | 1455 | 1456 |
| pBC0312 | 1457 | 1458 |
| pBC0313 | 1459 | 1460 |
| pBC0314 | 1461 | 1462 |
| pBC0315 | 1463 | 1464 |
| pBC0316 | 1465 | 1466 |
| pBC0317 | 1467 | 1468 |
| pBC0318 | 1469 | 1470 |
| pBC0319 | 1471 | 1472 |
| pBC0320 | 1473 | 1474 |
| pBC0321 | 1475 | 1476 |
| PBC0322 | 1477 | 1478 |
| PBC0323 | 1479 | 1480 |
| pNL0040 | 1481 | 1482 |
| pNL0041 | 1483 | 1484 |
| pNL0042 | 1485 | 1486 |
| pNL0043 | 1487 | 1488 |

### Example 24: Transfection of Mammalian Cells, Expression of FVIII-XTEN and Assessment of FVIII Activity

[0509] Mammalian cells, including but not limited to CHO, BHK, COS, and HEK293, are suitable for transformation with the vectors of the Examples, above, in order to express and recover FVIII-XTEN fusion protein. The following are details for methods used to express BDD FVIII and FVIII-XTEN fusion protein constructs pBC0114, pBC0135, pBC0136, pBC0137, pBC0145, pBC0146, and pBC0149 by transient transfection, which includes electroporation and chemical (PEI) transfection methods.

[0510] Adherent HEK293 cells purchased from ATCC were revived in medium of vendor's recommendation and passaged for a few generations before multiple vials were frozen in the medium with 5% DMSO. One vial was revived and passaged one more time before transfection. The HEK293 cells were plated 1-2 days before transfection at a density of approximately 7×10⁵ per ml in one T175 per transfection, using 35 ml medium. On the day of transfection the cells were trypsinized, detached and counted, then rinsed in the medium until an even cell suspension was achieved. The cells were counted and an appropriate volume of cells (based on cell count above) were transferred to 50 mL centrifuge tube, such that there were approximately 4×10⁶ cells per transfection. Cells were centrifuged for 5 min at 500 RCF, the supernatant discarded, and the cells resuspended in 10 ml of D-PBS.

[0511] Electroporation: For electroporation, an appropriate volume of resuspension buffer was added using a micropipette (supplied in the Neon™ Transfection System 100 μL Kit), such that 110 μl of buffer was available per transfection. Separate volumes of 110 μl of cell suspension were added to each Eppendorf tube containing 11 μl of plasmid DNA for each of the individual FVIII-XTEN constructs for a total of 6 μg (volume of DNA may be less, qs to 11 μl with sterile H2O). A Neon™ Transfection Device was used for transfection. The program was set to electroporate at 1100v for a pulse width of 20 ms, for a total of two pulses. A Neon™ Tube (supplied in the Neon™ Transfection System 100 μL Kit) was placed into Neon™ Pipette Station. A volume of 3 mL of Electrolytic Buffer E2 (supplied in the Neon™ Transfection System 100 μL Kit) was added to the Neon™ Tube. Neon™ Pipettes and 100 μl Neon™ Tips were used to electroporate 100 μl of cell-plasmid DNA mixture using the Neon™ Pipette Station. The electroporation was executed and when complete, the Neon™ Pipette was removed from the Station and the pipette with the transfected cells was used to transfer the cells, with a circular motion, into a 100 mm×20 mm petri plate containing 10 ml of Opti-MEM I Reduced-Serum Medium (1×, Invitrogen), such that transfected cells were evenly distributed on plate. The cells for each transfection were incubated at 37° C. for expression. On day 3 post-transfection, a 10% volume of salt solution of 10 mM Hepes, 5 mM CaCl₂), and 4M NaCl was added to each cell culture and gently mixed for 30 minutes. Each cell culture was transferred to a 50 ml conical centrifuge tube and was centrifuged at 3000 rpm for 10 minutes at 4° C. The supernatants for each culture were placed into a new 50 ml conical tube and then split into aliquots of 5×1 ml in Eppendorf and 2×15 ml conical tubes for assay or were flash frozen before testing for expression of FVIII-XTEN in ELISA and performance in an FVIII activity assay, as described herein.

[0512] Chemical transfection: Chemical transfection can be accomplished using standard methods known in the art. In the present Example, PEI is utilized, as described.

[0513] Suspension 293 Cells are seeded the day before transfection at 7×10⁵ cells/mL in sufficient Freestyle 293 (Invitrogen) medium to provide at least 30 ml working volume, and incubated at 37° C. On the day of transfection, an aliquot of 1.5 ml of the transfection medium is held at room temperature, to which 90 μL of 1 mg/ml PEI is added and vortexed briefly. A volume of 30 μl of DNA encoding the FVIII-XTEN_AE288 construct (concentration of 1 mg/ml) is added to the PEI solution, which is vortexed for 30 sec. The mixture is held at room temperature for 5-15 min. The DNA/PEI mixture is added to the HEK293 cells and the suspension is incubated at 37° C. using pre-established shake flask conditions. About four hours after the addition of the DNA/PEI mix, a 1× volume of expansion media is added and the cells incubated at 37° C. for 5 days. On the day of harvest, a 10% volume of salt solution of 10 mM Hepes, 5 mM CaCl₂), and 4M NaCl is added to the cell culture and gently mixed for 30 minutes. The cell culture is transferred to a 50 ml conical centrifuge tube and is centrifuged at 4000 rpm for 10 minutes at 4° C. The supernatant is placed into a new 50 ml conical tube and then split into aliquots of 5×1 ml in Eppendorf and 2×15 ml conical tubes for assay or are flash frozen before testing for expression of FVIII-XTEN in ELISA and/or performance in an FVIII activity assay, as described herein.

[0514] Generation of Stable Pools and Cell Lines that Produce FVIII-XTEN

[0515] Stable pools are generated by culturing transfected cells for 3-5 weeks in medium containing selection antibiotics such as puromycin, with medium change every 2-3 days. Stable cells can be used for either production or generation of stable clones. For stable cell line selection during primary screening, cells from stable pools either from on-going passaging or revived from frozen vials are seeded in 96-well plates at a target density of 0.5 cell/well. About 1 week after seeding spent medium from wells with single cell cluster as observed under microscope are tested for expression of FVIII by activity assay or antigen measurement.

[0516] For additional rounds of screening, normalized numbers of cells are seeded in multi-well plates. Spent medium is harvested and tested for FVIII concentration by ELISA and FVIII activity assay. Cells would also be harvested from the plates and counted using Vi-Cell. Clones are ranked by (1) FVIII titers according to ELISA and activity; (2) ratios of ELISA titer/cell count and activity titer/cell count; and (3) integrity and homogeneity of products produced by the clones as measured by Western blots. A number of clones for each of the constructs are selected from the primary screening for additional rounds of screening.

[0517] For the second round of screening, cells in 96-well plates for the top clones selected from primary screening are first expanded in T25 flasks and then seeded in duplicate 24-well plates. Spent medium is collected from the plates for FVIII activity and antigen quantification and cells harvested and counted by Vi-Cell. Clones are ranked and then selected according to titers by ELISA and activity assay, ELISA titer/cell and activity titer/cell count ratios. Frozen vials are prepared for at least 5-10 clones and again these clones were screened and ranked according to titers by ELISA and activity, and ratios of ELISA titer/cell count and activity titer/cell count, and product integrity and homogeneity by Western blot, and 2-3 clones are selected for productivity evaluation in shake flasks. Final clones are selected based on specific productivity and product quality.

[0518] Production of FVIII-XTEN Secreted in Cell Culture Medium by Suspension 293 Stable Clones

[0519] HEK293 stable cell clones selected by the foregoing methods are seeded in shake flasks at 1-2×10⁵ cells/ml in expression medium. Cell count, cell viability, FVIII activity and antigen expression titers are monitored daily. On the day when FVIII activity and antigen titers and product quality are optimal, the culture is harvested by either centrifugation/sterile filtration or depth filtration/sterile filtration. The filtrate is either used immediately for tangential flow filtration (TFF) processing and purification or stored in −80° C. freezer for TFF processing and purification later.

### Example 25: Purification and Characterization of CFXTEN Constructs

[0520] Exemplary methods for the purification and characterization of CFXTEN constructs with one or more XTEN follow.

[0521] Purification of FVII-XTEN AE864 by FVIII Affinity Chromatography

[0522] CFXTEN containing supernatant is filtered using a Cuno ZetaPlus Biocap filter and a Cuno BioAssure capsule and subsequently concentrated by tangential flow filtration using a Millipore Pellicon 2 Mini cartridge with a 30,000 Da MWCO. Using the same tangential flow filtration cartridge the sample is diafiltered into 10 mM histidine, 20 mM calcium chloride, 300 mM sodium chloride, and 0.02% Tween 80 at pH 7.0. FVIIISelect resin (GE 17-5450-01) selectively binds FVIII or B domain deleted FVIII using a 13 kDa recombinant protein ligand coupled to a chromatography resin. The resin is equilibrated with 10 mM histidine, 20 mM calcium chloride, 300 mM sodium chloride, and 0.02% Tween 80 at pH 7.0 and the supernatant loaded. The column is washed with 20 mM histidine, 20 mM calcium chloride, 300 mM sodium chloride, and 0.02% Tween 80 at pH 7.0, then is washed with 20 mM histidine, 20 mM calcium chloride, 1.0 M sodium chloride, and 0.02% Tween 80 at pH 7.0, and eluted with 20 mM histidine, 20 mM calcium chloride, 1.5 M sodium chloride, and 0.02% Tween 80 dissolved in 50% ethylene glycol at pH 7.0.

[0523] Concentration and Buffer Exchange by Tangential Flow Filtration and Diafiltration

[0524] Supernatant batches totaling at least 10 L in volume, from stable CHO cells lines expressing CFXTEN are filtered using a Cuno ZetaPlus Biocap filter and a Cuno BioAssure capsule. They are subsequently concentrated approximately 20-fold by tangential flow filtration using a Millipore Pellicon 2 Mini cartridge with a 30,000 Da MWCO. Using the same tangential flow filtration cartridge the sample is diafiltered with 10 mM histidine, 20 mM calcium chloride, 300 mM sodium chloride, and 0.02% Tween 80 at pH 7.0 10 mM tris pH 7.5, 1 mM EDTA with 5 volumes worth of buffer exchange. Samples are divided into 50 ml aliquots and frozen at −80° C.

[0525] Purification of CFXTEN by Anion Exchange Chromatography

[0526] Using an Akta FPLC system the sample is purified using a SuperQ-650M column. The column is equilibrated into buffer A (0.02 mol/L imidazole, 0.02 mol/L glycine ethylester hydrochloride, 0.1 5 mol/L, NaCl, 2.5% glycerol, pH 6.9) and the sample loaded. The sample is eluted using buffer B (5 mmol/L histidine HCl (His/HCl), 1.15 mol/L NaCl, pH 7.0). The 215 nm chromatogram is used to monitor the elution profile. The eluted fractions are assayed for FVIII by ELISA, SDS-PAGE or activity assay. Peak fractions are pooled and stored or subjected to thrombin activation immediately (O'Brien et al., Blood (1990) 75:1664-1672). Fractions are assayed for FVIII activity using an aPTT based factor assay. A Bradford assay is performed to determine the total amount of protein in the load and elution fractions.

[0527] Purification of CFXTEN by Hydrophobic Interaction Chromatography

[0528] CFXTEN samples in Buffer A (50 mmol/l histidine, 1 mmol/l CaCl 2, 1 M NaCl, and 0.2 g/l Tween 80®, pH 7.0) are loaded onto a toyopearl ether 650M resin equilibrated in Buffer A. The column is washed with 10 column volumes of Buffer A to remove DNA, incorrectly folded forms and FVIII, and other contaminant proteins. The CFXTEN is eluted with Buffer B (25 mmol/l histidine, 0.5 mmol/l CaCl 2 and 0.4 mol/l NaCl, pH 7.0) as a single step elution (U.S. Pat. No. 6,005,082). Fractions are assayed for FVIII activity using an aPTT based factor assay. A Bradford assay is performed to determine the total amount of protein in the load and elution fractions.

[0529] Removal of Aggregated Protein from Monomeric CFXTEN with Anion Exchange Chromatography

[0530] Using an Akta FPLC system the sample is purified using a macrocap Q column. The column is equilibrated into buffer A (20 mM MES, 1 mM CaCl2, pH 7.0) and the sample is loaded. The sample is eluted using a linear gradient of 30% to 80% buffer B (20 mM MES, 1 mM CaCl2, pH 7.0+500 mM NaCl) over 20 column volumes. The 215 nm chromatogram is used to monitor the elution profile. The fractions corresponding to the early portion of the elution contain primarily monomeric protein, while the late portion of the elution contains primarily the aggregated species. Fractions from the macrocapQ column is analyzed via size exclusion chromatography with 60 cm BioSep G4000 column to determine which to pool to create an aggregate free sample.

[0531] Activation of FVIII by Thrombin

[0532] Purified FVIII in 5 mmol/L histidine HCl (His/HCl), 1.15 mol/L NaCl, pH 7.0 is treated with thrombin at a 1:4 ratio of units of human thrombin to units FVIII, and the sample is incubated at 37° C. for up to 2 hours. To monitor the activation process, aliquots of this sample are then withdrawn, and acetone precipitated by the addition of 4.5 vol ice-cold acetone. The sample is incubated on ice for 10 minutes, and the precipitate is collected by centrifugation at 13,000 g in a microfuge for 3 minutes. The acetone is removed, and the precipitate is resuspended in 30 μL SDS-PAGE reducing sample buffer and boiled for 2 minutes. Samples are then assayed by SDS-PAGE or western blot. The conversion of FVIII to FVIIIa is examined by looking for the conversion of the heavy chain into 40 and 50 kDa fragments and the conversion of the light chain into a 70 kDa fragment (O'Brien et al., Blood (1990) 75:1664-1672).

[0533] SEC Analysis of CFXTEN

[0534] FVII-XTEN purified by affinity and anion exchange chromatography is analyzed by size exclusion chromatography with 60 cm BioSep G4000 column. A monodispersed population with a hydrodynamic radius of ˜10 nm/apparent MW of ˜1.7 MDa (XTEN-288 fusion) or ˜12 nm/an apparent MW of 5.3 MDa (XTEN-864 fusion) is indicative of an aggregation-free sample. CFXTEN is expected to have an apparent molecular weight factor up to or about 8 (for an XTEN-288 fusion with FVIII) or up to or about ˜15 (for an XTEN-864 fusion with FVIII).

[0535] ELISA Based Concentration Determination of CFXTEN

[0536] The quantitative determination of factor VIII/CFXTEN antigen concentrations using the double antibody enzyme linked immuno-sorbent assay (ELISA) is performed using proven antibody pairings (VisuLize™ FVIII Antigen kit, Affinity Biologicals, Ontario Canada). Strip wells are pre-coated with sheep polyclonal antibody to human FVIII. Plasma samples are diluted and applied to the wells. The FVIII antigen that is present binds to the coated antibody. After washing away unbound material, peroxidase-labeled sheep detecting antibody is applied and allowed to bind to the captured FVIII. The wells are again washed and a solution of TMB (the peroxidase substrate tetramethylbenzidine) is applied and allowed to react for a fixed period of time. A blue color develops which changes to yellow upon quenching the reaction with acid. The color formed is measured spectrophotometrically in a microplate reader at 450 nm. The absorbance at 450 nm is directly proportional to the quantity of FVIII antigen captured onto the well. The assay is calibrated using either the calibrator plasma provided in the kit or by substituting a CFXTEN standard in an appropriate matrix.

[0537] Assessment of CFXTEN Activity Via a FXa Coupled Chromogenic Substrate Assay

[0538] Using the Chromogenix Coamatic Factor VIII (Chromogenix, cat #82258563) the activity of FVIII or CFXTEN comprising FVIII is assessed as follows. In the presence of calcium ions and phospholipids, factor X is activated to factor Xa by factor IXa. This activation is greatly stimulated by factor VIII which acts as a cofactor in this reaction. By using optimal amounts of Ca²⁺, phospholipid and factor IXa, and an excess of factor X, the rate of activation of factor X is linearly related to the amount of factor VIII. Factor Xa hydrolyses the chromogenic substrate S-2765 thus liberating the chromophoric group, pNA. The color is then read spectrophotometrically at 405 nm. The generated factor Xa and thus the intensity of color is proportional to the factor VIII activity in the sample. Hydrolysis of S-2765 by thrombin formed is prevented by the addition of the synthetic thrombin inhibitor I-2581 together with the substrate. The activity of an unknown sample is determined by comparing final A405 of that sample to those from a standard curve constructed from known FVIII amounts. By also determining the amount of FVIII antigen present in the samples (via A280 or ELISA), a specific activity of a sample is determine to understand the relative potency of a particular preparation of FVIII. This enables the relative efficiency of different isolation strategies or construct designs for CFXTEN fusions to be assessed for activity and ranked.

[0539] aPTT Based Assays for CFXTEN Activity Determination

[0540] CFXTEN acts to replace FVIII in the intrinsic or contact activated coagulation pathway. The activity of this coagulation pathway is assessed using an activated partial thromboplastin time assay (aPTT). FVIII activity specifically is measured as follows: a standard curve is prepared by diluting normal control plasma (Pacific Hemostasis cat #100595) two-fold with FVIII deficient plasma (cat #100800) and then conducting 6, 4-fold serial dilutions again with factor VIII deficient plasma. This creates a standard curve with points at 500, 130, 31, 7.8, 2.0, 0.5 and 0.1 IU/ml of activity, where one unit of activity is defined as the amount of FVIIIC activity in 1 ml of normal human plasma. A FVIII-deficient plasma also is included to determine the background level of activity in the null plasma. The sample is prepared by adding CFXTEN to FVIII deficient plasma at a ratio of 1:10 by volume. The samples is tested using an aPTT assay as follows. The samples are incubated at 37 C in a molecular devices plate reader spectrophotometer for 2 minutes at which point an equal volume of aPTT reagent (Pacific Hemostasis cat #100402) is added and an additional 3 minute 37 C incubation performed. After the incubation the assay is activated by adding one volume of calcium chloride (Pacific Hemostasis cat #100304). The turbidity is monitored at 450 nm for 5 minutes to create reaction profiles. The aPTT time, or time to onset of clotting activity, is defined as the first time where OD405 nm increased by 0.06 over baseline. A log—linear standard curve is created with the log of activity relating linearly to the aPTT time. From this the activity of the sample in the plate well is determined and then the activity in the sample is determined by multiplying by 11 to account for the dilution into the FVIII deficient plasma. By also determining the amount of FVIII antigen present in the samples (via A280 or ELISA), a specific activity of a sample can be determine to understand the relative potency of a particular preparation of FVIII. This enables the relative efficiency of different isolation strategies or construct designs for CFXTEN fusions to be ranked.

[0541] Western Blot Analysis of FVIII/FVIII-XTEN Expressed Proteins

[0542] Samples were run on a 8% homogeneous SDS gel and subsequently transferred to PVDF membrane. The samples in lanes 1-15 were: MW Standards, FVIII(42.5 ng), pBC0100B, pBC0114A, pBC0100, pBC0114, pBC0126, pBC0127 (8/5/11; #9), pBC0128, pBC0135, pBC0136, pBC0137, pBC0145, pBC0149, and pBC0146, respectively. The membrane was initially blocked with 5% milk then probed with anti-FVIII monoclonal antibody, GMA-012, specific to the A2 domain of the heavy chain (Ansong C, Miles S M, Fay P J. J Thromb Haemost. 2006 April; 4(4):842-7). Insertion of XTEN288 in the B-domain was observed for pBC0136 (lane 8, FIG. 22) and pBC0137 (lane 9, FIG. 22), whereas XTEN288 insertion at the C-terminus was observed for pBC0146 (lane 12, FIG. 22). All of the assayed FVIII-XTEN proteins revealed the presence of single chain protein with molecular weight of at least 21 kDa higher than that of pBC0114 base construct or FVIII standard. In addition, AE42 insertion was observed for pBC0135 (lane 7, FIG. 22) and pBC0149 (lane 11, FIG. 22) with the single chain running ˜5 kDa higher than that of pBC0114 base protein and heavy chain running at −5 kDa higher than 90 kDa band of the base protein.

[0543] Assay of Expressed FVIII by ELISA

[0544] To verify and quantitate the expression of FVIII-XTEN fusion proteins of the constructs by cell culture, an ELISA assay was established. Capture antibodies, either SAF8C-AP (Affinity Biologicals), or GMA-8002 (Green Mountain Antibodies), or GMA011 antibodies (Green Mountain Antibodies) for FVIII-LC ELISA) or by GMA016 antibodies were immobilized onto wells of an ELISA plate. The wells were then incubated with blocking buffer (1×PBS/3% BSA) to prevent non-specific binding of other proteins to the anti-FVIII antibody. FVIII standard dilutions (˜50 ng-0.024 ng range), quality controls, and cell culture media samples were then incubated for 1.5 h in the wells to allow binding of the expressed FVIII protein to the coated antibody. Wells were then washed extensively, and bound protein is incubated with anti-FVIII detection antibody, SAF8C-Biotinylated (Affinity Biologicals). Then streptavidin-HRP, which binds the biotin conjugated to the FVIII detection antibody, is added to the well and incubated for 1 h. Finally, OPD substrate is added to the wells and its hydrolysis by HRP enzyme is monitored with a plate reader at 490 nm wavelength. Concentrations of FVIII-containing samples were then calculated by comparing the colorimetric response at each culture dilution to a standard curve. The results, in Table 22, below, show that FVIII-XTEN of the various constructs are expressed at 0.4-1 μg/ml in the cell culture media. The results obtained by ELISA and the activity data indicate that FVIII-XTEN fusion proteins were very well expressed using the described transfection methods. Furthermore, under the experimental conditions, the results demonstrate that the specific activity values of the FVIII-XTEN proteins were similar or greater than that of pBC0114 base construct (expressing BDD FVIII) and support that XTEN insertion into the C-terminus or B-domain of FVIII results in preservation of FVIII protein function.

[0545] Chromogenic Activity Assay for CFXTEN Fusion Protein

[0546] BDD FVIII and CFXTEN fusion protein constructs pBC0114, pBC0135, pBC0136, pBC0137, pBC0145, pBC0146, and pBC0149, in various configurations, including XTEN AE288 and AG288 inserted at the C-terminus of the FVIII BDD sequence and FVIII-XTEN fusion proteins with AE42 and AE288 inserted after residue 745 (or residue 743) and before residue 1640 (or residue 1638) of the B-domain (including constructs with the P1648 processing site mutated to alanine), were expressed in transiently transfected Freestyle 293 cells, as described above, and tested for procoagulant activity. The procoagulant activity of each of the FVIII-XTEN proteins present in cell culture medium was assessed using a Chromogenix Coamatic® Factor VIII assay, an assay in which the activation of factor X was linearly related to the amount of factor VIII in the sample. The assay was performed according to manufacturer's instructions using the end-point method, which was measured spectrophotometrically at OD405 nm. A standard curve was created using purified FVIII protein at concentrations of 250, 200, 150, 100, 75, 50, 37.5, 25, 12.5, 6.25, 3.125 and 1.56 mU/ml. Dilutions of factor VIII standard, quality controls, and samples were prepared with assay buffer and PEI culture medium to account for the effect of the medium in the assay performance. Positive controls consist of purified factor VIII protein at 20, 40, and 80 mU/ml concentrations and cell culture medium of pBC0114 FVIII base construct, lacking the XTEN insertions. Negative controls consisted of assay buffer or PEI culture medium alone. The cell culture media of the FVIII-XTEN constructs were obtained as described, above, and were tested in replicates at 1:50, 1:150, and 1:450 dilutions and the activity of each was calculated in U/ml. Each FVIII-XTEN construct exhibited procoagulant activity that was at least comparable, and in some cases greater than that of the base construct positive control, and support that under the conditions of the experiments, the linkage of XTEN, including AE288 or AG288, at the C-terminus of FVIII or insertion of XTEN, including AE42 or AE288 within the B-domain resulted in retention or even enhancement of FVIII procoagulant activity.

TABLE 22
Results of ELISA and Chromogenic FVIII activity assays

| | | | Specific | |
|---|---|---|---|---|
| FVIII-XTEN | Activity | Concentration | Activity | |
| Construct | (IU/ml) | (μg/ml) | (IU/mg) | Description of Construct |
| pBC0114 | 3.0 | 0.6 | 5000 | BDD FVIII base construct used for |
| | | | | XTEN insertions |
| pBC0146 | 7.4 | 0.6 | 12759 | FVIII construct with XTEN AG288 |
| | | | | inserted at the C-terminus of FVIII |
| pBC0145 | 3.1 | 0.6 | 4844 | FVIII construct with XTEN AE288 |
| | | | | inserted at the C-terminus of FVIII |
| pBC0135 | 4.0 | 1.0 | 4124 | FVIII construct with XTEN AE42 |
| | | | | inserted between residue 745 and 1640 |
| pBC0149 | 4.9 | 0.9 | 5581 | FVIII construct with XTEN AE42 |
| | | | | inserted between residue 745 and 1640 |
| | | | | and with Arg1648 to Ala mutation |
| pBC0136 | 2.7 | 0.4 | 7670 | FVIII construct with XTEN AE288 |
| | | | | inserted between residue 745 and 1640 |
| pBC0137 | 1.9 | 0.3 | 6013 | FVIII construct with XTEN AE288 |
| | | | | inserted between residue 745 and 1640 |
| | | | | and with Arg1648 to Ala mutation |

[0547] Coatest Assay for Cell Culture Sample Activity Assay Containing CFXTEN Fusion Protein

[0548] Using the Coatest assay, the activity of FVIII or CFXTEN comprising FVIII is assessed as follows.

[0549] Assay Matrix: All wells in the same plate were adjusted to the same percentage of media to control for matrix effects. The test samples were diluted such that the OD405 reading would fall within the linear range of the standard. The range of concentrations for the FVIII standard was 100 mU/mL to 0.78 mU/mL, prepared by four-fold serial dilutions of the FVIII standard in 1× Coatest buffer (DiaPharma) plus the pre-determined percentage of culture media.

[0550] The Coatest SP FVIII (DiaPharma) reagent package includes the 10× Coatest buffer stock solution, factor IXa+factor X, phospholipid, CaCl₂ and substrate. The 1× Coatest solution was prepared by adding 9× volume of cold ddH₂O to 1× volume of the stock. The cell culture media was then added to the prepared 1× solution at a pre-determined ratio to normalize the percentage of matrix in all test wells. Factor IXa+factor X, phospholipid, and substrate were reconstituted according to manufacturer's recommendations.

[0551] Coatest Assay Procedure:

[0552] Assay reagents were prepared and kept on ice until needed. 25 μl of the diluted test samples and standards were added to a 96 well plate in duplicate. 50 μl of phospholipid/factor IXa/factor X was added to each well and mixed by gently tapping the side of the plate. Plates were incubated at 37° C. for 5 min on a 37° C. plate heater. 25 μl of CaCl₂) was added to each well and mixed. The plates were incubated at 37° C. for 5 min on a plate heater. 50 μl of substrate was then added to each well, mixed, and the plates incubated at 37° C. for an additional 5-10 min until the top standard developed an OD405 reading of about 1.5. 25 μl of 20% acetic acid was added to each well with mixing to stop the reaction and wells were read at OD405 using a SpectraMAX® plus (Molecular Devices) spectrophotometer. Data analysis was performed using the SoftMax program (verion 5.2). The LLOQ varied per assay, but was generally 0.0039 IU/ml.

[0553] Results: The data are presented in Tables 23-26. Table 23 presents results from CFXTEN fusion proteins with XTEN inserted in single sites chosed on the basis of criteria described herein, including Example 34. The pBC00114 FVIII positive control showed good expression and FVIII activity. Of the 106 single-XTEN fusion proteins assayed, 68% retained measurable FVIII activity, with 30% exhibiting 3+ to 4+ activity in the coagulation assay. Thirty-one percent of the fusion proteins assayed had results below the limits of quantitation (which may be due to poor expression, reflected in the corresponding expression ELISA results). All four B-domain insertion constructs exhibited good activity, as did the C-terminal linked constructs, indicating that these are likely favorable insertion sites

[0554] The results of the single insertion site data guided the creation of XTEN constructs with 2 XTEN insertions, the results of which are presented in Table 24. Overall, the positivity rate was 67%, with 31% of fusion proteins exhibiting 3+ to 4+ activity in the coagulation assay.

[0555] The results of the foregoing data guided the creation of XTEN constructs with 3 XTEN insertions, the results of which are presented in Table 25. Overall, 92% of the samples had measurable FVIII activity, with fully 79% exhibiting 3+ to 4+ activity in the coagulation assay.

[0556] A limited number of constructs with 4 XTEN inserted in the A1, A2 and A3 domains were created and assayed, with 4 of 5 exhibiting FVIII activity (Table 26), suggesting that insertion of multiple XTEN does not compromise the ability of the resulting fusion proteins to retain FVIII activity.

[0557] Conclusions: Under the conditions of the experiments, the results support that the criteria used to select XTEN insertion sites are valid, that insertion of one or more XTEN into the selected sites of FVIII is more likely than not to result in retention of procoagulant activity of the resulting CFXTEN molecule, and that insertion of three XTEN appears to result in a greater proportion of fusion proteins retaining high levels of FVIII procoagulant activity compared to single or double XTEN insertion constructs.

TABLE 23
Results of Coagulation Activity Assays for CFXTEN
comprising one XTEN

| Insertion | | | | Expression |
|---|---|---|---|---|
| Site | Domain | Construct | Activity | ELISA |
| pBC0114 | | | +++ | +++ |
| 3 | A1 | pBC0126 | LLOQ* | LLOQ |
| 3 | A1 | pBC0127 | + | + |
| 18 | A1 | pBC0165 | ++ | ++ |
| 22 | A1 | pBC0183 | +++ | ++ |
| 26 | A1 | pBC0184 | ++ | ++ |
| 40 | A1 | pBC0166 | ++ | ++ |
| 60 | A1 | pBC0185 | LLOQ | LLOQ |
| 116 | A1 | pBC0167 | LLOQ | LLOQ |
| 130 | A1 | pBC0128 | LLOQ | LLOQ |
| 188 | A1 | pBC0168 | ++ | ++ |
| 216 | A1 | pBC0129 | ++ | ++ |
| 230 | A1 | pBC0169 | LLOQ | LLOQ |
| 333 | A1 | pBC0130 | ++ | ++ |
| 375 | A2 | pBC0131 | LLOQ | +++ |
| 403 | A2 | pBC0132 | ++ | ++ |
| 442 | A2 | pBC0170 | ++ | ++ |
| 490 | A2 | pBC0133 | + | ++ |
| 518 | A2 | pBC0171 | LLOQ | + |
| 599 | A2 | pBC0134 | ++ | ++ |
| 713 | A2 | pBC0172 | + | +++ |
| 745 | B | pBC0135 | +++ | +++ |
| 745 | B | pBC0149 | +++ | +++ |
| 745 | B | pBC0136 | ++ | ++ |
| 745 | B | pBC0137 | +++ | +++ |
| 1720 | A3 | pBC0138 | +++ | +++ |
| 1796 | A3 | pBC0139 | + | ++ |
| 1802 | A3 | pBC0140 | + | ++ |
| 1827 | A3 | pBC0173 | LLOQ | LLOQ |
| 1861 | A3 | pBC0174 | LLOQ | LLOQ |
| 1896 | A3 | pBC0175 | LLOQ | LLOQ |
| 1900 | A3 | pBC0176 | +++ | +++ |
| 1904 | A3 | pBC0177 | + | + |
| 1937 | A3 | pBC0178 | LLOQ | LLOQ |
| 2019 | A3 | pBC0141 | LLOQ | + |
| 2068 | C1 | pBC0179 | ++ | ++ |
| 2111 | C1 | pBC0180 | LLOQ | LLOQ |
| 2120 | C1 | pBC0142 | LLOQ | + |
| 2171 | C2 | pBC0143 | ++ | +++ |
| 2188 | C2 | pBC0181 | LLOQ | LLOQ |
| 2227 | C2 | pBC0182 | ++ | +++ |
| 2277 | C2 | pBC0144 | ++ | ++ |
| 2332 | CT | pBC0145 | +++ | +++ |
| 2332 | CT | pBC0146 | +++ | +++ |
| 403 | A2 | pSD0001 | +++ | +++ |
| 599 | A2 | pSD0002 | + | + |
| 403 | A2 | pSD0003 | +++ | +++ |
| 599 | A2 | pSD0004 | + | + |
| 745 | B | pSD0005 | +++ | ++ |
| 745 | B | pSD0006 | +++ | +++ |
| 745 | B | pSD0007 | +++ | ++ |
| 745 | B | pSD0008 | +++ | +++ |
| 1720 | A3 | pSD0009 | + | + |
| 1720 | A3 | pSD0010 | ++ | ++ |
| 2171 | C2 | pSD0011 | + | ++ |
| 2171 | C2 | pSD0012 | + | ++ |
| 2332 | CT | pSD0013 | +++ | ++ |
| 2332 | CT | pSD0014 | +++ | +++ |
| 745 | B | pSD0017 | +++ | +++ |
| 745 | B | pSD0018 | +++ | +++ |
| 2332 | CT | pSD0019 | +++ | +++ |
| 2332 | CT | pSD0020 | +++ | +++ |
| 2332 | CT | pSD0015 | ++ | ++ |
| 2332 | CT | pSD0016 | +++ | +++ |
| 0 | N-term | pSD0021 | + | + |
| 32 | A1 | pSD0022 | +++ | +++ |
| 65 | A1 | pSD0023 | LLOQ | LLOQ |
| 81 | A1 | pSD0024 | LLOQ | LLOQ |
| 119 | A1 | pSD0025 | LLOQ | LLOQ |
| 211 | A1 | pSD0026 | + | + |
| 220 | A1 | pSD0027 | + | + |
| 224 | A1 | pSD0028 | + | + |
| 336 | A1 | pSD0029 | ++ | +++ |
| 339 | A1 | pSD0030 | ++ | +++ |
| 378 | A2 | pSD0031 | LLOQ | ++ |
| 399 | A2 | pSD0032 | ++ | ++ |
| 409 | A2 | pSD0033 | ++ | ++ |
| 416 | A2 | pSD0034 | + | + |
| 487 | A2 | pSD0035 | LLOQ | + |
| 494 | A2 | pSD0036 | LLOQ | + |
| 500 | A2 | pSD0037 | LLOQ | + |
| 603 | A2 | pSD0038 | + | + |
| 1656 | A3 | pSD0039 | +++ | +++ |
| 1656 | A3 | pNL009** | ++++ | ND |
| 1711 | A3 | pSD0040 | ++ | + |
| 1725 | A3 | pSD0041 | LLOQ | ++ |
| 1749 | A3 | pSD0042 | LLOQ | LLOQ |
| 1905 | A3 | pSD0043 | ++ | ++ |
| 1910 | A3 | pSD0044 | + | + |
| 1900 | A3 | pSD0062 | ++ | ++ |
| 1900 | A3 | pSD0063 | +++ | ++ |
| 18 | A1 | pSD0045 | +++ | +++ |
| 18 | A1 | pSD0046 | +++ | +++ |
| 22 | A1 | pSD0047 | LLOQ | LLOQ |
| 22 | A1 | pSD0048 | LLOQ | LLOQ |
| 26 | A1 | pSD0049 | +++ | +++ |
| 26 | A1 | pSD0050 | +++ | +++ |
| 40 | A1 | pSD0051 | +++ | +++ |
| 40 | A1 | pSD0052 | +++ | +++ |
| 216 | A1 | pSD0053 | LLOQ | LLOQ |
| 216 | A1 | pSD0054 | LLOQ | LLOQ |
| 375 | A2 | pSD0055 | LLOQ | + |
| 442 | A2 | pSD0056 | LLOQ | LLOQ |
| 442 | A2 | pSD0057 | LLOQ | LLOQ |
| 1796 | A3 | pSD0058 | LLOQ | LLOQ |
| 1796 | A3 | pSD0059 | + | + |
| 1802 | A3 | pSD0060 | + | + |
| 1802 | A3 | pSD0061 | LLOQ | LLOQ |

*LLOQ: below the limits of quantitation
**pNL009 includes a deletion of 745-1656

TABLE 24
Results of Coagulation Activity Assays for CFXTEN
comprising two XTEN

| Insertion 1 | | Insertion 2 | | | |
|---|---|---|---|---|---|
| Insertion | | Insertion | | | |
| Site | Domain | Site | Domain | Construct | Activity |
| 745 | B | 2332 | CT | LSD0001.002 | +++ |
| 745 | B | 2332 | CT | LSD0001.005 | +++ |
| 745 | B | 2332 | CT | LSD0001.006 | +++ |
| 745 | B | 2332 | CT | LSD0001.011 | +++ |
| 745 | B | 2332 | CT | LSD0001.012 | +++ |
| 745 | B | 2332 | CT | LSD0001.013 | +++ |
| 745 | B | 2332 | CT | LSD0001.016 | +++ |
| 745 | B | 2332 | CT | LSD0001.021 | +++ |
| 745 | B | 2332 | CT | LSD0002.001 | +++ |
| 745 | B | 2332 | CT | LSD0002.002 | +++ |
| 745 | B | 2332 | CT | LSD0002.014 | +++ |
| 745 | B | 2332 | CT | LSD0003.004 | +++ |
| 745 | B | 2332 | CT | LSD0003.006 | +++ |
| 745 | B | 2332 | CT | LSD0003.009 | +++ |
| 745 | B | 2332 | CT | LSD0003.014 | + |
| 745 | B | 2332 | CT | LSD0004.010 | +++ |
| 745 | B | 2332 | CT | LSD0004.011 | LLOQ |
| 745 | B | 2332 | CT | LSD0004.014 | +++ |
| 745 | B | 2332 | CT | LSD0004.016 | +++ |
| 745 | B | 2332 | CT | LSD0004.022 | +++ |
| 745 | B | 2332 | CT | LSD0003.016 | +++ |
| 0745 | B | 2332 | CT | pNL006 | +++ |
| 0745 | B | 2332 | CT | pNL007 | +++ |
| 0745 | B | 2332 | CT | pNL008 | ++ |
| 1656 | a3 | 2332 | CT | pNL010 | +++ |
| 26 | A1 | 403 | A2 | LSD0005.002 | ++ |
| 26 | A1 | 403 | A2 | LSD0005.004 | ++ |
| 40 | A1 | 403 | A2 | LSD0005.005 | ++ |
| 40 | A1 | 403 | A2 | LSD0005.011 | ++ |
| 18 | A1 | 403 | A2 | LSD0005.018 | ++ |
| 26 | A1 | 599 | A2 | LSD0006.002 | + |
| 40 | A1 | 599 | A2 | LSD0006.005 | ++ |
| 40 | A1 | 599 | A2 | LSD0006.007 | ++ |
| 40 | A1 | 599 | A2 | LSD0006.011 | +++ |
| 40 | A1 | 403 | A2 | LSD0007.002 | + |
| 40 | A1 | 403 | A2 | LSD0007.004 | + |
| 26 | A1 | 403 | A2 | LSD0007.013 | ++ |
| 26 | A1 | 599 | A2 | LSD0008.001 | ++ |
| 40 | A1 | 599 | A2 | LSD0008.002 | ++ |
| 26 | A1 | 599 | A2 | LSD0008.006 | + |
| 18 | A1 | 599 | A2 | LSD0008.009 | ++ |
| 40 | A1 | 599 | A2 | LSD0008.017 | + |
| 745 | B | 2332 | CT | LSD0002.025 | +++ |
| 745 | B | 2332 | CT | LSD0002.013 | +++ |
| 745 | B | 2332 | CT | LSD0003.025 | +++ |
| 745 | B | 2332 | CT | LSD0004.025 | +++ |
| 745 | B | 2332 | CT | LSD0003.005 | ++ |
| 26 | A1 | 403 | A2 | LSD0007.008 | ++ |
| 1720 | A3 | 1900 | A3 | LSD0044.002 | LLOQ |
| 1725 | A3 | 1900 | A3 | LSD0044.005 | LLOQ |
| 1720 | A3 | 1900 | A3 | LSD0044.039 | LLOQ |
| 1711 | A3 | 1905 | A3 | LSD0044.022 | LLOQ |
| 1720 | A3 | 1905 | A3 | LSD0044.003 | LLOQ |
| 1725 | A3 | 1905 | A3 | LSD0044.001 | LLOQ |
| 1656 | A3 | 26 | A1 | LSD0038.001 | ++ |
| 1656 | A3 | 18 | A1 | LSD0038.003 | ++ |
| 1656 | A3 | 18 | A1 | LSD0038.008 | +++ |
| 1656 | A3 | 40 | A1 | LSD0038.012 | ++ |
| 1656 | A3 | 40 | A1 | LSD0038.013 | ++ |
| 1656 | A3 | 26 | A1 | LSD0038.015 | ++ |
| 1656 | A3 | 399 | A2 | LSD0039.001 | + |
| 1656 | A3 | 403 | A2 | LSD0039.003 | ++ |
| 1656 | A3 | 403 | A2 | LSD0039.010 | ++ |
| 1656 | A3 | 1725 | A3 | LSD0045.001 | + |
| 1656 | A3 | 1720 | A3 | LSD0045.002 | ++ |
| 1900 | A3 | 18 | A1 | LSD0042.014 | + |
| 1900 | A3 | 18 | A1 | LSD0042.023 | + |
| 1900 | A3 | 26 | A1 | LSD0042.006 | + |
| 1900 | A3 | 26 | A1 | LSD0042.013 | ++ |
| 1900 | A3 | 40 | A1 | LSD0042.001 | + |
| 1900 | A3 | 40 | A1 | LSD0042.039 | + |
| 1900 | A3 | 26 | A1 | LSD0042.047 | + |
| 1905 | A3 | 18 | A1 | LSD0042.003 | + |
| 1905 | A3 | 40 | A1 | LSD0042.004 | LLOQ |
| 1905 | A3 | 26 | A1 | LSD0042.008 | LLOQ |
| 1905 | A3 | 26 | A1 | LSD0042.038 | LLOQ |
| 1905 | A3 | 40 | A1 | LSD0042.082 | LLOQ |
| 1910 | A3 | 26 | A1 | LSD0042.040 | LLOQ |
| 18 | A1 | 399 | A2 | LSD0037.002 | ++ |
| 26 | A1 | 399 | A2 | LSD0037.009 | + |
| 40 | A1 | 399 | A2 | LSD0037.011 | ++ |
| 18 | A1 | 403 | A2 | LSD0047.002 | ++ |
| 18 | A1 | 403 | A2 | LSD0047.005 | + |
| 18 | A1 | 403 | A2 | LSD0048.007 | + |
| 1656 | A3 | 1900 | A3 | LSD0046.001 | ++ |
| 1656 | A3 | 1900 | A3 | LSD0046.002 | + |
| 1656 | A3 | 1905 | A3 | LSD0046.003 | + |
| 1711 | A3 | 40 | A1 | LSD0040.011 | LLOQ |
| 1711 | A3 | 26 | A1 | LSD0040.042 | LLOQ |
| 1720 | A3 | 26 | A1 | LSD0040.002 | + |
| 1720 | A3 | 40 | A1 | LSD0040.008 | + |
| 1720 | A3 | 18 | A1 | LSD0040.021 | + |
| 1720 | A3 | 26 | A1 | LSD0040.037 | LLOQ |
| 1720 | A3 | 18 | A1 | LSD0040.046 | + |
| 1725 | A3 | 26 | A1 | LSD0040.003 | LLOQ |
| 1725 | A3 | 40 | A1 | LSD0040.006 | LLOQ |
| 1725 | A3 | 26 | A1 | LSD0040.007 | LLOQ |
| 1725 | A3 | 18 | A1 | LSD0040.010 | LLOQ |
| 1725 | A3 | 40 | A1 | LSD0040.039 | LLOQ |
| 1725 | A3 | 18 | A1 | LSD0040.052 | + |
| 1720 | A3 | 403 | A2 | LSD0041.001 | + |
| 1720 | A3 | 399 | A2 | LSD0041.004 | LLOQ |
| 1711 | A3 | 403 | A2 | LSD0041.006 | LLOQ |
| 1720 | A3 | 403 | A2 | LSD0041.008 | LLOQ |
| 1725 | A3 | 403 | A2 | LSD0041.010 | LLOQ |
| 1725 | A3 | 403 | A2 | LSD0041.014 | LLOQ |
| 1725 | A3 | 399 | A2 | LSD0041.016 | LLOQ |
| 1711 | A3 | 403 | A2 | LSD0041.035 | LLOQ |
| 1900 | A3 | 399 | A2 | LSD0043.001 | LLOQ |
| 1900 | A3 | 403 | A2 | LSD0043.002 | LLOQ |
| 1905 | A3 | 403 | A2 | LSD0043.005 | LLOQ |
| 1900 | A3 | 399 | A2 | LSD0043.006 | LLOQ |
| 1900 | A3 | 403 | A2 | LSD0043.007 | LLOQ |
| 1900 | A3 | 403 | A2 | LSD0043.008 | LLOQ |
| 1905 | A3 | 399 | A2 | LSD0043.015 | LLOQ |
| 1905 | A3 | 403 | A2 | LSD0043.029 | LLOQ |
| 1910 | A3 | 403 | A2 | LSD0043.043 | LLOQ |

TABLE 25
Results of Coagulation Activity Assays for CFXTEN comprising three XTEN

| Insertion 1 | | Insertion 2 | | Insertion 3 | | | |
|---|---|---|---|---|---|---|---|
| Insertion Site | Domain | Insertion Site | Domain | Insertion Site | Domain | Construct | Activity |
| 26 | A1 | 403 | A2 | 1656 | A3 | pSD0077 | +++ |
| 26 | A1 | 403 | A2 | 1720 | A3 | pSD0078 | ++ |
| 26 | A1 | 403 | A2 | 1900 | A3 | pSD0079 | ++ |
| 26 | A1 | 1656 | A3 | 1720 | A3 | pSD0080 | +++ |
| 26 | A1 | 1656 | A3 | 1900 | A3 | pSD0081 | LLOQ |
| 26 | A1 | 1720 | A3 | 1900 | A3 | pSD0082 | + |
| 403 | A2 | 1656 | A3 | 1720 | A3 | pSD0083 | +++ |
| 403 | A2 | 1656 | A3 | 1900 | A3 | pSD0084 | +++ |
| 403 | A2 | 1720 | A3 | 1900 | A3 | pSD0085 | + |
| 1656 | A3 | 1720 | A3 | 1900 | A3 | pSD0086 | +++ |
| 18 | A1 | 745 | B | 2332 | CT | LSD0049.002 | +++ |
| 26 | A1 | 745 | B | 2332 | CT | LSD0049.008 | +++ |
| 26 | A1 | 745 | B | 2332 | CT | LSD0049.011 | +++ |
| 40 | A1 | 745 | B | 2332 | CT | LSD0049.012 | +++ |
| 40 | A1 | 745 | B | 2332 | CT | LSD0049.020 | +++ |
| 18 | A1 | 745 | B | 2332 | CT | LSD0049.021 | +++ |
| 40 | A1 | 745 | B | 2332 | CT | LSD0050.002 | +++ |
| 18 | A1 | 745 | B | 2332 | CT | LSD0050.003 | +++ |
| 26 | A1 | 745 | B | 2332 | CT | LSD0050.007 | LLOQ |
| 18 | A1 | 745 | B | 2332 | CT | LSD0050.010 | +++ |
| 26 | A1 | 745 | B | 2332 | CT | LSD0050.012 | +++ |
| 40 | A1 | 745 | B | 2332 | CT | LSD0050.014 | +++ |
| 403 | A2 | 745 | B | 2332 | CT | LSD0051.002 | +++ |
| 399 | A2 | 745 | B | 2332 | CT | LSD0051.003 | +++ |
| 403 | A2 | 745 | B | 2332 | CT | LSD0052.001 | +++ |
| 399 | A2 | 745 | B | 2332 | CT | LSD0052.003 | +++ |
| 1725 | A3 | 745 | B | 2332 | CT | LSD0053.021 | LLOQ |
| 1720 | A3 | 745 | B | 2332 | CT | LSD0053.022 | +++ |
| 1711 | A3 | 745 | B | 2332 | CT | LSD0053.024 | +++ |
| 1720 | A3 | 745 | B | 2332 | CT | LSD0054.021 | +++ |
| 1711 | A3 | 745 | B | 2332 | CT | LSD0054.025 | ++ |
| 1725 | A3 | 745 | B | 2332 | CT | LSD0054.026 | +++ |
| 1900 | A3 | 745 | B | 2332 | CT | LSD0055.021 | +++ |
| 1905 | A3 | 745 | B | 2332 | CT | LSD0055.022 | +++ |
| 1900 | A3 | 745 | B | 2332 | CT | LSD0055.026 | +++ |
| 1900 | A3 | 745 | B | 2332 | CT | LSD0056.021 | +++ |
| 1900 | A3 | 745 | B | 2332 | CT | LSD0056.024 | +++ |
| 1910 | A3 | 745 | B | 2332 | CT | LSD0056.025 | +++ |
| 0745 | B | 1900 | A3 | 2332 | CT | pBC0294* | |
| 0745 | B | 1900 | A3 | 2332 | CT | pBC0295* | |
| 0745 | B | 1900 | A3 | 2332 | CT | pBC0296* | |
| 0745 | B | 1900 | A3 | 2332 | CT | pBC0297* | |
| 0745 | B | 1900 | A3 | 2332 | CT | pBC0298* | |
| 0745 | B | 1900 | A3 | 2332 | CT | pBC0299* | |
| 0745 | B | 1900 | A3 | 2332 | CT | pBC0300* | |
| 0745 | B | 1900 | A3 | 2332 | CT | pBC0301* | |
| 0745 | B | 1900 | A3 | 2332 | CT | pBC0302* | |
| 0745 | B | 1900 | A3 | 2332 | CT | pBC0303* | |
| 0745 | B | 1900 | A3 | 2332 | CT | pBC0304* | |
| 0745 | B | 1900 | A3 | 2332 | CT | pBC0305* | |
| 0745 | B | 1900 | A3 | 2332 | CT | pBC0306* | |
| 0745 | B | 1900 | A3 | 2332 | CT | pBC0307* | |
| 0745 | B | 1900 | A3 | 2332 | CT | pBC0308* | |
| 0745 | B | 1900 | A3 | 2332 | CT | pBC0309* | |
| 0745 | B | 1900 | A3 | 2332 | CT | pBC0310* | |
| 0745 | B | 1900 | A3 | 2332 | CT | pBC0311* | |
| 0745 | B | 1900 | A3 | 2332 | CT | pBC0312* | |
| 0745 | B | 1900 | A3 | 2332 | CT | pBC0313* | |
| 0745 | B | 1900 | A3 | 2332 | CT | pBC0314* | |
| 0745 | B | 1900 | A3 | 2332 | CT | pBC0315* | |
| 0745 | B | 1900 | A3 | 2332 | CT | pBC0316* | |
| 0745 | B | 1900 | A3 | 2332 | CT | pBC0317* | |
| 0745 | B | 1900 | A3 | 2332 | CT | pBC0318* | |
| 0745 | B | 1900 | A3 | 2332 | CT | pBC0319* | |
| 0745 | B | 1900 | A3 | 2332 | CT | pBC0320* | |
| 0018 | A1 | 0745 | B | 2332 | CT | pBC0269* | |
| 0403 | A2 | 0745 | B | 2332 | CT | pBC0270* | |
| 1720 | A3 | 0745 | B | 2332 | CT | pBC0271* | |
| 1900 | A3 | 0745 | B | 2332 | CT | pBC0272* | |
| 0403 | A2 | 0745 | B | 2332 | CT | pBC0273* | |
| 1720 | A3 | 0745 | B | 2332 | CT | pBC0274* | |
| 1900 | A3 | 0745 | B | 2332 | CT | pBC0275* | |
| 0018 | A1 | 0745 | B | 2332 | CT | pBC0276* | |
| 0403 | A2 | 0745 | B | 2332 | CT | pBC0277* | |
| 1720 | A3 | 0745 | B | 2332 | CT | pBC0278* | |
| 1900 | A3 | 0745 | B | 2332 | CT | pBC0279* | |

*Construct with R1648A mutation

TABLE 26
Results of Coagulation Activity Assays for CFXTEN comprising four XTEN

| XTEN | XTEN | XTEN | XTEN | | | | |
|---|---|---|---|---|---|---|---|
| Insert 1 | Insert 2 | Insert 3 | Insert 4 | XTEN Insert 5 | XTEN Insert 6 | Construct ID | Activity |
| 26 | 403 | 1656 | 1720 | — | — | pSD0087 | +++ |
| 26 | 403 | 1656 | 1900 | — | — | pSD0088 | +++ |
| 26 | 403 | 1720 | 1900 | — | — | pSD0089 | LLOQ |
| 26 | 1656 | 1720 | 1900 | — | — | pSD0090 | ++ |
| 403 | 1656 | 1720 | 1900 | — | — | pSD0091 | ++ |
| 0040 | 0403 | 745 | 2332 | — | — | LSD0058.006* | ++ |
| 0018 | 0409 | 745 | 2332 | — | — | LSD0059.002* | + |
| 0040 | 0409 | 745 | 2332 | — | — | LSD0059.006* | + |
| 0040 | 0409 | 745 | 2332 | — | — | LSD0060.001* | + |
| 0018 | 0409 | 745 | 2332 | — | — | LSD0060.003* | + |
| 0040 | 1720 | 745 | 2332 | — | — | LSD0061.002* | + |
| 0026 | 1720 | 745 | 2332 | — | — | LSD0061.007* | ++ |
| 0018 | 1720 | 745 | 2332 | — | — | LSD0061.008* | ++ |
| 0018 | 1720 | 745 | 2332 | — | — | LSD0061.012* | ++ |
| 0018 | 1720 | 745 | 2332 | — | — | LSD0062.001* | ++ |
| 0026 | 1720 | 745 | 2332 | — | — | LSD0062.002* | ++ |
| 0018 | 1720 | 745 | 2332 | — | — | LSD0062.006* | ++ |
| 0018 | 1900 | 745 | 2332 | — | — | LSD0063.001* | ++ |
| 0018 | 1900 | 745 | 2332 | — | — | LSD0064.017* | ++ |
| 0026 | 1900 | 745 | 2332 | — | — | LSD0064.020* | ++ |
| 0040 | 1900 | 745 | 2332 | — | — | LSD0064.021* | ++ |
| 0040 | 1905 | 745 | 2332 | — | — | LSD0065.001* | + |
| 0018 | 1905 | 745 | 2332 | — | — | LSD0065.014* | + |
| 0040 | 1905 | 745 | 2332 | — | — | LSD0066.001* | + |
| 0026 | 1905 | 745 | 2332 | — | — | LSD0066.002* | + |
| 0018 | 1905 | 745 | 2332 | — | — | LSD0066.009* | ++ |
| 0018 | 1905 | 745 | 2332 | — | — | LSD0066.011* | ++ |
| 0018 | 1910 | 745 | 2332 | — | — | LSD0067.004* | ++ |
| 0018 | 1910 | 745 | 2332 | — | — | LSD0067.005* | + |
| 0040 | 1910 | 745 | 2332 | — | — | LSD0067.006* | + |
| 0026 | 1910 | 745 | 2332 | — | — | LSD0067.008* | + |
| 0018 | 1910 | 745 | 2332 | — | — | LSD0068.001* | + |
| 0026 | 1910 | 745 | 2332 | — | — | LSD0068.002* | + |
| 0040 | 1910 | 745 | 2332 | — | — | LSD0068.005* | + |
| 0018 | 1910 | 745 | 2332 | — | — | LSD0068.010* | ++ |
| 0409 | 1720 | 745 | 2332 | — | — | LSD0069.004* | + |
| 0403 | 1720 | 745 | 2332 | — | — | LSD0069.008* | + |
| 0409 | 1720 | 745 | 2332 | — | — | LSD0070.003* | + |
| 0403 | 1720 | 745 | 2332 | — | — | LSD0070.004* | ++ |
| 0403 | 1720 | 745 | 2332 | — | — | LSD0070.005* | ++ |
| 0403 | 1900 | 745 | 2332 | — | — | LSD0071.001* | ++ |
| 0403 | 1900 | 745 | 2332 | — | — | LSD0071.002* | + |
| 0409 | 1900 | 745 | 2332 | — | — | LSD0071.008* | ++ |
| 0403 | 1900 | 745 | 2332 | — | — | LSD0072.001* | ++ |
| 0403 | 1900 | 745 | 2332 | — | — | LSD0072.002* | + |
| 0409 | 1900 | 745 | 2332 | — | — | LSD0072.003* | + |
| 0409 | 1905 | 745 | 2332 | — | — | LSD0073.002* | + |
| 0403 | 1905 | 745 | 2332 | — | — | LSD0073.004* | + |
| 0403 | 1905 | 745 | 2332 | — | — | LSD0073.006* | + |
| 0403 | 1905 | 745 | 2332 | — | — | LSD0074.007* | ++ |
| 0409 | 1905 | 745 | 2332 | — | — | LSD0074.010* | + |
| 0403 | 1905 | 745 | 2332 | — | — | LSD0074.011* | + |
| 0409 | 1910 | 745 | 2332 | — | — | LSD0075.004* | + |
| 0403 | 1910 | 745 | 2332 | — | — | LSD0075.007* | + |
| 0403 | 1910 | 745 | 2332 | — | — | LSD0076.002* | + |
| 0403 | 1910 | 745 | 2332 | — | — | LSD0076.003* | + |
| 0403 | 1910 | 745 | 2332 | — | — | pSD0093* | + |
| 1720 | 1900 | 745 | 2332 | — | — | pSD0094* | ++ |
| 1720 | 1905 | 745 | 2332 | — | — | pSD0095* | + |
| 1720 | 1910 | 745 | 2332 | — | — | pSD0097* | + |
| 1720 | 1910 | 745 | 2332 | — | — | pSD0098* | + |
| 0403 | 1656 | 1720 | 2332 | — | — | pNL0022 | + |
| 0403 | 1656 | 1900 | 2332 | — | — | pNL0023 | + |
| 0403 | 1720 | 1900 | 2332 | — | — | pNL0024 | LLOQ |
| 1656 | 1720 | 1900 | 2332 | — | — | pNL0025 | + |
| 0018 | 0403 | 1656 | 2332 | — | — | pBC0247 | ++ |
| 0018 | 0403 | 1720 | 2332 | — | — | pBC0248 | + |
| 0018 | 0403 | 1900 | 2332 | — | — | pBC0249 | + |
| 0018 | 1656 | 1720 | 2332 | — | — | pBC0250 | + |
| 0018 | 1656 | 1900 | 2332 | — | — | pBC0251 | ++ |
| 0018 | 1720 | 1900 | 2332 | — | — | pBC0252 | LLOQ |
| 0018 | 0403 | 0745 | 2332 | — | — | LSD57.005 | ++ |
| 0018 | 0745 | 1720 | 2332 | — | — | LSD62.001 | ++ |
| 0018 | 0745 | 1900 | 2332 | — | — | pBC0262 | ++ |
| 0403 | 0745 | 1720 | 2332 | — | — | LSD70.004 | + |
| 0403 | 0745 | 1900 | 2332 | — | — | pBC0266 | + |
| 0745 | 1720 | 1900 | 2332 | — | — | pBC0268 | + |
| 0188 | 1900 | 0745 | 2332 | — | — | pCS0001* | ND |
| 0599 | 1900 | 0745 | 2332 | — | — | pCS0002* | ND |
| 2068 | 1900 | 0745 | 2332 | — | — | pCS0003* | ND |
| 2171 | 1900 | 0745 | 2332 | — | — | pCS0004* | ND |
| 2227 | 1900 | 0745 | 2332 | — | — | pCS0005* | ND |
| 2277 | 1900 | 0745 | 2332 | — | — | pCS0006* | ND |
| 0403 | 1656 | 1720 | 1900 | 2332 | — | pNL0030 | LLOQ |
| 0018 | 0403 | 1656 | 1720 | 2332 | — | pBC0253 | + |
| 0018 | 0403 | 1656 | 1900 | 2332 | — | pBC0254 | + |
| 0018 | 0403 | 1720 | 1900 | 2332 | — | pBC0255 | LLOQ |
| 0018 | 1656 | 1720 | 1900 | 2332 | — | pBC0256 | + |
| 0018 | 0403 | 0745 | 1720 | 2332 | — | pBC0259* | + |
| 0018 | 0403 | 0745 | 1900 | 2332 | — | pBC0260* | + |
| 0018 | 0745 | 1720 | 1900 | 2332 | — | pBC0263 | + |
| 0403 | 0745 | 1720 | 1900 | 2332 | — | pBC0267 | LLOQ |
| 0018 | 0403 | 1656 | 1720 | 1900 | 2332 | pBC0257 | LLOQ |
| 0018 | 0403 | 0745 | 1720 | 1900 | 2332 | pBC0264 | LLOQ |

*Construct with R1648A mutation

### Example 26: Determination of XTEN Radii and Related Parameters

[0558] In order to quantify the hydrodynamic radii of the XTEN components of CFXTEN fusion proteins and how the value of multiple XTEN versus single XTEN varies, a series of formulae were created based on empirically-derived data from size exclusion chromatography assays of various fusion proteins comprising one or more XTEN. It is believed that the incorporation of multiple XTEN into a CFXTEN provides a higher total hydrodynamic radius of the XTEN component compared to CFXTEN with fewer XTEN yet having approximately the same total of XTEN amino acids. The maximum radius of a single XTEN polypeptide is calculated (hereinafter “XTEN Radius”) according to the formula given by Equation II:

XTEN Radius=(√XTEN length 0.2037)+3.4627 II

[0559] The sum of the maximum of the XTEN Radii for all XTEN segments in a CFXTEN is calculated (hereinafter “Sum XTEN Radii”) according to the formula given by Equation III:

$$Sum XTEN Radii = {\sum }_{i = 1}^{n} XTEN {Radius}_{i} \qquad III$$

[0560] wherein: n=the number of XTEN segments
[0561] and i is an iterator

[0562] The ratio of the SUM XTEN Radii of a CFXTEN comprising multiple XTEN to that of an XTEN Radius for a single XTEN of an equivalent length (in total amino acid residues to that of the CFXTEN) is calculated (hereinafter “Ratio XTEN Radii”) according to the formula given by Equation IV:

$$Ratio XTEN Radii = \frac{{\sum }_{i = 1}^{n} XTEN {Radius}_{i}}{( \sqrt{{\sum }_{i = 1}^{n} XTEN {Length}_{i}} * 0.2037 ) + 3.4627} \qquad IV$$

[0563] wherein: n=the number of XTEN segments
[0564] and i is an iterator

[0565] Results: Equation II was applied to XTEN of lengths 144, 288, 576 and 864. The results are presented in Table 27. Equation IV was applied to various CFXTEN fusion proteins described herein with two, three, or four XTEN. The Ratio of XTEN Radii has a value of 1 for all CFXTEN that contain a single XTEN. The Ratio XTEN Radii are presented in Table 28. The Ratio of XTEN Radii for pSD0092, which contains 5 XTEN insertions, has a value of 3.31. Collectively, the results indicate that the inclusion of multiple XTEN increases the Ratio XTEN Radii to values greater than 2, with four insertions resulting in higher values than three insertions.

TABLE 27
Results of Radii Calculations for CFXTEN comprising XTEN

| XEN Length | XTEN Radius |
|---|---|
| 42 | 4.8 |
| 144 | 5.9 |
| 288 | 6.9 |
| 576 | 8.4 |
| 864 | 9.5 |

TABLE 28
Results of Radii Calculations for CFXTEN comprising XTEN

| Insertion 1 | | Insertion 2 | | Insertion 3 | | Insertion 4 | | | Ratio |
|---|---|---|---|---|---|---|---|---|---|
| Insert | | Insert | | Insert | | Insert | | | XTEN |
| Site | Domain | Site | Domain | Site | Domain | Site | Domain | Construct | Radii |
| 40 | A1 | | | | | | | pBC0166 | 1.00 |
| 745 | B | 2332 | CT | | | | | LSD0001.002 | 1.67 |
| 745 | B | 2332 | CT | | | | | LSD0001.005 | 1.71 |
| 745 | B | 2332 | CT | | | | | LSD0001.006 | 1.71 |
| 745 | B | 2332 | CT | | | | | LSD0001.011 | 1.71 |
| 745 | B | 2332 | CT | | | | | LSD0001.012 | 1.71 |
| 745 | B | 2332 | CT | | | | | LSD0001.013 | 1.67 |
| 745 | B | 2332 | CT | | | | | LSD0001.016 | 1.67 |
| 745 | B | 2332 | CT | | | | | LSD0001.021 | 1.67 |
| 745 | B | 2332 | CT | | | | | LSD0002.001 | 1.67 |
| 745 | B | 2332 | CT | | | | | LSD0002.002 | 1.67 |
| 745 | B | 2332 | CT | | | | | LSD0002.004 | 1.71 |
| 745 | B | 2332 | CT | | | | | LSD0002.008 | 1.67 |
| 745 | B | 2332 | CT | | | | | LSD0002.014 | 1.67 |
| 745 | B | 2332 | CT | | | | | LSD0003.001 | 1.67 |
| 745 | B | 2332 | CT | | | | | LSD0003.004 | 1.66 |
| 745 | B | 2332 | CT | | | | | LSD0003.006 | 1.67 |
| 745 | B | 2332 | CT | | | | | LSD0003.009 | 1.67 |
| 745 | B | 2332 | CT | | | | | LSD0003.014 | 1.66 |
| 745 | B | 2332 | CT | | | | | LSD0003.018 | 1.67 |
| 745 | B | 2332 | CT | | | | | LSD0004.010 | 1.66 |
| 745 | B | 2332 | CT | | | | | LSD0004.011 | 1.67 |
| 745 | B | 2332 | CT | | | | | LSD0004.014 | 1.66 |
| 745 | B | 2332 | CT | | | | | LSD0004.016 | 1.66 |
| 745 | B | 2332 | CT | | | | | LSD0004.022 | 1.66 |
| 745 | B | 2332 | CT | | | | | LSD0003.016 | 1.67 |
| 26 | A1 | 403 | A2 | | | | | LSD0005.002 | 1.71 |
| 26 | A1 | 403 | A2 | | | | | LSD0005.004 | 1.71 |
| 40 | A1 | 403 | A2 | | | | | LSD0005.005 | 1.71 |
| 40 | A1 | 403 | A2 | | | | | LSD0005.011 | 1.71 |
| 18 | A1 | 403 | A2 | | | | | LSD0005.018 | 1.71 |
| 26 | A1 | 599 | A2 | | | | | LSD0006.002 | 1.71 |
| 40 | A1 | 599 | A2 | | | | | LSD0006.005 | 1.71 |
| 40 | A1 | 599 | A2 | | | | | LSD0006.007 | 1.71 |
| 40 | A1 | 599 | A2 | | | | | LSD0006.011 | 1.71 |
| 40 | A1 | 403 | A2 | | | | | LSD0007.002 | 1.71 |
| 40 | A1 | 403 | A2 | | | | | LSD0007.004 | 1.71 |
| 26 | A1 | 403 | A2 | | | | | LSD0007.013 | 1.71 |
| 26 | A1 | 599 | A2 | | | | | LSD0008.001 | 1.71 |
| 40 | A1 | 599 | A2 | | | | | LSD0008.002 | 1.71 |
| 26 | A1 | 599 | A2 | | | | | LSD0008.006 | 1.71 |
| 18 | A1 | 599 | A2 | | | | | LSD0008.009 | 1.71 |
| 40 | A1 | 599 | A2 | | | | | LSD0008.017 | 1.71 |
| 745 | B | 2332 | CT | | | | | LSD0002.025 | 1.71 |
| 745 | B | 2332 | CT | | | | | LSD0002.013 | 1.67 |
| 745 | B | 2332 | CT | | | | | LSD0003.025 | 1.67 |
| 745 | B | 2332 | CT | | | | | LSD0004.025 | 1.67 |
| 745 | B | 2332 | CT | | | | | LSD0003.005 | 1.66 |
| 26 | A1 | 403 | A2 | | | | | LSD0007.008 | 1.71 |
| 1720 | A3 | 1900 | A3 | | | | | LSD0044.002 | 1.71 |
| 1725 | A3 | 1900 | A3 | | | | | LSD0044.005 | 1.71 |
| 1720 | A3 | 1900 | A3 | | | | | LSD0044.039 | 1.71 |
| 1711 | A3 | 1905 | A3 | | | | | LSD0044.022 | 1.71 |
| 1720 | A3 | 1905 | A3 | | | | | LSD0044.003 | 1.71 |
| 1725 | A3 | 1905 | A3 | | | | | LSD0044.001 | 1.71 |
| 1656 | A3 | 26 | A1 | | | | | LSD0038.001 | 1.71 |
| 1656 | A3 | 18 | A1 | | | | | LSD0038.003 | 1.71 |
| 1656 | A3 | 18 | A1 | | | | | LSD0038.008 | 1.71 |
| 1656 | A3 | 40 | A1 | | | | | LSD0038.012 | 1.71 |
| 1656 | A3 | 40 | A1 | | | | | LSD0038.013 | 1.71 |
| 1656 | A3 | 26 | A1 | | | | | LSD0038.015 | 1.71 |
| 1656 | A3 | 399 | A2 | | | | | LSD0039.001 | 1.71 |
| 1656 | A3 | 403 | A2 | | | | | LSD0039.003 | 1.71 |
| 1656 | A3 | 403 | A2 | | | | | LSD0039.010 | 1.71 |
| 1656 | A3 | 1725 | A3 | | | | | LSD0045.001 | 1.71 |
| 1656 | A3 | 1720 | A3 | | | | | LSD0045.002 | 1.71 |
| 1900 | A3 | 18 | A1 | | | | | LSD0042.014 | 1.71 |
| 1900 | A3 | 18 | A1 | | | | | LSD0042.023 | 1.71 |
| 1900 | A3 | 26 | A1 | | | | | LSD0042.006 | 1.71 |
| 1900 | A3 | 26 | A1 | | | | | LSD0042.013 | 1.71 |
| 1900 | A3 | 40 | A1 | | | | | LSD0042.001 | 1.71 |
| 1900 | A3 | 40 | A1 | | | | | LSD0042.039 | 1.71 |
| 1900 | A3 | 26 | A1 | | | | | LSD0042.047 | 1.71 |
| 1905 | A3 | 18 | A1 | | | | | LSD0042.003 | 1.71 |
| 1905 | A3 | 40 | A1 | | | | | LSD0042.004 | 1.71 |
| 1905 | A3 | 26 | A1 | | | | | LSD0042.008 | 1.71 |
| 1905 | A3 | 26 | A1 | | | | | LSD0042.038 | 1.71 |
| 1905 | A3 | 40 | A1 | | | | | LSD0042.082 | 1.71 |
| 1910 | A3 | 26 | A1 | | | | | LSD0042.040 | 1.71 |
| 18 | A1 | 399 | A2 | | | | | LSD0037.002 | 1.71 |
| 26 | A1 | 399 | A2 | | | | | LSD0037.009 | 1.71 |
| 40 | A1 | 399 | A2 | | | | | LSD0037.011 | 1.71 |
| 18 | A1 | 403 | A2 | | | | | LSD0047.002 | 1.71 |
| 18 | A1 | 403 | A2 | | | | | LSD0047.005 | 1.71 |
| 18 | A1 | 403 | A2 | | | | | LSD0048.007 | 1.71 |
| 1656 | A3 | 1900 | A3 | | | | | LSD0046.001 | 1.71 |
| 1656 | A3 | 1900 | A3 | | | | | LSD0046.002 | 1.71 |
| 1656 | A3 | 1905 | A3 | | | | | LSD0046.003 | 1.71 |
| 1711 | A3 | 40 | A1 | | | | | LSD0040.011 | 1.71 |
| 1711 | A3 | 26 | A1 | | | | | LSD0040.042 | 1.71 |
| 1720 | A3 | 26 | A1 | | | | | LSD0040.002 | 1.71 |
| 1720 | A3 | 40 | A1 | | | | | LSD0040.008 | 1.71 |
| 1720 | A3 | 18 | A1 | | | | | LSD0040.021 | 1.71 |
| 1720 | A3 | 26 | A1 | | | | | LSD0040.037 | 1.71 |
| 1720 | A3 | 18 | A1 | | | | | LSD0040.046 | 1.71 |
| 1725 | A3 | 26 | A1 | | | | | LSD0040.003 | 1.71 |
| 1725 | A3 | 40 | A1 | | | | | LSD0040.006 | 1.71 |
| 1725 | A3 | 26 | A1 | | | | | LSD0040.007 | 1.71 |
| 1725 | A3 | 18 | A1 | | | | | LSD0040.010 | 1.71 |
| 1725 | A3 | 40 | A1 | | | | | LSD0040.039 | 1.71 |
| 1725 | A3 | 18 | A1 | | | | | LSD0040.052 | 1.71 |
| 1720 | A3 | 403 | A2 | | | | | LSD0041.001 | 1.71 |
| 1720 | A3 | 399 | A2 | | | | | LSD0041.004 | 1.71 |
| 1711 | A3 | 403 | A2 | | | | | LSD0041.006 | 1.71 |
| 1720 | A3 | 403 | A2 | | | | | LSD0041.008 | 1.71 |
| 1725 | A3 | 403 | A2 | | | | | LSD0041.010 | 1.71 |
| 1725 | A3 | 403 | A2 | | | | | LSD0041.014 | 1.71 |
| 1725 | A3 | 399 | A2 | | | | | LSD0041.016 | 1.71 |
| 1711 | A3 | 403 | A2 | | | | | LSD0041.035 | 1.71 |
| 1900 | A3 | 399 | A2 | | | | | LSD0043.001 | 1.71 |
| 1900 | A3 | 403 | A2 | | | | | LSD0043.002 | 1.71 |
| 1905 | A3 | 403 | A2 | | | | | LSD0043.005 | 1.71 |
| 1900 | A3 | 399 | A2 | | | | | LSD0043.006 | 1.71 |
| 1900 | A3 | 403 | A2 | | | | | LSD0043.007 | 1.71 |
| 1900 | A3 | 403 | A2 | | | | | LSD0043.008 | 1.71 |
| 1905 | A3 | 399 | A2 | | | | | LSD0043.015 | 1.71 |
| 1905 | A3 | 403 | A2 | | | | | LSD0043.029 | 1.71 |
| 1910 | A3 | 403 | A2 | | | | | LSD0043.043 | 1.71 |
| 26 | A1 | 403 | A2 | 1656 | A3 | | | pSD0077 | 2.30 |
| 26 | A1 | 403 | A2 | 1720 | A3 | | | pSD0078 | 2.30 |
| 26 | A1 | 403 | A2 | 1900 | A3 | | | pSD0079 | 2.30 |
| 26 | A1 | 1656 | A3 | 1720 | A3 | | | pSD0080 | 2.30 |
| 26 | A1 | 1656 | A3 | 1900 | A3 | | | pSD0081 | 2.30 |
| 26 | A1 | 1720 | A3 | 1900 | A3 | | | pSD0082 | 2.30 |
| 403 | A2 | 1656 | A3 | 1720 | A3 | | | pSD0083 | 2.30 |
| 403 | A2 | 1656 | A3 | 1900 | A3 | | | pSD0084 | 2.30 |
| 403 | A2 | 1720 | A3 | 1900 | A3 | | | pSD0085 | 2.30 |
| 1656 | A3 | 1720 | A3 | 1900 | A3 | | | pSD0086 | 2.30 |
| 26 | A1 | 403 | A2 | 1656 | A3 | 1720 | A3 | pSD0087 | 2.83 |
| 26 | A1 | 403 | A2 | 1656 | A3 | 1900 | A3 | pSD0088 | 2.83 |
| 26 | A1 | 403 | A2 | 1720 | A3 | 1900 | A3 | pSD0089 | 2.83 |
| 26 | A1 | 1656 | A3 | 1720 | A3 | 1900 | A3 | pSD0090 | 2.83 |
| 403 | A2 | 1656 | A3 | 1720 | A3 | 1900 | A3 | pSD0091 | 2.83 |
| 26 | A1 | 403 | A2 | 1656 | A3 | 1720 | A3 | pSD0092 | 2.83 |
| 18 | A1 | 745 | B | 2332 | CT | | | LSD0049.002 | 2.24 |
| 26 | A1 | 745 | B | 2332 | CT | | | LSD0049.008 | 2.24 |
| 26 | A1 | 745 | B | 2332 | CT | | | LSD0049.011 | 2.24 |
| 40 | A1 | 745 | B | 2332 | CT | | | LSD0049.012 | 2.24 |
| 40 | A1 | 745 | B | 2332 | CT | | | LSD0049.020 | 2.24 |
| 18 | A1 | 745 | B | 2332 | CT | | | LSD0049.021 | 2.24 |
| 40 | A1 | 745 | B | 2332 | CT | | | LSD0050.002 | 2.24 |
| 18 | A1 | 745 | B | 2332 | CT | | | LSD0050.003 | 2.24 |
| 26 | A1 | 745 | B | 2332 | CT | | | LSD0050.007 | 2.24 |
| 18 | A1 | 745 | B | 2332 | CT | | | LSD0050.010 | 2.24 |
| 26 | A1 | 745 | B | 2332 | CT | | | LSD0050.012 | 2.24 |
| 40 | A1 | 745 | B | 2332 | CT | | | LSD0050.014 | 2.24 |
| 403 | A2 | 745 | B | 2332 | CT | | | LSD0051.002 | 2.24 |
| 399 | A2 | 745 | B | 2332 | CT | | | LSD0051.003 | 2.24 |
| 403 | A2 | 745 | B | 2332 | CT | | | LSD0052.001 | 2.24 |
| 399 | A2 | 745 | B | 2332 | CT | | | LSD0052.003 | 2.24 |
| 1725 | A3 | 745 | B | 2332 | CT | | | LSD0053.021 | 2.24 |
| 1720 | A3 | 745 | B | 2332 | CT | | | LSD0053.022 | 2.24 |
| 1711 | A3 | 745 | B | 2332 | CT | | | LSD0053.024 | 2.24 |
| 1720 | A3 | 745 | B | 2332 | CT | | | LSD0054.021 | 2.24 |
| 1711 | A3 | 745 | B | 2332 | CT | | | LSD0054.025 | 2.24 |
| 1725 | A3 | 745 | B | 2332 | CT | | | LSD0054.026 | 2.24 |
| 1900 | A3 | 745 | B | 2332 | CT | | | LSD0055.021 | 2.24 |
| 1905 | A3 | 745 | B | 2332 | CT | | | LSD0055.022 | 2.24 |
| 1900 | A3 | 745 | B | 2332 | CT | | | LSD0055.026 | 2.24 |
| 1900 | A3 | 745 | B | 2332 | CT | | | LSD0056.021 | 2.24 |
| 1900 | A3 | 745 | B | 2332 | CT | | | LSD0056.024 | 2.24 |
| 1910 | A3 | 745 | B | 2332 | CT | | | LSD0056.025 | 2.24 |

### Example 27: Binding Interference of FVIII-XTEN to Anti-FVIII Antibody

[0566] The ability of XTEN inserted into different locations of CFXTEN fusion proteins to affect the binding of anti-FVIII antibodies was determined by sandwich ELISA assays. Two anti-FVIII antibodies; i.e. GMA-8021 (Green Mountain Antibodies, Burlington, VT) and ESH8 (American Diagnostica Inc., Stamford, CT), that bind to the A2 and C2 domains, respectively were utilized as capture antibodies. A non-XTEN containing FVIII-His-Myc protein was used as a calibration standard and positive control for all ELISAs. Ten CFXTEN fusion proteins with single XTEN insertions in either the A1, A2 or A3 domains were created that additionally contained His and Myc affinity tags. The protein concentrations of each test sample was normalized to 100% based on an anti-His capture-anti-Myc detection ELISA run concurrently on the same plate as the anti-FVIII antibody capture-anti-Myc detection ELISA.

[0567] Briefly, appropriate wells on a 96-well plate were coated with GMA-8021, ESH8 or anti-His antibody overnight at 4° C., then were washed and blocked with BSA. Equal volumes of the respective control or fusion proteins were introduced into duplicate wells and allowed to interact with coated GMA-8021, ESH8 or anti-His antibody for 2 h at room temperature. After incubation, unbound material was washed away and a rabbit anti-Myc detection antibody was added and incubated for an additional h at room temperature. The plate was then washed and a peroxidase-conjugated donkey anti-rabbit secondary antibody was introduced and incubated for 1 h at room temperature. The plate was washed again, followed by the addition of TMB substrate and the reaction was allowed to proceed for 5-20 min. H2SO4 was introduced to stop the reaction and absorbance was read by spectrophotometer at 450 nm.

[0568] Results: The results are presented in Table 29. Collectively, the results demonstrate that the two antibodies against the CFXTEN fusion proteins with XTEN inserted into the A2 domain exhibited reduced binding of FVIII compared to CFXTEN with XTEN inserted into the A1 or A3 domain when the anti-FVIII capture antibody was GMA-8021 (with binding affinity to the A2 domain). In contrast, there was no discernible pattern of inhibition or enhancement of binding by any of the CFXTEN when the anti-FVIII capture antibody was ESH8, with binding affinity to the C2 domain.

TABLE 29
Binding Interference of FVIII-XTEN to anti-FVIII Antibody

| | | Concentration on | | |
|---|---|---|---|---|
| | XTEN insertion | aFVIII/Myc ÷ concentration on aHis/Myc | | |
| | (Domain, site, | | GMA-8021/Myc (A2 | ESH8/Myc |
| Sample Tested | XTEN) | His/Myc | domain) | (C2 domain) |
| FVIII-His-Myc | None | 100% | 92% | 104% |
| FVIII-XTEN-His-Myc | A2, 403, AE144 | 100% | 103% ± 1% | 141% ± 24% |
| | A2, 403, AG144 | 100% | 104% ± 6% | 129% ± 12% |
| | A2, 399, AE144 | 100% | 100% ± 8% | 140% ± 18% |
| | A3, 1656, AG144 | 100% | 153% | 158% |
| | A1, 18, AE144 | 100% | 129% | 130% |
| | A1, 18, AG144 | 100% | 150% | 131% |
| | A1, 26, AE144 | 100% | 155% | 87% |
| | A1, 26, AG144 | 100% | 157% | 147% |
| | A1, 40, AE144 | 100% | 137% | 147% |
| | A1, 40, AG144 | 100% | 164% ± 0% | 153% ± 18% |

aFVIII/Myc = GMA-8021/Myc or ESH8/Myc antibody condition;
aHis/Myc = anti-His/Myc antibody condition

### Example 28: Activity Assay of CFXTEN Fusion Proteins in the Presence of FVIII Inhibitors

[0569] Inhibitor Testing Titration Procedure:

[0570] Select antibodies inhibiting FVIII procoagulant activity were purchased from commercial sources. The antibodies target select domains of FVIII (e.g. A2, A3, C1, C2) and inhibit FVIII-dependent procoagulant activity. In order to establish the optimal concentration of FVIII inhibitors to utilize in the assay, an initial titration experiment was performed using varying amounts of each inhibitory antibody incubated at 37° C. for 2 hrs with the base vector expressing wild-type FVIII with a His/Myc double tag, and a second sample with antibody and at least one CFXTEN fusion protein. The samples were then utilized in a coagulation assay to determine the FVIII activity. The activity was measured by the Coatest assay procedure described herein. The concentration that resulted in optimal inhibition of FVIII activity was determined for each antibody individually.

[0571] Inhibitor Testing Procedure:

[0572] The FVIII inhibitor antibodies were then used at their optimal concentration for assay of test samples. CFXTEN and positive control samples were individually incubated with each antibody at 37° C. for 2 hrs and the samples were then collected and utilized in the Coatest activity assay, along with untreated aliquots of the CFXTEN and positive control. In some cases, CFXTEN constructs with a R1648A mutation were tested to determine the effect, if any, of this mutation on resistance to inhibitors as measured by the retention of FVIII activity.

[0573] Results:

[0574] The results of the titration experiment are shown in FIG. 26. The data indicate a right-shift of approximately 0.7 order of magnitude in the amount of antibody required to inhibit the procoagulant activity of the CFXTEN LSD0049.002 to the 50% level, compared to FVIII positive control, indicating that the CFXTEN with three XTEN insertions (at insertion points corresponding to amino acid residue 18, 745 and 2332 of the BDD-FVIII) had lower binding with the antibody compared to FVIII, reflected in the retention of coagulation activity.

[0575] The results of the Coatest assays are presented in Tables 30 and 31, for the FVIII inhibitor antibodies GMA8008 and GMA8021, respectively. All of the untreated CFXTEN fusion protein constructs tested exhibited procoagulant activity, as did the pBC00114 FVIII positive control. The positive control sample pre-incubated with FVIII inhibitor antibodies resulted in a sharp decrease in the measured coagulation activity to 0.05-0.15 (5-15%) relative to the untreated sample, as did the majority of the CFXTEN constructs treated with the GMA8008 antibody to the C2 domain. However, three CFXTEN fusion proteins retained at least twice the relative remaining activity compared to the FVIII control; LSD0049.020, LSD0053.024, and LSD0056.025, each with three XTEN inserts.

[0576] The CFXTEN samples showed a lower degree of inhibition with the GMA8021 antibody to the A2 domain compared to untreated samples that was further reduced by either the additional numbers of XTEN inserts (tabular data shown in Table 30). FIG. 29 shows the graph of median values of the ratio to control of retained activity showing a linear relationship between numbers of XTEN inserted and reduced inhibition to the GMA8021 antibody relative to the inhibition of the FVIII control. Similarly, the means±S.E. for the ratio to control values were 2.26±0.12 for 1 XTEN, 3.48±0.26 for 2 XTEN and 5.70±0.29 for 3 XTEN insertions. CFTXEN with at least three XTEN inserts treated with the GMA8021 antibody had at least 4.5 to 9.2-fold greater retention of FVIII activity compared to FVIII control. In addition, in those CFXTEN with three XTEN insertions, constructs with a higher degree of separation (in numbers of amino acid residues) between any two insertions appeared to result in a higher degree of procoagulant activity and, hence, less binding by the FVIII inhibitor antibody, compared to insertions clustered more closely; e.g. on the C-terminal side of the B-domain. The assay results of constructs with the R1648A mutation appeared to be comparable to those without the mutation.

[0577] Conclusions: The results support that, under the conditions of the experiments, insertion of XTEN into FVIII resulted in protection against binding by FVIII inhibitors, with retention of procoagulant activity, and that inclusion of multiple XTEN inserts increased resistance to, in particular, the A2 domain inhibitor antibody. Lastly, there appears to be an effect by having spatial separation between the XTEN inserts.

TABLE 30
Results of Coagulation Assay with CFXTEN treated with antibody GMA8008 to C2 Domain

| | Relative | | | | | |
|---|---|---|---|---|---|---|
| Construct | Remaining | Ratio to | XTEN | XTEN | XTEN | |
| Name | Activity | Control | Insertion 1 | Insertion 2 | Insertion 3 | Mutations |
| pBC0114 CT | 0.05-0.15 | 1 | | | | |
| pBC0149 | 0.1 | 0.8 | 0745_AE42_1 | | | |
| pSD0045 | 0.3 | 1.1 | 0018_AE144_5A | | | |
| pSD0046 | 0.3 | 1.0 | 0018_AG144_F | | | |
| pSD0050 | 0.2 | 0.9 | 0026_AG144_F | | | |
| pSD0051 | 0.3 | 1.3 | 0040_AE144_5A | | | |
| pSD0052 | 0.2 | 1.0 | 0040_AG144_F | | | |
| pSD0001 | 0.2 | 0.9 | 0403_AE144_2A | | | |
| pBC0136 | 0.2 | 1.2 | 0745_AE288_1 | | | |
| pBC0137 | 0.2 | 1.1 | 0745_AE288_1 | | | R1648A |
| pSD0013 | 0.1 | 0.9 | 2332_AE144_6B | | | |
| pSD0014 | 0.1 | 0.8 | 2332_AG144_1 | | | |
| pBC0145 | 0.1 | 0.6 | 2332_AE288_1 | | | |
| pSD0019 | 0.1 | 0.5 | 2332_AE288_1 | | | |
| pBC0146 | 0.1 | 0.7 | 2332_AG288_1 | | | |
| pSD0015 | 0.1 | 0.8 | 2332_AE864 | | | |
| LSD0038.008 | 0.1 | 0.9 | 0018_AG144_F | 1656_AG144_C | | |
| LSD0038.013 | 0.1 | 0.6 | 0040_AG144_F | 1656_AG144_C | | |
| LSD003.09 | 0.1 | 0.9 | 0745_AE144_3B | 2332_AE288_1 | | |
| LSD003.06 | 0.0 | 0.8 | 0745_AE144_3B | 2332_AE288_1 | | R1648A |
| LSD0046.001 | 0.0 | 0.6 | 1656_AG144_C | 1900_AG144_C | | |
| PSD077 | 0.1 | 1.0 | 0026_AG144_F | 0403_AE144_2A | 1656_AG144_C | |
| PSD080 | 0.1 | 1.0 | 0026_AG144_F | 1656_AG144_C | 1720_AG144_C | |
| PSD083 | 0.1 | 0.8 | 0403_AE144_2A | 1656_AG144_C | 1720_AG144_C | |
| PSD084 | 0.1 | 0.9 | 0403_AE144_2A | 1656_AG144_C | 1900_AE144_4A | |
| LSD0050.010 | 0.1 | 0.7 | 0018_AE144_5A | 0745_AE144_3B | 2332_AE288_1 | |
| LSD0049.021 | 0.0 | 0.6 | 0018_AE144_5A | 0745_AE144_3B | 2332_AE288_1 | R1648A |
| LSD0049.002 | 0.1 | 0.9 | 0018_AG144_F | 0745_AE144_3B | 2332_AE288_1 | R1648A |
| LSD0049.008 | 0.1 | 0.9 | 0026_AE144_5A | 0745_AE144_3B | 2332_AE288_1 | R1648A |
| LSD0049.011 | 0.1 | 0.9 | 0026_AG144_F | 0745_AE144_3B | 2332_AE288_1 | R1648A |
| LSD0049.020 | 0.2 | 2.6 | 0040_AE144_5A | 0745_AE144_3B | 2332_AE288_1 | R1648A |
| LSD0050.002 | 0.0 | 0.2 | 0040_AG144_F | 0745_AE144_3B | 2332_AE288_1 | |
| LSD0053.024 | 0.2 | 2.5 | 1711_AE144_4A | 0745_AE144_3B | 2332_AE288_1 | |
| LSD0054.021 | 0.2 | 1.5 | 1720_AG144_C | 0745_AE144_3B | 2332_AE288_1 | |
| LSD0055.021 | 0.2 | 1.6 | 1900_AE144_4A | 0745_AE144_3B | 2332_AE288_1 | R1648A |
| LSD0056.021 | 0.2 | 1.6 | 1900_AG144_C | 0745_AE144_3B | 2332_AE288_1 | |
| LSD0056.025 | 0.3 | 2.0 | 1910_AG144_C | 0745_AE144_3B | 2332_AE288_1 | |

proportion of activity remaining relative to corresponding untreated sample
The ratio of the relative remaining activity (relative to its own control) compared to FVIII pBC0114 positive control

TABLE 31
Results of Coagulation Assay with CFXTEN treated with antibody GMA8021 to A2 Domain

| | Relative | | | | | |
|---|---|---|---|---|---|---|
| Construct | Remaining | Ratio to | XTEN | XTEN | XTEN | |
| Name | Activity | Control | Insertion 1 | Insertion 2 | Insertion 3 | Mutations |
| pBC0114 | 0.05-0.15 | 1 | | | | |
| pBC0149 | 0.2 | 1.3 | 0745_AE42_1 | | | |
| pSD0045 | 0.3 | 2.7 | 0018_AE144_5A | | | |
| pSD0046 | 0.2 | 2.1 | 0018_AG144_F | | | |
| pSD0050 | 0.2 | 2.4 | 0026_AG144_F | | | |
| pSD0051 | 0.3 | 3.1 | 0040_AE144_5A | | | |
| pSD0052 | 0.3 | 2.7 | 0040_AG144_F | | | |
| pSD0001 | 0.2 | 1.6 | 0403_AE144_2A | | | |
| pBC0136 | 0.3 | 2.4 | 0745_AE288_1 | | | |
| pBC0137 | 0.3 | 2.4 | 0745_AE288_1 | | | R1648A |
| pSD0013 | 0.2 | 1.8 | 2332_AE144_6B | | | |
| pSD0014 | 0.2 | 2.1 | 2332_AG144_1 | | | |
| pBC0145 | 0.3 | 2.1 | 2332_AE288_1 | | | |
| pSD0019 | 0.3 | 2.3 | 2332_AE288_1 | | | |
| pBC0146 | 0.3 | 2.1 | 2332_AG288_1 | | | |
| pSD0015 | 0.3 | 2.8 | 2332_AE864 | | | |
| LSD0038.008 | 0.4 | 3.0 | 0018_AG144_F | 1656_AG144_C | | |
| LSD0038.013 | 0.4 | 3.0 | 0040_AG144_F | 1656_AG144_C | | |
| LSD003.09 | 0.3 | 3.6 | 0745_AE144_3B | 2332_AE288_1 | | |
| LSD003.06 | 0.3 | 3.4 | 0745_AE144_3B | 2332_AE288_1 | | R1648A |
| LSD0046.001 | 0.2 | 4.4 | 1656_AG144_C | 1900_AG144_C | | |
| PSD077 | 0.4 | 5.8 | 0026_AG144_F | 0403_AE144_2A | 1656_AG144_C | |
| PSD080 | 0.4 | 5.7 | 0026_AG144_F | 1656_AG144_C | 1720_AG144_C | |
| PSD083 | 0.3 | 5.0 | 0403_AE144_2A | 1656_AG144_C | 1720_AG144_C | |
| PSD084 | 0.3 | 4.5 | 0403_AE144_2A | 1656_AG144_C | 1900_AE144_4A | |
| LSD0050.010 | 0.4 | 6.7 | 0018_AE144_5A | 0745_AE144_3B | 2332_AE288_1 | |
| LSD0049.021 | 0.4 | 6.7 | 0018_AE144_5A | 0745_AE144_3B | 2332_AE288_1 | R1648A |
| LSD0049.002 | 0.5 | 9.2 | 0018_AG144_F | 0745_AE144_3B | 2332_AE288_1 | R1648A |
| LSD0049.008 | 0.4 | 5.9 | 0026_AE144_5A | 0745_AE144_3B | 2332_AE288_1 | R1648A |
| LSD0049.011 | 0.4 | 5.6 | 0026_AG144_F | 0745_AE144_3B | 2332_AE288_1 | R1648A |
| LSD0049.020 | 0.3 | 5.0 | 0040_AE144_5A | 0745_AE144_3B | 2332_AE288_1 | R1648A |
| LSD0050.002 | 0.3 | 6.2 | 0040_AG144_F | 0745_AE144_3B | 2332_AE288_1 | |
| LSD0053.024 | 0.3 | 4.5 | 1711_AE144_4A | 0745_AE144_3B | 2332_AE288_1 | |
| LSD0054.021 | 0.5 | 5.2 | 1720_AG144_C | 0745_AE144_3B | 2332_AE288_1 | |
| LSD0055.021 | 0.5 | 5.4 | 1900_AE144_4A | 0745_AE144_3B | 2332_AE288_1 | R1648A |
| LSD0056.021 | 0.5 | 5.1 | 1900_AG144_C | 0745_AE144_3B | 2332_AE288_1 | |
| LSD0056.025 | 0.5 | 4.8 | 1910_AG144_C | 0745_AE144_3B | 2332_AE288_1 | |

proportion of activity remaining relative to corresponding untreated sample
The ratio of the relative remaining activity (relative to its own control) compared to FVIII pBC0114 positive control

### Example 29: Protein Purification of CFXTEN Fusion Proteins pBC0145 and pBC0146

[0578] Two CFXTEN constructs with C-terminal XTEN were utilized to establish a purification method. For both pBC0145 with a C-terminal XTEN of 288 amino acids of the AE family (see sequence in Table 21) and pBC0146 with a C-terminal XTEN of 288 amino acids of the AG family (see sequence in Table 21), a tangential flow filtration (TFF) step was used to buffer exchange the clarified conditioned media from cell culture. Products were then captured using a strong anion exchange chromatography resin, and then further purified using VIIISelect affinity chromatography (GE Healthcare). An additional size exclusion chromatography (GE Healthcare) was applied to FVIII-pBC0146 as a third polish step to remove high molecule weight species. The purity of both fusion proteins was deemed acceptable by HPLC-SEC and was further confirmed by SDS-PAGE analysis of the two CFXTEN constructs showing CFXTEN products at expected sizes. The specific activity of both molecules was comparable to B-domain deleted FVIII, as measured by aPTT coagulation assay and ELISA determination of FVIII concentration.

### Example 30: Pharmacokinetics of CFXTEN Fusion Proteins pBC0145 and pBC0146 in HemA and FVIII/VWF DKO Mice

[0579] Male FVIII knock-out (HemA) mice or FVIII/VWF double knock-out (DKO) mice, 8-12 weeks old, were treated with a single intravenous administration of either recombinant BDD-FVIII, the CFXTEN pBC0145 or pBC0146 fusion purified proteins (from Example 23) at 200 IU/kg dose (n=4/time point). At select time points, blood samples were collected via vena cava sampling. In HemA mice, blood samples were collected at 5 min, 1 4, 8, 16, 20, 24, 32, and 48 hrs post-dosing for rBDD-FVIII, and at 5 min, 8, 16, 24, 32, 48, 55 and 72 hrs post-dosing for pBC0145 and pBC0146 fusion proteins. In the FVIII/VWF DKO mice, blood samples were collected at 5 min, 30 min and 1 hr post-dosing for rBDD-FVIII, and at 5 min, 4, 8, 16 and 24 hr post-dosing for the pBC0145 and pBC0146 fusion proteins. Plasma FVIII activity was measured by FVIII chromogenic assay and the PK profile was analyzed by the WinNonlin program.

[0580] Results: As show in Table 32 and FIG. 24, CFXTEN with the AE C-terminus XTEN insertion (pBC0145) exhibited 1.6-fold and 14.1-fold FVIII half-life (T½) extension compared to rBDD FVIII in HemA mice and FVIII/VWF DKO mice, respectively. The CFXTEN with the AG C-terminus XTEN insertion (pBC0146) had 1.4-fold and 14.4-fold extended half-life compared to rBDD-FVIII in the HemA mice and FVIII/VWF DKO mice, respectively. The magnitude of the FVIII half-life extension conferred by XTEN insertion was much more pronounced in the FVIII/VWF DKO mice compared to the HemA mice, demonstrated by the 14-fold longer FVIII half-life from both FVIII-AE-XTEN and FVIII-AG-XTEN compared to rBDD-FVIII. In addition, in comparison to rBDD-FVIII, FVIII with C-terminal AE or AG-XTEN insertion also had significantly improved FVIII recovery at the 5 min interval, reduced clearance and volume of distribution, and increased AUC in the DKO mice. Under the conditions of the experiment, CFXTEN with C-terminus XTEN insertions demonstrated great potential on FVIII half-life extension, and, when combined with other FVIII intra-domain insertions could potentially further extend FVIII half-life.

TABLE 32
Pharmacokinetic parameters of CFXTEN in HemA and FVIII/VWF DKO mice

| | | 5 min | | | Cl | Vss | AUC_D | | |
|---|---|---|---|---|---|---|---|---|---|
| Mouse | | Recovery | T_{1/2} | MRT | (mL/ | (mL/ | (hrkgmIU/ | T_{1/2} Fold | Mouse |
| Strain | Treatment | (%) | (hr) | (hr) | hr/kg) | kg) | mL/mIU) | Increase | Strain |
| HemA | pBC0145 | 73 | 11.88 | 16.47 | 3.81 | 62.74 | 0.26 | 1.6 | HemA |
| | pBC0146 | 64 | 10.54 | 13.31 | 5.66 | 75.34 | 0.18 | 1.4 | |
| | rBDD-FVIII | 89 | 7.58 | 11.02 | 4.33 | 47.68 | 0.23 | | |
| FVIII/ | pBC0145 | 74 | 3.38 | 3.76 | 13.06 | 63.68 | 0.0765 | 13.9 | FVIII/VWF |
| VWF | | | | | | | | | DKO |
| DKO | pBC0146 | 61 | 3.45 | 3.61 | 17.40 | 86.63 | 0.0575 | 14.2 | |
| | rBDD- | 23 | 0.24 | 0.24 | 460.62 | 161.51 | 0.0022 | | |
| | FVIII | | | | | | | | |

Compared to rBDD-FVIII

### Example 31: Cell Culture and Concentration of Cell Culture Media for CFXTEN Fusion Proteins pSD0050 and pSD0062

[0581] CFXTEN construct variants pSD0050 with an intradomain AG XTEN of 144 amino acids inserted after amino acid residue 26 of BDD FVIII, pSD0062 with an intradomain AE XTEN of 144 amino acids inserted after residue 1900 of BDD FVIII (Note: amino acid numbering based full length FVIII), as well as a construct encoding rBDD-FVIII, were transfected into HEK293F cells (Invitrogen, Carlsbad, CA) using polyethyleneimine (PEI, Polysciences Inc. Warrington, PA). The transiently transfected cells were grown in 293 Free Style medium media (Invitrogen, Carlsbad, CA) for 4 days and 50-100 ml cell culture media were then concentrated 10- to 20-fold by Centricon Spin Column (100 kDa MW cut-off) to reach 10-30 IU/ml FVIII activity. The concentrated materials were then flash-frozen and stored at −80° c. for future in vitro analysis and in vivo pharmacokinetic studies.

### Example 32: Pharmacokinetics of CFXTEN Fusion Proteins pSD0050 and pSD0062 in HemA and FVIII/VWF DKO Mice

[0582] Male HemA or FVIII/VWF double knock-out (DKO) mice, 8-12 weeks old, were treated with a single intravenous administration of cell culture concentrates from Example 31 containing either recombinant BDD-FVIII, the CFXTEN pBD0050 or pBD062 at 100-300 IU/kg (n=3/group). At select time points, blood samples were collected via retro orbital bleeds from the same set of mice. In HemA mice, blood samples were collected at 5 min, 24 hr and 48 hr post-dosing, while in FVIII/VWF DKO mice blood samples were collected at 5 min, 8 hr and 16 hr. The FVIII activity of plasma samples and cell culture concentrates were analyzed by a FVIII chromogenic assay, and the PK profile of rBDD FVIII and FVIII-XTEN variants were analyzed using the WinNonlin program.

[0583] Results: The PK profiles of the two CFXTEN intradomain insertion variants pSD0050 and pSD0062 and rBDD-FVIII in HemA mice and FVIII/VWF DKO mice are shown in FIG. 25 and Table 33. In HemA mice, a comparable initial recovery at the 5 min interval was observed for the three test FVIII molecules. Both CFXTEN fusion proteins demonstrated two-fold longer half-life compared to wild-type BDD-FVIII. In FVIII-VWF DKO mice, because of the loss of VWF protection, rBDD-FVIII had only a 15 min plasma half-life. In the case of the two CFXTEN, however, half-life were extended to 3.15 hr and 3.83 hr, respectively; values that are comparable to the CFXTEN with 288 C-terminus XTEN insertions (Example 24), suggesting that further extension of the XTEN length at a given insertion point may not be necessary. Under the experimental conditions, the study results clearly demonstrate that intradomain insertion of an XTEN with 144 amino acid residues not only preserved FVIII activity, but also provided similar FVIII half-life benefit as the C-terminus 288 amino acid XTEN insertion variants, suggesting that the combination of the FVIII intradomain and C-terminus insertions may allow further extension of FVIII half-life.

TABLE 33
Pharmacokinetic parameters of CFXTEN in HemA and FVIII/VWF DKO mice

| | | 5 min | | | Cl | Vss | AUC_D | |
|---|---|---|---|---|---|---|---|---|
| Mouse | | Recovery | T_{1/2} | MRT | (mL/ | (mL/ | (hrkgmIU/ | T_{1/2} Fold |
| Strain | Treatment | (%) | (hr) | (hr) | hr/kg) | kg) | mL/mIU) | Increase |
| HemA | pSD0050 | 40 | 14.12 | 14.25 | 5.27 | 75.03 | 0.19 | 2.3 |
| | pSD0062 | 43 | 12.96 | 14.79 | 4.24 | 62.67 | 0.24 | 2.1 |
| | rBDD- | 47 | 6.19 | 2.62 | 6.35 | 16.62 | 0.16 | |
| | FVIII | | | | | | | |
| FVIII/ | pSD0050 | 34 | 3.15 | 2.59 | 21.73 | 56.28 | 0.05 | ~12 |
| VWF | pSD0062 | 35 | 3.83 | 3.71 | 18.51 | 68.69 | 0.05 | ~15 |
| DKO | rBDD-FVIII | 23 | ~0.25 | | | | | |

Compared to rBDD-FVIII

### Example 33: Pharmacokinetic Analysis of CFXTEN Fusion Polypeptides in Rats

[0584] The pharmacokinetics of various CFXTEN fusion proteins, compared to FVIII alone, are tested in Sprague-Dawley rats. CFXTEN and FVIII are administered to female Sprague-Dawley rats (n=3) IV through a jugular vein catheter at 3-10n/rat. Blood samples (0.2 mL) are collected into pre-chilled heparinized tubes at predose, 0.08, 0.5, 1, 2, 4, 8, 24, 48, 72 hour time points, and processed into plasma. Quantitation of the test articles is performed by ELISA assay using an anti-FVIII antibody for both capture and detection. A non-compartmental analysis is performed in WinNonLin with all time points included in the fit to determine the PK parameters. Results are expected to show increased terminal half-life and area under the curve, and a reduced volume of distribution for the CFXEN compared to FVIII alone, and the results are used in conjunction with results from coagulation and pharmacodynamic assays to select those fusion protein configurations with desired properties.

### Example 34: Analysis of FVIII for XTEN Insertion Sites

[0585] The selection of XTEN insertion sites within the factor VIII molecule was performed by predicting the locations of permissive sites within loop structures or otherwise flexible surface exposed structural elements. For these analyses, the atomic coordinates of two independently determined X-ray crystallographic structures of FVIII were use (Shen B W, et al. The tertiary structure and domain organization of coagulation factor VIII. Blood. (2008) February 1; 111(3):1240-1247; Ngo J C, et al. Crystal structure of human factor VIII: implications for the formation of the factor IXa-factor VIIIa complex. Structure (2008)16(4):597-606), as well as those of factor VIII and factor VIIIa derived from molecular dynamic simulation (MDS) (Venkateswarlu, D. Structural investigation of zymogenic and activated forms of human blood coagulation factor VIII: a computational molecular dynamics study. BMC Struct Biol. (2010) 10:7). Atomic coordinates in Protein Data Bank (PDB) format were analyzed to identify regions of the FVIII/FVIIIa predicted to have a high degree solvent accessible surface area using the algorithms ASAView (Ahmad S, et al. ASAView: database and tool for solvent accessibility representation in proteins. BMC Bioinformatics (2004) 5:51) and GetArea (Rychkov G, Petukhov M. Joint neighbors approximation of macromolecular solvent accessible surface area. J Comput Chem (2007) 28(12):1974-1989). The resulting set of sites was then further prioritized on the basis of high predicted atomic positional fluctuation based on the basis of the published results of the MDS study. Sites within the acidic peptide regions flanking the A1, A2, and A3 domains, as well as those that appeared by visual inspection to be in areas other than surface exposed loops were deprioritized. The resulting set of potential sites was evaluated on the basis of interspecies sequence conservation, with those sites in regions of high sequence conservation among 20 vertebrate species being ranked more favorably. Additionally, putative clearance receptor binding sites, FVIII interaction sites with other molecules (such as vWF, FIX), domain and exon boundaries were also considered in fusion site selection. Finally, sites within close proximity to mutations implicated in hemophilia A listed in the Haemophilia A Mutation, Search, Test and Resource Site (HAMSTeRS) database were eliminated (Kemball-Cook G, et al. The factor VIII Structure and Mutation Resource Site: HAMSTeRS version 4. Nucleic Acids Res. (1998) 26(1):216-219). Based on these criteria, the construction of 42 FVIII-XTEN variants was proposed for XTEN insertions. Of these, three represent XTEN insertions within the residual B domain sequence, two represent extensions to the C-terminus of the factor VIII molecule, and 37 represent XTEN insertions within structurally defined inter- and intradomain structural elements; i.e., residues 3, 18, 22, 26, 40, 60, 116, 130, 188, 216, 230, 333, 375, 403, 442, 490, 518, 599, 713, 745, 1720, 1796, 1802, 1827, 1861, 1896, 1900, 1904, 1937, 2019, 2068, 2111, 2120, 2171, 2188, 2227, 2277, and 2332.

### Example 35: Functional Analysis of FVIII-XTEN Constructs

[0586] Two FVIII-XTEN fusion proteins, FVIII-AE288 (F8X-40) and FVIII-AG288 (F8X-41), contain an AE288_1 XTEN or an AG288_1 XTEN, respectively, fused at the C-terminus of FVIII C2 domain. To determine if FVIII activity was retained after XTEN fusion, HEK293 cells were transfected separately with these two FVIII-XTEN fusion constructs by using polyethylenimine (PEI) in serum-free medium. At 3 or 5 days post-transfection, the cell culture supernatant was tested for FVIII activity by a two-stage chromogenic assay. Purified recombinant FVIII, calibrated against WHO international standard, was used to establish the standard curve in the chromogeinic assay. The fusion protein products of both F8X-40 and F8X-41 constructs were expressed at levels comparable to those of wild-type BDD-FVIII constructs. (Table 34).

TABLE 34
FVIII Titer of FVIII-XTEN fusion proteins in transient
transfection cell culture

| FVIII Molecules | | FVIII 066^{a} | pBC 0114^{a} | F8X-40 | F8X-41 |
|---|---|---|---|---|---|
| FVIII activity | Sample A | 6.42 | 6.68 | 7.47 | 3.32^{b} |
| (IU/ml) | Sample B | 7.13 | 7.61 | 8.25 | Not |
| | | | | | done |

^{a}Both FVIII 066 and pBC 0114 contain B-domain deleted FVIII without XTEN fusion.
^{b}The F8X-41sample was from a 3-day transfection while other samples were from a 5-day transient transfection.

### Example 36: Functional Analysis of FVIII-XTEN Constructs: FVIII Activity and PK Properties

[0587] The half-life extension potential of the F8X-40 and F8X-41 constructs was evaluated in FVIII and von Willebrand factor double knock-out mice by hydrodynamic plasmid DNA injection, with a FVIIIFc DNA construct serving as a positive control. Mice were randomly divided into 3 groups with 4 mice per group. Plasmid DNA encoding BDD FVIIIFc fusion protein, F8X-40 or F8X-41, all sharing the same DNA vector backbone, was administered to mice in the respective groups. Approximately 100 micrograms of the appropriate plasmid DNA was injected into each mouse via hydrodynamic injection, and blood plasma samples were collected at 24 hours and 48 hours post-injection. The plasma FVIII activity was measured by a two-stage chromogenic assay using calibrated recombinant FVIII as a standard. As shown in FIG. 23, samples from the F8X-40 and F8X-41 groups showed higher plasma FVIII titers than did those from the BDD FVIIIFc, suggesting FVIII fusion with XTEN prolongs the half-life of FVIII in vivo. Taken together, these data support the conclusion that FVIII-XTEN fusion proteins retained FVIII activity in transient transfection and exhibited prolonged circulating half-life in an animal model.

### Example 37: Pharmacodynamic Evaluation of CFXTEN in Animal Models

[0588] The in vivo pharmacologic activity of CFXTEN fusion proteins are assessed using a variety of preclinical models of bleeding including but not limited to those of hemophilia, surgery, trauma, thrombocytopenia/platelet dysfunction, clopidogrel/heparin-induced bleeding and hydrodynamic injection. These models are developed in multiple species including mice, rat, rabbits, and dogs using methods equivalent to those used and published for other FVIII approaches. CFXTEN compositions are provided in an aqueous buffer compatible with in vivo administration (for example: phosphate-buffered saline or Tris-buffered saline). The compositions are administered at appropriate doses, dosing frequency, dosing schedule and route of administration as optimized for the particular model. Efficacy determinations include measurement of FVIII activity, one-stage clotting assay, FVIII chromogenic assay, activated partial prothrombin time (aPTT), bleeding time, whole blood clotting time (WBCT), thrombelastography (TEG or ROTEM), among others.

[0589] In one example of a PD model, CFXTEN and FVIII are administered to genetically-deficient or experimentally-induced HemA mice. At various time points post-administration, levels of FVIII and CFXTEN are measured by ELISA, activity of FVIII and CFXTEN is measured by commercially-available FVIII activity kits and clotting time is measured by aPTT assay. Overall, the results can indicate that the CFXTEN constructs may be more efficacious at inhibiting bleeding as compared to FVIII and/or equivalent in potency to comparable dosage of FVIII with less frequent or more convenient dosing intervals.

[0590] In a mouse bleeding challenge PD model CFXTEN and FVIII are administered to genetically-deficient or experimentally-induced HemA mice and effect on hemostatic challenge is measured. Hemostatic challenge can include tail transaction challenge, hemarthropthy challenge, joint bleeding or saphenous vein challenge among others. At various time points post-administration levels of FVIII and CFXTEN are measured by ELISA, activity of FVIII and CFXTEN are measured by commercially available FVIII activity kit, bleeding time is measured and clotting time is measured by aPTT assay. Overall the results are expected to indicate that the CFXTEN constructs are more efficacious at inhibiting bleeding as compared to FVIII and/or equivalent in potency to comparable dosage of FVIII with less frequent or more convenient dosing intervals, and the results are used in conjunction with results from coagulation and other assays to select those fusion protein configurations with desired properties.

[0591] In a dog PD model, CFXTEN and FVIII are administered to genetically-deficient hemophiliac dogs. At various time points post administration, levels of FVIII and CFXTEN are measured by ELISA, activity of FVIII and CFXTEN are measured by commercially available FVIII activity kit and clotting time is measured by aPTT assay. Overall the results indicates that the CFXTEN constructs may be more efficacious at inhibiting bleeding as compared to FVIII and/or equivalent in potency to comparable dosage of FVIII with less frequent or more convenient dosing, and the results are used in conjunction with results from coagulation and other assays to select those fusion protein configurations with desired properties.

[0592] In a dog bleeding challenge PD model CFXTEN and FVIII are administered to genetically deficient hemophiliac dogs and effect on hemostatic challenge is measured. Hemostatic challenge includes cuticle bleeding time among others. At various time points post-administration levels of FVIII and CFXTEN are measured by ELISA, activity of FVIII and CFXTEN are measured by commercially available FVIII activity kit, bleeding time is measured and clotting time are measured by aPTT assay. Overall the results indicate that the CFXTEN constructs may be more efficacious at inhibiting bleeding as compared to FVIII and/or equivalent in potency to comparable dosage of FVIII with less frequent or more convenient dosing intervals, and the results are used in conjunction with results from coagulation and other assays to select those fusion protein configurations with desired properties.

[0593] Additional preclinical models of bleeding include but are not limited to those of hemophilia, surgery, trauma, thrombocytopenia/platelet dysfunction, clopidogrel/heparin-induced bleeding and hydrodynamic injection. These models can developed in multiple species including mice, rat, rabbits, and dogs using methods equivalent to those used and published for other FVIII approaches. Overall the results indicate that the CFXTEN constructs may be more efficacious at inhibiting bleeding as compared to FVIII and/or equivalent in potency to comparable dosage of FVIII with less frequent or more convenient dosing intervals, and the results are used in conjunction with results from coagulation and other assays to select those fusion protein configurations with desired properties.

### Example 38: CFXTEN with Cleavage Sequences

[0594] C-Terminal XTEN Releasable by FXIa

[0595] A CFXTEN fusion protein consisting of an XTEN protein fused to the C-terminus of FVIII is created with an XTEN release site cleavage sequence placed in between the FVIII and XTEN components, as depicted in FIG. 12. Exemplary sequences are provided in Table 51. In this case, the release site cleavage sequence is incorporated into the CFXTEN that contains an amino acid sequence that is recognized and cleaved by the FXIa protease (EC 3.4.21.27, Uniprot P03951). Specifically the amino acid sequence KLTRAET (SEQ ID NO: 1688) is cut after the arginine of the sequence by FXIa protease. FXI is the procoagulant protease located immediately before FVIII in the intrinsic or contact activated coagulation pathway. Active FXIa is produced from FXI by proteolytic cleavage of the zymogen by FXIIa. Production of FXIa is tightly controlled and only occurs when coagulation is necessary for proper hemostasis. Therefore, by incorporation of the KLTRAET cleavage sequence (SEQ ID NO: 1688), the XTEN domain is only be removed from FVIII concurrent with activation of the intrinsic coagulation pathway and when coagulation is required physiologically. This creates a situation where the CFXTEN fusion protein is processed in one additional manner during the activation of the intrinsic pathway.

[0596] C-Terminal XTEN Releasable by FIIa (Thrombin)

[0597] A CFXTEN fusion protein consisting of an XTEN protein fused to the C-terminus of FVIII is created with an XTEN release site cleavage sequence placed in between the FVIII and XTEN components, as depicted in FIG. 12. In this case, the release site contains an amino acid sequence that is recognized and cleaved by the FIIa protease (EC 3.4.21.5, Uniprot P00734). Specifically the sequence LTPRSLLV (SEQ ID NO: 1618) [Rawlings N. D., et al. (2008) Nucleic Acids Res., 36: D320], is cut after the arginine at position 4 in the sequence. Active FIIa is produced by cleavage of FII by FXa in the presence of phospholipids and calcium and is down stream from factor IX in the coagulation pathway. Once activated its natural role in coagulation is to cleave fibrinogen (FIG. 2), which then in turn, begins clot formation. FIIa activity is tightly controlled and only occurs when coagulation is necessary for proper hemostasis. Therefore, by incorporation of the LTPRSLLV sequence (SEQ ID NO: 1618), the XTEN domain is only removed from FVIII concurrent with activation of either the extrinsic or intrinsic coagulation pathways, and when coagulation is required physiologically. This creates a situation where CFXTEN fusion is processed in one additional manner during the activation of coagulation.

[0598] C-Terminal XTEN Releasable by Elastase-2

[0599] A CFXTEN fusion protein consisting of an XTEN protein fused to the C-terminus of FVIII is created with an XTEN release site cleavage sequence placed in between the FVIII and XTEN components, as depicted in FIG. 12. Exemplary sequences are provided in Table 51. In this case, the release site contains an amino acid sequence that is recognized and cleaved by the elastase-2 protease (EC 3.4.21.37, Uniprot P08246). Specifically the sequence LGPVSGVP (SEQ ID NO: 1689) [Rawlings N. D., et al. (2008) Nucleic Acids Res., 36: D320], is cut after position 4 in the sequence. Elastase is constitutively expressed by neutrophils and is present at all times in the circulation. Its activity is tightly controlled by serpins and is therefore minimally active most of the time. Therefore as the long lived CFXTEN circulates, a fraction of it is cleaved, creating a pool of shorter-lived FVIII to be used in coagulation. In a desirable feature of the inventive composition, this creates a circulating pro-drug depot that constantly releases a prophylactic amount of FVIII.

[0600] C-Terminal XTEN Releasable by MMP-12

[0601] A CFXTEN fusion protein consisting of an XTEN protein fused to the C-terminus of FVIII is created with an XTEN release site cleavage sequence placed in between the FVIII and XTEN components, as depicted in FIG. 12. Exemplary sequences are provided in Table 51. In this case, the release site contains an amino acid sequence that is recognized and cleaved by the MMP-12 protease (EC 3.4.24.65, Uniprot P39900). Specifically the sequence GPAGLGGA (SEQ ID NO: 1690) [Rawlings N. D., et al. (2008) Nucleic Acids Res., 36: D320], is cut after position 4 of the sequence. MMP-12 is constitutively expressed in whole blood. Therefore as the long lived CFXTEN circulates, a fraction of it is cleaved, creating a pool of shorter-lived FVIII to be used in coagulation. In a desirable feature of the inventive composition, this creates a circulating pro-drug depot that constantly releases a prophylactic amount of FVIII.

[0602] C-Terminal XTEN Releasable by MMP-13

[0603] A CFXTEN fusion protein consisting of an XTEN protein fused to the C-terminus of FVIII is created with an XTEN release site cleavage sequence placed in between the FVIII and XTEN components, as depicted in FIG. 12. Exemplary sequences are provided in Table 51. In this case, the release site contains an amino acid sequence that is recognized and cleaved by the MMP-13 protease (EC 3.4.24.-, Uniprot P45452). Specifically the sequence GPAGLRGA (SEQ ID NO: 1691) [Rawlings N. D., et al. (2008) Nucleic Acids Res., 36: D320], is cut after position 4. MMP-13 is constitutively expressed in whole blood. Therefore as the long lived CFXTEN circulates, a fraction of it is cleaved, creating a pool of shorter-lived FVIII to be used in coagulation. In a desirable feature of the inventive composition, this creates a circulating pro-drug depot that constantly releases a prophylactic amount of FVIII.

[0604] C-Terminal XTEN Releasable by MMP-17

[0605] A CFXTEN fusion protein consisting of an XTEN protein fused to the C-terminus of FVIII is created with an XTEN release site cleavage sequence placed in between the FVIII and XTEN components, as depicted in FIG. 12. Exemplary sequences are provided in Table 51. In this case, the release site contains an amino acid sequence that is recognized and cleaved by the MMP-20 protease (EC.3.4.24.-, Uniprot Q9ULZ9). Specifically the sequence APLGLRLR (SEQ ID NO: 1692) [Rawlings N. D., et al. (2008) Nucleic Acids Res., 36: D320], is cut after position 4 in the sequence. MMP-17 is constitutively expressed in whole blood. Therefore as the long lived CFXTEN circulates, a fraction of it is cleaved, creating a pool of shorter-lived FVIII to be used in coagulation. In a desirable feature of the inventive composition, this creates a circulating pro-drug depot that constantly releases a prophylactic amount of FVIII.

[0606] C-Terminal XTEN Releasable by MMP-20

[0607] A CFXTEN fusion protein consisting of an XTEN protein fused to the C-terminus of FVIII is created with an XTEN release site cleavage sequence placed in between the FVIII and XTEN components, as depicted in FIG. 12. Exemplary sequences are provided in Table 51. In this case, the release site contains an amino acid sequence that is recognized and cleaved by the MMP-20 protease (EC.3.4.24.-, Uniprot 060882). Specifically the sequence PALPLVAQ (SEQ ID NO: 1693) [Rawlings N. D., et al. (2008) Nucleic Acids Res., 36: D320], is cut after position 4 (depicted by the arrow). MMP-20 is constitutively expressed in whole blood. Therefore as the long lived CFXTEN circulates, a fraction of it is cleaved, creating a pool of shorter-lived FVIII to be used in coagulation. In a desirable feature of the inventive composition, this creates a circulating pro-drug depot that constantly releases a prophylactic amount of FVIII.

[0608] Optimization of the Release Rate of XTEN

[0609] Variants of the foregoing Examples can be created in which the release rate of XTEN incorporated at the C-terminus, the N-terminus, or internal XTEN is altered. As the rate of XTEN release by an XTEN release protease is dependent on the sequence of the XTEN release site, by varying the amino acid sequence in the XTEN release site one can control the rate of XTEN release. The sequence specificity of many proteases is well known in the art, and is documented in several data bases. In this case, the amino acid specificity of proteases is mapped using combinatorial libraries of substrates [Harris, J. L., et al. (2000) Proc Natl Acad Sci USA, 97: 7754] or by following the cleavage of substrate mixtures as illustrated in [Schellenberger, V., et al. (1993) Biochemistry, 32: 4344]. An alternative is the identification of optimal protease cleavage sequences by phage display [Matthews, D., et al. (1993) Science, 260: 1113]. Constructs are made with variant sequences and assayed for XTEN release using standard assays for detection of the XTEN polypeptides.

### Example 39: Human Clinical Trial Designs for Evaluating CFXTEN Comprising FVIII

[0610] Kogenate® FS is recombinant human coagulation factor VIII, intended for promoting hemostasis in hemophilia A subjects. Due to its short half-life, Kogenate is dosed intravenously every other day for prophylaxis and 8 to every 12 h in treatment of bleeds until hemostasis is achieved. It is believed that fusion of one or more XTEN to FVIII improves the half-life of the protein, enabling a reduced dosing frequency using such CFXTEN-containing fusion protein compositions.

[0611] Clinical trials are designed such that the efficacy and advantages of CFXTEN, relative to Kogenate or other commercially available FVIII preparations, can be verified in humans. Such studies comprises three phases. First, a Phase I safety and pharmacokinetics study in adult patients is conducted to determine the maximum tolerated dose and pharmacokinetics and pharmacodynamics in humans (either normal subjects or patients with hemophilia), as well as to define potential toxicities and adverse events to be tracked in future studies. The Phase I studies are conducted in which single rising doses of CFXTEN compositions are administered by the route (e.g., subcutaneous, intramuscular, or intravenously) and biochemical, PK, and clinical parameters are measured at defined intervals. This permits the determination of the minimum effective dose and the maximum tolerated dose and establishes the threshold and maximum concentrations in dosage and circulating drug that constitute the therapeutic window for the respective components, as well as bioavailability when administered by the intramuscular or subcutaneous routes. From this information, the dose and dose schedule that permits less frequent administration of the CFXTEN compositions, yet retains the pharmacologic response, is obtained. Thereafter, clinical trials are conducted in patients with the condition, verifying the effectiveness of the CFXTEN compositions under the dose conditions, which can be conducted in comparison to a positive control such as Kogenate to establish the enhanced properties of the CFXTEN compositions.

[0612] Phase II and III clinical trials are conducted in patients suffering from any disease in which factor VIII may be expected to provide clinical benefit. For example, the CFXTEN is used in clinical trials for treatment of indications approved for use of factor VIII; such indications include bleeding episodes in hemophilia A, patients with inhibitors to factor VIII, prevention of bleeding in surgical interventions or invasive procedures in hemophilia A patients with inhibitors to factor VIII, treatment of bleeding episodes in patients with congenital factor VIII deficiency, and prevention of bleeding in surgical interventions or invasive procedures in patients with congenital factor VIII deficiency. CFXTEN may also be indicated for use in additional patient populations. A phase II dosing study is conducted in hemophilia A patients where pharmacodynamic, coagulation, bleeding and other physiologic, PK, safety and clinical parameters and clinical endpoints appropriate for trials are measured as a function of the dosing of the fusion proteins compositions, yielding dose-ranging information on doses that is appropriate for a subsequent Phase III trial, in addition to collecting safety data related to adverse events. The PK parameters are correlated to the physiologic, clinical and safety parameter data to establish the therapeutic window and the therapeutic dose regimen for the CFXTEN composition, permitting the clinician to establish the appropriate dose ranges for the composition. In one trial, hemophilia A patients with factor VIII inhibitors would be evaluated to establish doses and dose regimen of CFXTEN pharmaceutical compositions that result in achieving and maintaining hemostasis and preventing or attenuating bleeding episodes. Finally, a phase III efficacy study is conducted wherein patients are administered the CFXTEN pharmaceutical composition and a positive control (such as a commercially-available Kogenate) are administered using a dosing schedule deemed appropriate given the pharmacokinetic and pharmacodynamic properties of the respective compositions derived from the Phase II findings, with all agents administered for an appropriately extended period of time to achieve the study endpoints. Parameters that are monitored include aPTT assay, one- or two-stage clotting assays, control of bleeding episodes, or the occurrence of spontaneous bleeding episodes; parameters that are tracked relative to the placebo or positive control groups. Efficacy outcomes are determined using standard statistical methods. Toxicity and adverse event markers are also be followed in this study to verify that the compound is safe when used in the manner described. In another phase III trial, hemophilia A patients with factor VIII inhibitors would be evaluated to establish the effectiveness of CFXTEN pharmaceutical compositions in achieving and maintaining hemostasis and preventing or attenuating bleeding episodes.

### Example 40: Analytical Size Exclusion Chromatography of XTEN Fusion Proteins with Diverse Payloads

[0613] Size exclusion chromatography analyses were performed on fusion proteins containing various therapeutic proteins and unstructured recombinant proteins of increasing length. An exemplary assay used a TSKGel-G4000 SWXL (7.8 mm×30 cm) column in which 40 μg of purified glucagon fusion protein at a concentration of 1 mg/ml was separated at a flow rate of 0.6 ml/min in 20 mM phosphate pH 6.8, 114 mM NaCl. Chromatogram profiles were monitored using OD214 nm and OD280 nm. Column calibration for all assays were performed using a size exclusion calibration standard from BioRad; the markers include thyroglobulin (670 kDa), bovine gamma-globulin (158 kDa), chicken ovalbumin (44 kDa), equine myoglobuin (17 kDa) and vitamin B12 (1.35 kDa). Representative chromatographic profiles of Glucagon-Y288, Glucagon-Y144, Glucagon-Y72, Glucagon-Y36 are shown as an overlay in FIG. 21. The data show that the apparent molecular weight of each compound is proportional to the length of the attached XTEN sequence. However, the data also show that the apparent molecular weight of each construct is significantly larger than that expected for a globular protein (as shown by comparison to the standard proteins run in the same assay). Based on the SEC analyses for all constructs evaluated, including a CFXTEN composition, the apparent molecular weights, the apparent molecular weight factor (expressed as the ratio of apparent molecular weight to the calculated molecular weight) and the hydrodynamic radius (RH in nm) are shown in Table 35. The results indicate that incorporation of different XTENs of 576 amino acids or greater confers an apparent molecular weight for the fusion protein of approximately 339 kDa to 760, and that XTEN of 864 amino acids or greater confers an apparent molecular weight greater than approximately 800 kDA. The results of proportional increases in apparent molecular weight to actual molecular weight were consistent for fusion proteins created with XTEN from several different motif families; i.e., AD, AE, AF, AG, and AM, with increases of at least four-fold and ratios as high as about 17-fold. Additionally, the incorporation of XTEN fusion partners with 576 amino acids or more into fusion proteins with the various payloads (and 288 residues in the case of glucagon fused to Y288) resulted with a hydrodynamic radius of 7 nm or greater, well beyond the glomerular pore size of approximately 3-5 nm. Accordingly, it is expected that fusion proteins comprising growth and XTEN have reduced renal clearance, contributing to increased terminal half-life and improving the therapeutic or biologic effect relative to a corresponding un-fused biologic payload protein.

TABLE 35
SEC analysis of various polypeptides

| | | | | | Apparent | |
|---|---|---|---|---|---|---|
| | XTEN or | | | Apparent | Molecular | |
| Construct | fusion | Therapeutic | Actual MW | MW | Weight | |
| Name | partner | Protein | (kDa) | (kDa) | Factor | R_{H} (nm) |
| AC14 | Y288 | Glucagon | 28.7 | 370 | 12.9 | 7.0 |
| AC28 | Y144 | Glucagon | 16.1 | 117 | 7.3 | 5.0 |
| AC34 | Y72 | Glucagon | 9.9 | 58.6 | 5.9 | 3.8 |
| AC33 | Y36 | Glucagon | 6.8 | 29.4 | 4.3 | 2.6 |
| AC89 | AF120 | Glucagon | 14.1 | 76.4 | 5.4 | 4.3 |
| AC88 | AF108 | Glucagon | 13.1 | 61.2 | 4.7 | 3.9 |
| AC73 | AF144 | Glucagon | 16.3 | 95.2 | 5.8 | 4.7 |
| AC53 | AG576 | GFP | 74.9 | 339 | 4.5 | 7.0 |
| AC39 | AD576 | GFP | 76.4 | 546 | 7.1 | 7.7 |
| AC41 | AE576 | GFP | 80.4 | 760 | 9.5 | 8.3 |
| AC52 | AF576 | GFP | 78.3 | 526 | 6.7 | 7.6 |
| AC398 | AE288 | FVII | 76.3 | 650 | 8.5 | 8.2 |
| AC404 | AE864 | FVII | 129 | 1900 | 14.7 | 10.1 |
| AC85 | AE864 | Exendin-4 | 83.6 | 938 | 11.2 | 8.9 |
| AC114 | AM875 | Exendin-4 | 82.4 | 1344 | 16.3 | 9.4 |
| AC143 | AM875 | hGH | 100.6 | 846 | 8.4 | 8.7 |
| AC227 | AM875 | IL-1ra | 95.4 | 1103 | 11.6 | 9.2 |
| AC228 | AM1318 | IL-1ra | 134.8 | 2286 | 17.0 | 10.5 |

### Example 41: Pharmacokinetics of Extended Polypeptides Fused to GFP in Cynomolgus Monkeys

[0614] The pharmacokinetics of GFP-L288, GFP-L576, GFP-XTEN_AF576, GFP-XTEN_Y576 and XTEN_AD836-GFP were tested in cynomolgus monkeys to determine the effect of composition and length of the unstructured polypeptides on PK parameters. Blood samples were analyzed at various times after injection and the concentration of GFP in plasma was measured by ELISA using a polyclonal antibody against GFP for capture and a biotinylated preparation of the same polyclonal antibody for detection. Results are summarized in FIG. 19. They show a surprising increase of half-life with increasing length of the XTEN sequence. For example, a half-life of 10 h was determined for GFP-XTEN_L288 (with 288 amino acid residues in the XTEN). Doubling the length of the unstructured polypeptide fusion partner to 576 amino acids increased the half-life to 20-22 h for multiple fusion protein constructs; i.e., GFP-XTEN_L576, GFP-XTEN_AF576, GFP-XTEN_Y576. A further increase of the unstructured polypeptide fusion partner length to 836 residues resulted in a half-life of 72-75 h for XTEN_AD836-GFP. Thus, increasing the polymer length by 288 residues from 288 to 576 residues increased in vivo half-life by about 10 h. However, increasing the polypeptide length by 260 residues from 576 residues to 836 residues increased half-life by more than 50 h. These results show that there is a surprising threshold of unstructured polypeptide length that results in a greater than proportional gain in in vivo half-life. Thus, fusion proteins comprising extended, unstructured polypeptides are expected to have the property of enhanced pharmacokinetics compared to polypeptides of shorter lengths.

### Example 42: Serum Stability of XTEN

[0615] A fusion protein containing XTEN_AE864 fused to the N-terminus of GFP was incubated in monkey plasma and rat kidney lysate for up to 7 days at 37° C. Samples were withdrawn at time 0, Day 1 and Day 7 and analyzed by SDS PAGE followed by detection using Western analysis and detection with antibodies against GFP as shown in FIG. 20. The sequence of XTEN_AE864 showed negligible signs of degradation over 7 days in plasma. However, XTEN_AE864 was rapidly degraded in rat kidney lysate over 3 days. The in vivo stability of the fusion protein was tested in plasma samples wherein the GFP_AE864 was immunoprecipitated and analyzed by SDS PAGE as described above. Samples that were withdrawn up to 7 days after injection showed very few signs of degradation. The results demonstrate the resistance of CFXTEN to degradation due to serum proteases; a factor in the enhancement of pharmacokinetic properties of the CFXTEN fusion proteins.

### Example 43: Increasing Solubility and Stability of a Peptide Payload by Linking to XTEN

[0616] In order to evaluate the ability of XTEN to enhance the physicochemical properties of solubility and stability, fusion proteins of glucagon plus shorter-length XTEN were prepared and evaluated. The test articles were prepared in Tris-buffered saline at neutral pH and characterization of the Gcg-XTEN solution was by reverse-phase HPLC and size exclusion chromatography to affirm that the protein was homogeneous and non-aggregated in solution. The data are presented in Table 36. For comparative purposes, the solubility limit of unmodified glucagon in the same buffer was measured at 60 μM (0.2 mg/mL), and the result demonstrate that for all lengths of XTEN added, a substantial increase in solubility was attained. Importantly, in most cases the glucagon-XTEN fusion proteins were prepared to achieve target concentrations and were not evaluated to determine the maximum solubility limits for the given construct. However, in the case of glucagon linked to the AF-144 XTEN, the limit of solubility was determined, with the result that a 60-fold increase in solubility was achieved, compared to glucagon not linked to XTEN. In addition, the glucagon-AF144 CFXTEN was evaluated for stability, and was found to be stable in liquid formulation for at least 6 months under refrigerated conditions and for approximately one month at 37° C. (data not shown).

[0617] The data support the conclusion that the linking of short-length XTEN polypeptides to a biologically active protein such as glucagon can markedly enhance the solubility properties of the protein by the resulting fusion protein, as well as confer stability at the higher protein concentrations.

TABLE 36
Solubility of Glucagon-XTEN constructs

| Test Article | Solubility |
|---|---|
| Glucagon | 60 μM |
| Glucagon-Y36 | >370 μM |
| Glucagon-Y72 | >293 μM |
| Glucagon-AF108 | >145 μM |
| Glucagon-AF120 | >160 μM |
| Glucagon-Y144 | >497 μM |
| Glucagon-AE144 | >467 μM |
| Glucagon-AF144 | >3600 μM |
| Glucagon-Y288 | >163 μM |

### Example 44: Analysis of Sequences for Secondary Structure by Prediction Algorithms

[0618] Amino acid sequences can be assessed for secondary structure via certain computer programs or algorithms, such as the well-known Chou-Fasman algorithm (Chou, P. Y., et al. (1974) Biochemistry, 13: 222-45) and the Garnier-Osguthorpe-Robson, or “GOR” method (Gamier J, Gibrat J F, Robson B. (1996). GOR method for predicting protein secondary structure from amino acid sequence. Methods Enzymol 266:540-553). For a given sequence, the algorithms can predict whether there exists some or no secondary structure at all, expressed as total and/or percentage of residues of the sequence that form, for example, alpha-helices or beta-sheets or the percentage of residues of the sequence predicted to result in random coil formation.

[0619] Several representative sequences from XTEN “families” have been assessed using two algorithm tools for the Chou-Fasman and GOR methods to assess the degree of secondary structure in these sequences. The Chou-Fasman tool was provided by William R Pearson and the University of Virginia, at the “Biosupport” internet site, URL located on the World Wide Web at fasta.bioch.virginia.edu/fasta_www2/fasta_www.cgi?rm=misc1 as it existed on Jun. 19, 2009. The GOR tool was provided by Pole Informatique Lyonnais at the Network Protein Sequence Analysis internet site, URL located on the World Wide Web at .npsa-pbilibcp.fr/cgi-bin/secpred_gor4.p1 as it existed on Jun. 19, 2008.

[0620] As a first step in the analyses, a single XTEN sequence was analyzed by the two algorithms. The AE864 composition is an XTEN with 864 amino acid residues created from multiple copies of four 12 amino acid sequence motifs consisting of the amino acids G, S, T, E, P, and A. The sequence motifs are characterized by the fact that there is limited repetitiveness within the motifs and within the overall sequence in that the sequence of any two consecutive amino acids is not repeated more than twice in any one 12 amino acid motif, and that no three contiguous amino acids of full-length the XTEN are identical. Successively longer portions of the AF 864 sequence from the N-terminus were analyzed by the Chou-Fasman and GOR algorithms (the latter requires a minimum length of 17 amino acids). The sequences were analyzed by entering the FASTA format sequences into the prediction tools and running the analysis. The results from the analyses are presented in Table 37.

[0621] The results indicate that, by the Chou-Fasman calculations, short XTEN of the AE and AG families, up to at least 288 amino acid residues, have no alpha-helices or beta-sheets, but amounts of predicted percentage of random coil by the GOR algorithm vary from 78-99%. With increasing XTEN lengths of 504 residues to greater than 1300, the XTEN analyzed by the Chou-Fasman algorithm had predicted percentages of alpha-helices or beta-sheets of 0 to about 2%, while the calculated percentages of random coil increased to from 94-99%. Those XTEN with alpha-helices or beta-sheets were those sequences with one or more instances of three contiguous serine residues, which resulted in predicted beta-sheet formation. However, even these sequences still had approximately 99% random coil formation.

[0622] The data provided herein suggests that 1) XTEN created from multiple sequence motifs of G, S, T, E, P, and A that have limited repetitiveness as to contiguous amino acids are predicted to have very low amounts of alpha-helices and beta-sheets; 2) that increasing the length of the XTEN does not appreciably increase the probability of alpha-helix or beta-sheet formation; and 3) that progressively increasing the length of the XTEN sequence by addition of non-repetitive 12-mers consisting of the amino acids G, S, T, E, P, and A results in increased percentage of random coil formation. Results further indicate that XTEN sequences defined herein (including e.g., XTEN created from sequence motifs of G, S, T, E, P, and A) have limited repetitiveness (including those with no more than two identical contiguous amino acids in any one motif) are expected to have very limited secondary structure. Any order or combination of sequence motifs from Table 3 can be used to create an XTEN polypeptide that will result in an XTEN sequence that is substantially devoid of secondary structure, though three contiguous serines are not preferred. The unfavorable property of three contiguous series however, can be ameliorated by increasing the length of the XTEN. Such sequences are expected to have the characteristics described in the CFXTEN embodiments of the invention disclosed herein.

TABLE 37
CHOU-FASMAN and GOR prediction calculations of polypeptide sequences

| | | | Chou-Fasman | GOR |
|---|---|---|---|---|
| SEQ NAME | SEQ ID NO: | No. Residues | Calculation | Calculation |
| AE36: | 1489 | 36 | Residue totals: H: 0 E: 0 | 94.44% |
| LCW0402_002 | | | percent: H: 0.0 E: 0.0 | |
| AE36: | 1490 | 36 | Residue totals: H: 0 E: 0 | 94.44% |
| LCW0402_003 | | | percent: H: 0.0 E: 0.0 | |
| AG36: | 1491 | 36 | Residue totals: H: 0 E: 0 | 77.78% |
| LCW0404_001 | | | percent: H: 0.0 E: 0.0 | |
| AG36: | 1492 | 36 | Residue totals: H: 0 E: 0 | 83.33% |
| LCW0404_003 | | | percent: H: 0.0 E: 0.0 | |
| AE42_1 | 1493 | 42 | Residue totals: H: 0 E: 0 | 90.48% |
| | | | percent: H: 0.0 E: 0.0 | |
| AE42_1 | 1494 | 42 | Residue totals: H: 0 E: 0 | 90.48% |
| | | | percent: H: 0.0 E: 0.0 | |
| AG42_1 | 1495 | 42 | Residue totals: H: 0 E: 0 | 88.10% |
| | | | percent: H: 0.0 E: 0.0 | |
| AG42_2 | 1496 | 42 | Residue totals: H: 0 E: 0 | 88.10% |
| | | | percent: H: 0.0 E: 0.0 | |
| AE144 | 1497 | 144 | Residue totals: H: 0 E: 0 | 98.61% |
| | | | percent: H: 0.0 E: 0.0 | |
| AG144_1 | 1498 | 144 | Residue totals: H: 0 E: 0 | 91.67% |
| | | | percent: H: 0.0 E: 0.0 | |
| AE288 | 1499 | 288 | Residue totals: H: 0 E: 0 | 99.31% |
| | | | percent: H: 0.0 E: 0.0 | |
| AG288_2 | 1500 | 288 | Residue totals: H: 0 E: 0 | 92.71 |
| | | | percent: H: 0.0 E: 0.0 | |
| AF504 | 1501 | 504 | Residue totals: H: 0 E: 0 | 94.44% |
| | | | percent: H: 0.0 E: 0.0 | |
| AD 576 | 1502 | 576 | Residue totals: H: 7 E: 0 | 99.65% |
| | | | percent: H: 1.2 E: 0.0 | |
| AE576 | 1503 | 576 | Residue totals: H: 2 E: 0 | 99.65% |
| | | | percent: H: 0.4 E: 0.0 | |
| AG576 | 1504 | 576 | Residue totals: H: 0 E: 3 | 99.31% |
| | | | percent: H: 0.4 E: 0.5 | |
| AF540 | 1505 | 540 | Residue totals: H: 2 E: 0 | 99.65 |
| | | | percent: H: 0.4 E: 0.0 | |
| AD836 | 1506 | 836 | Residue totals: H: 0 E: 0 | 98.44% |
| | | | percent: H: 0.0 E: 0.0 | |
| AE864 | 1507 | 864 | Residue totals: H: 2 E: 3 | 99.77% |
| | | | percent: H: 0.2 E: 0.4 | |
| AF864 | 1508 | 875 | Residue totals: H: 2 E: 0 | 95.20% |
| | | | percent: H: 0.2 E: 0.0 | |
| AG864 | 1509 | 864 | Residue totals: H: 0 E: 0 | 94.91% |
| | | | percent: H: 0.0 E: 0.0 | |
| AM875 | 1510 | 875 | Residue totals: H: 7 E: 3 | 98.63% |
| | | | percent: H: 0.8 E: 0.3 | |
| AM1318 | 1511 | 1318 | Residue totals: H: 7 E: 0 | 99.17% |
| | | | percent: H: 0.7 E: 0.0 | |
| AM923 | 1512 | 924 | Residue totals: H: 4 E: 3 | 98.70% |
| | | | percent: H: 0.4 E: 0.3 | |
| AE912 | 1513 | 913 | Residue totals: H: 8 E: 3 | 99.45% |
| | | | percent: H: 0.9 E: 0.3 | |
| BC 864 | 1514 | | Residue totals: H: 0 E: 0 | 99.77% |
| | | | percent: H: 0 E: 0 | |

H: alpha-helix
E: beta-sheet

### Example 45: Analysis of Polypeptide Sequences for Repetitiveness

[0623] In this Example, different polypeptides, including several XTEN sequences, were assessed for repetitiveness in the amino acid sequence. Polypeptide amino acid sequences can be assessed for repetitiveness by quantifying the number of times a shorter subsequence appears within the overall polypeptide. For example, a polypeptide of 200 amino acid residues length has a total of 165 overlapping 36-amino acid “blocks” (or “36-mers”) and 198 3-mer “subsequences”, but the number of unique 3-mer subsequences will depend on the amount of repetitiveness within the sequence. For the analyses, different polypeptide sequences were assessed for repetitiveness by determining the subsequence score obtained by application of the following equation:

$$Subsequence score \frac{{\sum }_{i = 1}^{m} {Count}_{i}}{m} \qquad I$$

[0624] wherein: m=(amino acid length of polypeptide)−(amino acid length of subsequence)+1; and Countᵢ=cumulative number of occurrences of each unique subsequence within sequenceᵢ
   In the analyses of the present Example, the subsequence score for the polypeptides of Table 38 were determined using the foregoing equation in a computer program using the algorithm depicted in FIG. 27, wherein the subsequence length was set at 3 amino acids. The resulting subsequence score is a reflection of the degree of repetitiveness within the polypeptide.

[0625] The results, shown in Table 38, indicate that the unstructured polypeptides consisting of 2 or 3 amino acid types have high subsequence scores, while those of consisting of the 12 amino acid motifs of the six amino acids G, S, T, E, P, and A with a low degree of internal repetitiveness, have subsequence scores of less than 10, and in some cases, less than 5. For example, the L288 sequence has two amino acid types and has short, highly repetitive sequences, resulting in a subsequence score of 50.0. The polypeptide J288 has three amino acid types but also has short, repetitive sequences, resulting in a subsequence score of 33.3. Y576 also has three amino acid types, but is not made of internal repeats, reflected in the subsequence score of 15.7 over the first 200 amino acids. W576 consists of four types of amino acids, but has a higher degree of internal repetitiveness, e.g., “GGSG” (SEQ ID NO: 1694),”, resulting in a subsequence score of 23.4. The AD576 consists of four types of 12 amino acid motifs, each consisting of four types of amino acids. Because of the low degree of internal repetitiveness of the individual motifs, the overall subsequence score over the first 200 amino acids is 13.6. In contrast, XTEN's consisting of four motifs contains six types of amino acids, each with a low degree of internal repetitiveness have lower subsequence scores; i.e., AE864 (6.1), AF864 (7.5), and AM875 (4.5), while XTEN consisting of four motifs containing five types of amino acids were intermediate; i.e., AE864, with a score of 7.2.

[0626] Conclusions: The results indicate that the combination of 12 amino acid subsequence motifs, each consisting of four to six amino acid types that are non-repetitive, into a longer XTEN polypeptide results in an overall sequence that is substantially non-repetitive, as indicated by overall subsequence scores less than 10 and, in many cases, less than 5. This is despite the fact that each subsequence motif may be used multiple times across the sequence. In contrast, polymers created from smaller numbers of amino acid types resulted in higher subsequence scores, with polypeptides consisting of two amino acid type having higher scores that those consisting of three amino acid types.

TABLE 38
Subsequence score calculations of polypeptide sequences

| Seq Name | SEQ ID NO: | Score |
|---|---|---|
| J288 | 1515 | 33.3 |
| K288 | 1516 | 46.9 |
| L288 | 1517 | 50.0 |
| Y288 | 1518 | 26.8 |
| Q576 | 1519 | 18.5 |
| U576 | 1520 | 18.1 |
| W576 | 1521 | 23.4 |
| Y576 | 1522 | 15.7 |
| AE288 | 1523 | 6.0 |
| AG288_1 | 1524 | 6.9 |
| AD576 | 1525 | 13.6 |
| AE576 | 1526 | 6.1 |
| AF540 | 1527 | 8.8 |
| AF504 | 1528 | 7.0 |
| AE864 | 1529 | 6.1 |
| AF864 | 1530 | 7.5 |
| AG864 | 1531 | 7.2 |
| AG868 | 1532 | 7.5 |
| AM875 | 1533 | 4.5 |
| AE912 | 1534 | 4.5 |
| AM923 | 1535 | 4.5 |
| AM1296 | 1536 | 4.5 |

### Example 46: Calculation of TEPITOPE Scores

[0627] TEPITOPE scores of 9mer peptide sequence can be calculated by adding pocket potentials as described by Sturniolo [Sturniolo, T., et al. (1999) Nat Biotechnol, 17: 555]. In the present Example, separate Tepitope scores were calculated for individual HLA alleles. Table 39 shows as an example the pocket potentials for HLA0101B, which occurs in high frequency in the Caucasian population. To calculate the TEPITOPE score of a peptide with sequence P1-P2-P3-P4-P5-P6-P7-P8-P9, the corresponding individual pocket potentials in Table 39 were added. The HLA0101B score of a 9mer peptide with the sequence FDKLPRTSG (SEQ ID NO: 1695) is the sum of 0, −1.3, 0, 0.9, 0, −1.8, 0.09, 0, 0.

[0628] To evaluate the TEPITOPE scores for long peptides one can repeat the process for all 9mer subsequences of the sequences. This process can be repeated for the proteins encoded by other HLA alleles. Tables 40-43 give pocket potentials for the protein products of HLA alleles that occur with high frequency in the Caucasian population.

[0629] TEPITOPE scores calculated by this method range from approximately −10 to +10. However, 9mer peptides that lack a hydrophobic amino acid (FKLMVWY (SEQ ID NO: 1696)) in P1 position have calculated TEPITOPE scores in the range of −1009 to −989. This value is biologically meaningless and reflects the fact that a hydrophobic amino acid serves as an anchor residue for HLA binding and peptides lacking a hydrophobic residue in P1 are considered non binders to HLA. Because most XTEN sequences lack hydrophobic residues, all combinations of 9mer subsequences will have TEPITOPEs in the range in the range of −1009 to −989. This method confirms that XTEN polypeptides may have few or no predicted T-cell epitopes.

TABLE 39
Pocket potential for HLA0101B allele.

| Amino | | | | | | | | | |
|---|---|---|---|---|---|---|---|---|---|
| Acid | P1 | P2 | P3 | P4 | P5 | P6 | P7 | P8 | P9 |
| A | −999 | 0 | 0 | 0 | — | 0 | 0 | — | 0 |
| C | −999 | 0 | 0 | 0 | — | 0 | 0 | — | 0 |
| D | −999 | −1.3 | −1.3 | −2.4 | — | −2.7 | −2 | — | −1.9 |
| E | −999 | 0.1 | −1.2 | −0.4 | — | −2.4 | −0.6 | — | −1.9 |
| F | 0 | 0.8 | 0.8 | 0.08 | — | −2.1 | 0.3 | — | −0.4 |
| G | −999 | 0.5 | 0.2 | −0.7 | — | −0.3 | −1.1 | — | −0.8 |
| H | −999 | 0.8 | 0.2 | −0.7 | — | −2.2 | 0.1 | — | −1.1 |
| I | −1 | 1.1 | 1.5 | 0.5 | — | −1.9 | 0.6 | — | 0.7 |
| K | −999 | 1.1 | 0 | −2.1 | — | −2 | −0.2 | — | −1.7 |
| L | −1 | 1 | 1 | 0.9 | — | −2 | 0.3 | — | 0.5 |
| M | −1 | 1.1 | 1.4 | 0.8 | — | −1.8 | 0.09 | — | 0.08 |
| N | −999 | 0.8 | 0.5 | 0.04 | — | −1.1 | 0.1 | — | −1.2 |
| P | −999 | −0.5 | 0.3 | −1.9 | — | −0.2 | 0.07 | — | −1.1 |
| Q | −999 | 1.2 | 0 | 0.1 | — | −1.8 | 0.2 | — | −1.6 |
| R | −999 | 2.2 | 0.7 | −2.1 | — | −1.8 | 0.09 | — | −1 |
| S | −999 | −0.3 | 0.2 | −0.7 | — | −0.6 | −0.2 | — | −0.3 |
| T | −999 | 0 | 0 | −1 | — | −1.2 | 0.09 | — | −0.2 |
| V | −1 | 2.1 | 0.5 | −0.1 | — | −1.1 | 0.7 | — | 0.3 |
| W | 0 | −0.1 | 0 | −1.8 | — | −2.4 | −0.1 | — | −1.4 |
| Y | 0 | 0.9 | 0.8 | −1.1 | — | −2 | 0.5 | — | −0.9 |

TABLE 40
Pocket potential for HLA0301B allele.

| Amino | | | | | | | | | |
|---|---|---|---|---|---|---|---|---|---|
| acid | P1 | P2 | P3 | P4 | P5 | P6 | P7 | P8 | P9 |
| A | −999 | 0 | 0 | 0 | — | 0 | 0 | — | 0 |
| C | −999 | 0 | 0 | 0 | — | 0 | 0 | — | 0 |
| D | −999 | −1.3 | −1.3 | 2.3 | — | −2.4 | −0.6 | — | −0.6 |
| E | −999 | 0.1 | −1.2 | −1 | — | −1.4 | −0.2 | — | −0.3 |
| F | −1 | 0.8 | 0.8 | −1 | — | −1.4 | 0.5 | — | 0.9 |
| G | −999 | 0.5 | 0.2 | 0.5 | — | −0.7 | 0.1 | — | 0.4 |
| H | −999 | 0.8 | 0.2 | 0 | — | −0.1 | −0.8 | — | −0.5 |
| I | 0 | 1.1 | 1.5 | 0.5 | — | 0.7 | 0.4 | — | 0.6 |
| K | −999 | 1.1 | 0 | −1 | — | 1.3 | −0.9 | — | −0.2 |
| L | 0 | 1 | 1 | 0 | — | 0.2 | 0.2 | — | −0 |
| M | 0 | 1.1 | 1.4 | 0 | — | −0.9 | 1.1 | — | 1.1 |
| N | −999 | 0.8 | 0.5 | 0.2 | — | −0.6 | −0.1 | — | −0.6 |
| P | −999 | −0.5 | 0.3 | −1 | — | 0.5 | 0.7 | — | −0.3 |
| Q | −999 | 1.2 | 0 | 0 | — | −0.3 | −0.1 | — | −0.2 |
| R | −999 | 2.2 | 0.7 | −1 | — | 1 | −0.9 | — | 0.5 |
| S | −999 | −0.3 | 0.2 | 0.7 | — | −0.1 | 0.07 | — | 1.1 |
| T | −999 | 0 | 0 | −1 | — | 0.8 | −0.1 | — | −0.5 |
| V | 0 | 2.1 | 0.5 | 0 | — | 1.2 | 0.2 | — | 0.3 |
| W | −1 | −0.1 | 0 | −1 | — | −1.4 | −0.6 | — | −1 |
| Y | −1 | 0.9 | 0.8 | −1 | — | −1.4 | −0.1 | — | 0.3 |

TABLE 41
Pocket potential for HLA0401B allele.

| Amino | | | | | | | | | |
|---|---|---|---|---|---|---|---|---|---|
| acid | P1 | P2 | P3 | P4 | P5 | P6 | P7 | P8 | P9 |
| A | −999 | 0 | 0 | 0 | — | 0 | 0 | — | 0 |
| C | −999 | 0 | 0 | 0 | — | 0 | 0 | — | 0 |
| D | −999 | −1.3 | −1.3 | 1.4 | — | −1.1 | −0.3 | — | −1.7 |
| E | −999 | 0.1 | −1.2 | 1.5 | — | −2.4 | 0.2 | — | −1.7 |
| F | 0 | 0.8 | 0.8 | −0.9 | — | −1.1 | −1 | — | −1 |
| G | −999 | 0.5 | 0.2 | −1.6 | — | −1.5 | −1.3 | — | −1 |
| H | −999 | 0.8 | 0.2 | 1.1 | — | −1.4 | 0 | — | 0.08 |
| I | −1 | 1.1 | 1.5 | 0.8 | — | −0.1 | 0.08 | — | −0.3 |
| K | −999 | 1.1 | 0 | −1.7 | — | −2.4 | −0.3 | — | −0.3 |
| L | −1 | 1 | 1 | 0.8 | — | −1.1 | 0.7 | — | −1 |
| M | −1 | 1.1 | 1.4 | 0.9 | — | −1.1 | 0.8 | — | −0.4 |
| N | −999 | 0.8 | 0.5 | 0.9 | — | 1.3 | 0.6 | — | −1.4 |
| P | −999 | −0.5 | 0.3 | −1.6 | — | 0 | −0.7 | — | −1.3 |
| Q | −999 | 1.2 | 0 | 0.8 | — | −1.5 | 0 | — | 0.5 |
| R | −999 | 2.2 | 0.7 | −1.9 | — | −2.4 | −1.2 | — | −1 |
| S | −999 | −0.3 | 0.2 | 0.8 | — | 1 | −0.2 | — | 0.7 |
| T | −999 | 0 | 0 | 0.7 | — | 1.9 | −0.1 | — | −1.2 |
| V | −1 | 2.1 | 0.5 | −0.9 | — | 0.9 | 0.08 | — | −0.7 |
| W | 0 | −0.1 | 0 | −1.2 | — | −1 | −1.4 | — | −1 |
| Y | 0 | 0.9 | 0.8 | −1.6 | — | −1.5 | −1.2 | — | −1 |

TABLE 42
Pocket potential for HLA0701B allele.

| Amino | | | | | | | | | |
|---|---|---|---|---|---|---|---|---|---|
| acid | P1 | P2 | P3 | P4 | P5 | P6 | P7 | P8 | P9 |
| A | −999 | 0 | 0 | 0 | — | 0 | 0 | — | 0 |
| C | −999 | 0 | 0 | 0 | — | 0 | 0 | — | 0 |
| D | −999 | −1.3 | −1.3 | −1.6 | — | −2.5 | −1.3 | — | −1.2 |
| E | −999 | 0.1 | −1.2 | −1.4 | — | −2.5 | 0.9 | — | −0.3 |
| F | 0 | 0.8 | 0.8 | 0.2 | — | −0.8 | 2.1 | — | 2.1 |
| G | −999 | 0.5 | 0.2 | −1.1 | — | −0.6 | 0 | — | −0.6 |
| H | −999 | 0.8 | 0.2 | 0.1 | — | −0.8 | 0.9 | — | −0.2 |
| I | −1 | 1.1 | 1.5 | 1.1 | — | −0.5 | 2.4 | — | 3.4 |
| K | −999 | 1.1 | 0 | −1.3 | — | −1.1 | 0.5 | — | −1.1 |
| L | −1 | 1 | 1 | −0.8 | — | −0.9 | 2.2 | — | 3.4 |
| M | −1 | 1.1 | 1.4 | −0.4 | — | −0.8 | 1.8 | — | 2 |
| N | −999 | 0.8 | 0.5 | −1.1 | — | −0.6 | 1.4 | — | −0.5 |
| P | −999 | −0.5 | 0.3 | −1.2 | — | −0.5 | −0.2 | — | −0.6 |
| Q | −999 | 1.2 | 0 | −1.5 | — | −1.1 | 1.1 | — | −0.9 |
| R | −999 | 2.2 | 0.7 | −1.1 | — | −1.1 | 0.7 | — | −0.8 |
| S | −999 | −0.3 | 0.2 | 1.5 | — | 0.6 | 0.4 | — | −0.3 |
| T | −999 | 0 | 0 | 1.4 | — | −0.1 | 0.9 | — | 0.4 |
| V | −1 | 2.1 | 0.5 | 0.9 | — | 0.1 | 1.6 | — | 2 |
| W | 0 | −0.1 | 0 | −1.1 | — | −0.9 | 1.4 | — | 0.8 |
| Y | 0 | 0.9 | 0.8 | −0.9 | — | −1 | 1.7 | — | 1.1 |

TABLE 43
Pocket potential for HLA1501B allele.

| Amino | | | | | | | | | |
|---|---|---|---|---|---|---|---|---|---|
| acid | P1 | P2 | P3 | P4 | P5 | P6 | P7 | P8 | P9 |
| A | −999 | 0 | 0 | 0 | — | 0 | 0 | — | 0 |
| C | −999 | 0 | 0 | 0 | — | 0 | 0 | — | 0 |
| D | −999 | −1.3 | −1.3 | −0.4 | — | −0.4 | −0.7 | — | −1.9 |
| E | −999 | 0.1 | −1.2 | −0.6 | — | −1 | −0.7 | — | −1.9 |
| F | −1 | 0.8 | 0.8 | 2.4 | — | −0.3 | 1.4 | — | −0.4 |
| G | −999 | 0.5 | 0.2 | 0 | — | 0.5 | 0 | — | −0.8 |
| H | −999 | 0.8 | 0.2 | 1.1 | — | −0.5 | 0.6 | — | −1.1 |
| I | 0 | 1.1 | 1.5 | 0.6 | — | 0.05 | 1.5 | — | 0.7 |
| K | −999 | 1.1 | 0 | −0.7 | — | −0.3 | −0.3 | — | −1.7 |
| L | 0 | 1 | 1 | 0.5 | — | 0.2 | 1.9 | — | 0.5 |
| M | 0 | 1.1 | 1.4 | 1 | — | 0.1 | 1.7 | — | 0.08 |
| N | −999 | 0.8 | 0.5 | −0.2 | — | 0.7 | 0.7 | — | −1.2 |
| P | −999 | −0.5 | 0.3 | −0.3 | — | −0.2 | 0.3 | — | −1.1 |
| Q | −999 | 1.2 | 0 | −0.8 | — | −0.8 | −0.3 | — | −1.6 |
| R | −999 | 2.2 | 0.7 | 0.2 | — | 1 | −0.5 | — | −1 |
| S | −999 | −0.3 | 0.2 | −0.3 | — | 0.6 | 0.3 | — | −0.3 |
| T | −999 | 0 | 0 | −0.3 | — | −0 | 0.2 | — | −0.2 |
| V | 0 | 2.1 | 0.5 | 0.2 | — | −0.3 | 0.3 | — | 0.3 |
| W | −1 | −0.1 | 0 | 0.4 | — | −0.4 | 0.6 | — | −1.4 |
| Y | −1 | 0.9 | 0.8 | 2.5 | — | 0.4 | 0.7 | — | −0.9 |

### Example 46: Assessment of Insertion of XTEN into Permissive Loops

[0630] XTEN AE42-4 Insertion

[0631] The construction and expression of FVIII with XTEN AE42 insertions were described in Example 17 and 24. Thus, where residue X designates the site of insertion and residue Z designates the next residue in the native FVIII polypeptide sequence, the polypeptide resulting from insertion of XTEN AE42 would contain the sequence:

(SEQ ID NO: 1697)
X-GAPGSPAGSPTSTEEGTSESATPESGPGSEPATSGSETPASS-Z

[0632] 16 different sites in the FVIII sequence were selected for XTEN AE42 insertion, and these were designed Batch 1. An additional 21 sites selected for XTEN AE42 insertion were designed Batch 2. Collectively, the Batch 1 and Batch 2 sites represent 12 sites in the A1 domain, 7 sites in the A2 domain, 10 sites in the A3 domain, 4 sites in the C1 domain, and 3 sites in the C2 domain. Locations of Batch 1 and 2 sites in the 3-D structure of FVIII are depicted in FIG. 32.

[0633] The location of these Batch 1 and Batch 2 insertion sites results in 37 constructs designated pSD0001-pSD0004, pSD0009-pSD0012, pSD0023-pSD0032, pSD0034-pSD0063 [the foregoing ranges include all intermediate numbers, as well], the sequences of which are set forth in Table 21 and the insertions sites of which are set forth in Table 23.

[0634] In Vitro Assays

[0635] To assess FVIII tolerability to XTEN AE42-4 insertion, the FVIII activity in culture media samples from FVIII-XTEN cell cultures was analyzed using a FVIII chromogenic assay. Antigen expression levels were analyzed by FVIII-HC (FVIII heavy chain) and FVIII-LC (FVIII light chain) ELISA.

[0636] FVIII Activity Measurement by Chromogenic Assay

[0637] The FVIII activity was measured using the COATEST® SP FVIII kit from DiaPharma (lot #N089019) and all incubations were performed on a 37° C. plate heater with shaking. Cell culture harvests from transient transfection media of FVIII-XTEN AE42-4 variants from 6 well plates were diluted to the desired FVIII activity range using 1×FVIII COATEST® buffer. FVIII standards were prepared in 1×FVIII COATEST® buffer containing mock transfection media with matching culture media concentration as the testing sample. The range of recombinant Factor VIII (rFVIII) standard was from 100 mIU/mL to 0.78 mIU/mL. The standards, diluted cell culture samples, and a pooled normal human plasma assay control were added to Immulon® 2HB 96-well plates in duplicates (25 μL/well).

[0638] Freshly prepared IXa/FX/Phospholipid mix (50 μL), 25 μL, of 25 mM CaCl2, and 50 μL, of FXa substrate were added sequentially into each well, with 5 minutes incubation between each addition. After incubating with the substrate, 25 μL, of 20% acetic acid was added to terminate the color reaction, and the absorbance at 405 nm was measured with a SpectraMAX® plus (Molecular Devices) instrument.

[0639] Data analysis was performed using SoftMax Pro software (version 5.2). The Lowest Level of Quantification (LLOQ) was 39 mIU/mL. Results are presented in Table 22.

[0640] Expression Measurement by FVIII-HC and FVIII-LC ELISA

[0641] Expression of variants was quantified using ELISA. The FVIII antigen expression levels of DNA constructs corresponding to XTEN insertions in the A1 and A2 domains of FVIII were analyzed by FVIII-LC ELISA. The FVIII antigen expression levels of DNA constructs corresponding to XTEN insertions in the A3, C1 and C2 domains of FVIII were analyzed by FVIII-HC ELISA. Results are presented in Table 22.

[0642] FVIII-XTEN antigens in cell culture media after harvest were captured by GMA011 antibodies (Green Mountain Antibodies) for FVIII-LC ELISA) or by GMA016 antibodies (Green Mountain Antibodies) for FVIII-HC ELISA. Immulon® 2HB 96-well plates were coated with 100 μl/well of anti-FVIII antibody (2 μg/ml) by overnight incubation at 4° C. Plates were then washed four times with Phosphate Buffer saline with Tween-20 (PBST) and blocked with blocking buffer (PBST with 10% heat inactivated horse serum) for 1 hour at room temperature.

[0643] Cell culture harvests from transient transfection media of FVIII-XTEN variants from a 6-well plate were diluted to the desired FVIII antigen range using 1× blocking buffer. FVIII standards were prepared in 1×FVIII blocking buffer containing mock transfection media with matching media concentration as the testing samples. The range of rFVIII standard was from 50 ng/mL to 0.39 ng/mL.

[0644] Standards, diluted cell culture samples, and a pooled normal human plasma assay control were added into Immulon® 2HB 96-well plates in duplicates (100 μL/well) and incubated at 37° C. for 2 hours. Following four times washing with PBST, 100 μl of HRP-sheep anti-hFVIII antibody (Affinity Biologicals, F8C-EIC-D) were added into each well and plates were incubated for 1 hour at 37° C. After another four washes with PBST, 100 μl of TMB Super Sensitive Substrate (BioFX) were added to each well, followed by 5-10 min color development. To terminate the color reaction, 50 μL of H2SO4 were added to each well, and the absorbance of at 450 nm was measured with a SpectraMAX plus (Molecular Devices) instrument.

[0645] Data analysis was performed using SoftMax Pro software (version 5.4). The Lowest Level of Quantification (LLOQ) was 0.0039 μg/mL. Results are presented in Table 22.

[0646] Permissive sites into which XTEN sequences were inserted without eliminating procoagulant activity of the recombinant protein, or the ability of the recombinant proteins to be expressed in the host cell were clustered within loops in each of the three A domains of FVIII. FIG. 36 shows the location of insertion sites in the recombinant FVIII proteins that showed FVIII activity on domains A1, A2 and A3. FIG. 33 shows a structural representation depicting the location of insertion sites in the recombinant FVIII proteins that showed FVIII activity.

[0647] The permissive sites clustered in solvent exposed, highly flexible surface loops (XTEN permissive loops). The A1 domain loops were located in a region corresponding approximately to amino acid positions 15 to 45, and 201 to 232, respectively, in the sequence of mature human FVIII (FIG. 30). The A2 domain loops were located in a region corresponding approximately to amino acid positions 395 to 421, and 577 to 635, respectively, in the sequence of mature human FVIII (FIG. 30). The A3 domain loops were located in a region corresponding approximately to amino acid positions 1705 to 1732, and 1884 to 1917, respectively, in the sequence of mature human FVIII (FIG. 30). FIGS. 37A and 37B show the location of the XTEN permissive loops relative to secondary structure elements in the tridimensional structure of FVIII.

### Example 47: CFXTEN with Insertions of XTEN Having 144 Amino Acids

[0648] Analysis of the preliminary data presented above (Example 46) suggested the existence of defined regions within the linear polypeptide sequences and 3-D structures of the FVIII A domains that can accommodate the insertion of XTEN sequences. To test this hypothesis and further define the boundaries of putative regions that can accommodate the insertion of XTEN sequences without loss of FVIII activity, 23 additional insertion sites not present in either Batch 1 or 2 were chosen and designated Batch 3.

[0649] Batch 3 constructs were generated by the insertion of a 144 residue XTEN AE polypeptide, comprising amino acid residues Gly (G), Ala (A), Pro (P), Ser (S), Thr (T), and Glu (E), or a 144 residue XTEN AG polypeptide, comprising amino acid residues Gly (G), Ala (A), Pro (P), Ser (S), and Thr (T). Five different version of the 144 residue AE polypeptide were generated and designated XTEN-AE144-2A, XTEN-AE144-3B, XTEN-AE144-4A, XTEN-AE144-5A, XTEN-AE144-6B. The amino acid sequences are as set forth in Table 4. Five different versions of the 144 residue polypeptide were generated and designated XTEN-AG144-1, XTEN-AG144-A, XTEN-AG144-B, XTEN-AG144-C, and XTEN-AG144-F. The amino acid sequences are as set forth in Table 4.

[0650] The 144 residue XTEN encoding DNA sequence was introduced by the chemical synthesis of DNA segments (DNA 2.0, Redwood City, CA) spanning the nearest unique restriction sites within the base vector on either side of the site of insertion.

[0651] The DNA sequences corresponding to the XTEN 144 peptides were inserted such that the resulting DNA construct would encode a FVIII protein in which the XTEN 144 protein sequence is inserted immediately after the residue indicated in the site selection, and flanked by AscI and XhoI sites.

[0652] In addition to these sites, those sites from Batch 1 and 2 at which insertion of the XTEN AE42 polypeptide did not abolish FVIII procoagulant activity were modified by excision of the AE42 polypeptide encoding DNA segment with restriction enzymes AscI and XhoI, and introduction of XTEN AE144 and XTEN AG144 coding sequences at the same sites. The location of these Batch 1, Batch 2 and Batch insertion sites is summarized in Table III. FIG. 34 presents a structural representation of FVIII showing the location of the XTEN 144 insertion sites.

[0653] A total of 48 constructs with 144 XTEN inserts were created. The constructs are pSD0001-pSD0004, pSD0009-pSD0012, pSD0023-63 [the foregoing ranges include all intermediate numbers, as well], the sequences of which are set forth in Table 21 and the insertion sites of which are detailed in Table 22.

[0654] Expression of FVIII-XTEN 144 Variants

[0655] FVIII variants with XTEN 144 insertions were tranfected into HEK293F cells (Invitrogen, Carlsbad, CA) using polyethyleneimine (PEI, Polysciences Inc. Warrington, PA) or Lipofectamine transfection reagent (Invitrogen, Carlsbad, CA). The transiently transfected cells were grown in 293 Free Style medium or a mixture of 293 Free Style and CD Opti CHO media (Invitrogen, Carlsbad, CA). The cell culture medium was harvested 3-5 days after transfection and analyzed for FVIII expression by chromogenic FVIII activity assay and FVIII ELISA conducted as described herein.

[0656] Cell culture media from transient transfection were concentrated 10-fold in Centricon® spin columns (100 kd cut-off). Concentrated material was then flash frozen and stored at −80° C. for future in vitro analysis and in vivo PK studies.

[0657] In Vitro Assays

[0658] To assess FVIII tolerability to insertions, the FVIII activity in culture media samples from cell cultures was analyzed using a FVIII chromogenic assay. Antigen expression levels were analyzed by FVIII-HC (FVIII heavy chain) and FVIII-LC (FVIII light chain) ELISA.

[0659] FVIII Activity Measurement by Chromogenic Assay and Expression Measurement by FVIII-HC and FVIII-LC ELISA

[0660] Chromogenic and ELISA assay methods were conducted as described. The results obtained are summarized in Table 23.

[0661] Permissive sites into which XTEN sequences were inserted without eliminating procoagulant activity of the recombinant protein, or the ability of the recombinant proteins to be expressed in the host cell clustered within loops in each of the three A domains of FVIII. The same XTEN permissive loop regions tolerating the shorter XTEN sequences inserted were found to tolerate the insertion of the longer XTEN sequences. FIG. 38 shows the location of XTEN 144 insertion sites in the recombinant FVIII proteins that showed FVIII activity on domains A1, A2 and A3. FIG. 35 shows a structural representation depicting the location of insertion sites in the recombinant FVIII proteins that showed FVIII activity.

[0662] These observation indicate that two regions within each of the A domains of FVIII are able to accommodate insertion of XTEN sequences without loss of FVIII cofactor activity. A structural depiction of these so-called XTEN permissive loops (FIGS. 40 and 41) demonstrate that they occupy structurally analogous positions in each of the A domains and project from one face of the FVIII molecule. The identified XTEN permissive loops correspond to highly flexible loops located between beta strands in the three-dimensional structures of the A1, A2, and A3 domains, as shown in FIGS. 37A and 37B.

[0663] The in vivo evaluation of XTEN 144 insertions on FVIII Half-life Extension, as determined by pharmacokinetics, is described in Example 32.

### Example 48: Rescue or Enhancement of FVIII Expression by Insertion of an XTEN Sequence within the a3 Acidic Peptide Region of FVIII

[0664] Adherent HEK293 cells were transfected (as described in Example 24) with FVIII-XTEN DNA constructs in which the coding sequence of a B-domain deleted factor VIII contained 2 to 4 XTEN insertions of 144 amino acid residues each, of composition and insertion location as indicated in Table 44, below. At 5 days post-transfection, cell culture supernatants were assayed for FVIII activity by the chromogenic assay (as described in Example 25). Results are shown in Table 44.

TABLE 44
Expression levels of FVIII Activity by CFXTEN variants containing an XTEN
at position 1720 and one, two, or three additional XTEN insertions.

| Construct | Domain, Position, and Type of XTEN Insertion | | | | | Activity |
|---|---|---|---|---|---|---|
| Name | A1 | A2 | a3 | A3-1 | A3-2 | (mIU/mL) |
| LSD0040.002 | 26 AG144 | | | 1720 AG144 | | 175 |
| LSD0041.008 | | 403 AE144 | | 1720 AG144 | | 279 |
| LSD0045.002 | | | 1656 AG144 | 1720 AG144 | | 2598 |
| PSD080.002 | 26 AG144 | | 1656 AG144 | 1720 AG144 | | 1081 |
| PSD083.001 | | 403 AE144 | 1656 AG144 | 1720 AG144 | | 789 |
| PSD082.001 | 26 AG144 | | | 1720 AG144 | 1900 AE144 | <LLOQ |
| PSD090.003 | 26 AG144 | | 1656 AG144 | 1720 AG144 | 1900 AE144 | 316 |

[0665] For the purpose of comparison, all FVIII-XTEN constructs had an AG144 XTEN insertion at amino acid position 1720 (numbered relative to full-length factor VIII) within the A3 domain. Expression levels of FVIII-XTEN varians were determined by chromogenic assay and expressed in units of mIU/mL. Constructs with a single additional XTEN insertion at either position 26 in the A1 domain (LSD0040.002) or position 403 in the A2 domain (LSD0041.008) yielded expression levels of 175 and 279 mIU/mL, respectively. In contrast, a construct with a single additional XTEN insertion at position 1656 within the a3 acidic peptide yielded an expression level of 2598 mIU/mL, demonstrating enhancement of expression level for the a3 XTEN insertion construct relative to the A1 and A2 insertion constructs. In addition, in comparison to the FVIII-XTEN construct with XTEN insertions at positions 26 in the A1 domain and 1720 in the A3 domain (LSD0040.002), the construct with an additional XTEN insertion at position 1656 within the a3 acidic peptide region (PSD080.002) yielded significantly higher expression (175 and 1081 mIU/mL, respectively). Consistent with these findings, the construct with XTEN insertions at positions 403 in the A2 domain and 1720 in the A3 domain (LSD0041.008) yielded an expression level of 279 mIU/mL, whereas an additional XTEN insertion at position 1656 within the a3 acidic peptide region (PSD083.001) resulted in an increase in the expression level to 789 mIU/mL. Lastly, the FVIII-XTEN construct with an XTEN insertion at position 26 within the A1 domain and two XTEN insertions at positions 1720 and 1900 within the A3 domain (PSD082.001) did not yield activity above the lower limit of quantitation. However, the FVIII-XTEN construct with an additional XTEN insertion within the a3 acidic peptide region (PSD090.003) resulted in detectable activity, demonstrating that inclusion of an XTEN sequence within the a3 domain can result in recovery of expression (as measured by activity) in FVIII-XTEN constructs that are otherwise expressed at levels below the lower limit of quantitation. Under the conditions of the experiment, the results support the conclusion that insertion of XTEN at the 1656 position and, by extension, within the a3 region, results in enhanced expression of procoagulant FVIII-XTEN compositions.

### Example 49: Effect of XTEN Insertion on FVIII Activity Measured by aPTT

[0666] A one stage activated partial prothrombin (aPTT) coagulation assay was employed in addition to the chromogenic assay (as described in Example 25) to determine FVIII activity of various FVIII-XTEN fusion proteins.

[0667] Method: The FVIII-XTEN aPTT activity was measured using the Sysmex CA-1500 instrument (Siemens Healthcare Diagnostics Inc., Tarrytown, NY). To create a standard curve for the assay, WHO factor VIII standard was diluted with 2% mock transfection media to 100 mU/mL and a two-fold serial dilution series was then performed, with the last standard being 0.78 mU/mL. FVIII-XTEN cell culture samples were first diluted at 1:50 with aPTT assay buffer, further dilutions were made with 2% mock transfection media when needed.

[0668] After dilution, the aPTT assay was performed using Sysmex instrument as follow: 50 μl of diluted standards and samples were mixed with 50 μl human FVIII deficient plasma and then 50 μl of aPTT reagent. The mixture was incubated at 37° C. for 4 min, and following incubation, 50 μl of CaCl₂) was added to the mixture, and the clotting time was measured immediately.

To determine test samples FVIII activity, the clotting time of the standards were plotted using semi-log scale (Clotting time: Linear; Standard concentration: Log) to extrapolates the equation between clotting time and FVIII activity, and FVIII-XTEN activity was then calculated against the standard curve. The assay sensitivity was 40 mU/mL factor VIII.

[0669] Results: The results are summarized in FIGS. 44-46. When single XTEN of 144 or 288 amino acids were inserted into the FVIII, all of the FVIII-XTEN fusion proteins exhibiting activity in the chromogenic assay were also active in aPTT assay. The aPTT activity followed the trend of chromogenic assay, for example, those molecules that showed low FVIII activity in the chromogenic assay also had low aPTT values. Generally, the aPTT results for the fusion proteins were lower than those obtained by the chromogenic assay, with a chromogenic to aPTT ratio of 1.1 up to 2.2, as illustrated in FIG. 44, for the single XTEN insertions. The FVIII-XTEN fusion proteins with multiple XTEN insertions, in general, showed further reductions in aPTT activity in comparison to chromogenic assay. Assays of FVIII-XTEN with two XTEN insertions showed activity with all constructs, but with chromogenic/aPTT ratios approaching 4, in some instances (FIG. 45). Assays of FVIII-XTEN with some three XTEN insertions also showed activity in both assays, with chromogenic/aPTT ratios approaching 5, in some instances (FIG. 46), while the ratios for the BDD-FVIII control were more comparable (right side of FIG. 46). Additionally, the site of XTEN insertion appeared to contribute to the differences seen between aPTT and chromogenic activities. For example, while some molecules with 2 XTEN insertions resulted in up to 4-fold lower activity than chromogenic values, the aPTT activity of other FVIII molecules with 2 XTEN were fairly comparable to chromogenic activity (FIG. 45). Some molecules with 3 XTEN insertions showed up to 5-fold lower than chromogenic activities, other FVIII molecules with 3 XTEN have aPTT activity less than 2-fold lower than chromogenic activity (FIG. 45). Under the conditions of the experiment, the results support the conclusion that FVIII-XTEN fusion protein constructs do retain procoagulant activity, but that the chromogenic assay generally provides higher activity levels than that in the aPTT assay system employed in the study.

### Example 50: Evaluations of the Effect of XTEN Insertion Site onf FVIII Half-Life Extension

[0670] Methods: Six FVIII-XTEN fusion proteins with single XTEN AG-144 insertions at defined locations were tested in FVIII/VWF DKO mice (as generally described in Example 32) to evaluate the effect of XTEN insertion site on FVIII half-life. Six representative XTEN variants (listed in table 1) with XTEN insertion in either within A1, A2, a3, A3-region1 (A3-R1), A3-region 2 (A3-R2) or at the C-terminus were selected for this study, and BDD-FVIII generated from the base vector was used as the control. FVIII/VWF DKO mice were treated with a single intravenous administration of transient transfaction cell culture media concentrate from the six FVIII-XTEN constructs (or positive control media) at 100-200 IU/kg, and plasma samples were subsequently collected at 5 min, 7 hours and 16 hours post-dosing. Plasma FVIII activity was tested using the FVIII chromogenic assay and FVIII-XTEN half-life was estimated using the WinNonlin program. The study data are summarized in Table 45 and FIG. 47.

[0671] Results: A significantly longer half-life was observed for all FVIII-XTEN variants tested compared to BDD-FVIII control, but the degree of the half-life increase varied, with the variant with XTEN at the 403 insertion site conferring the least half-life extension at 10-fold (in comparison to control), while the 1900 insertion variant conferred the most half-life extension at 18-fold. The differences of XTEN insertion site on FVIII half-life extension may reflect the roles of different FVIII domains in FVIII clearance in vivo.

TABLE 45
FVIII-XTEN single AG-144 insertion
variants PK in FVIII/VWF DKO mice

| | BDD- | pSD- | pSD- | pSD- | pSD- | pSD- | pSD- |
|---|---|---|---|---|---|---|---|
| Treatment | FVIII | 050 | 0003 | 0039 | 0010 | 063 | 014 |
| Insertion site | None | 26 | 403 | 1656 | 1720 | 1900 | CT |
| Recovery | 21.3 | 33.8 | 34.8 | 36.0 | 33.6 | 39.6 | 32.4 |
| t½ | 0.25 | 3.15 | 2.4 | 3.3 | 4.28 | 4.54 | 3.91 |
| (hr) | | | | | | | |
| t½ Increase | | 13 | 10 | 13 | 17 | 18 | 16 |
| (fold) | | | | | | | |

### Example 51: Evaluations of the Additive Effect of XTEN iIsertions on FVIII Half-Life Extension

[0672] Methods: To evaluate the effects of multiple XTEN insertions on FVIII-XTEN fusion protein half-life, the half-lives of FVIII-XTEN variants with 1-3 XTEN insertions were determined in FVIII-XTEN DKO mice using the cell culture concentrate from five constructs (as generally described in Example 32). Five FVIII-XTEN variants were tested in the study: pSD-062, with AE144 insertion at position 1900 (numbered relative to full-length factor VIII); pSD-0005 with AE144 in the FVIII B domain (B-domain amino acid position 745); pSD-0019 with AE288 at the FVIII C-terminus (CT); LSD0003.006 with AE144 inserted in the B-domain and AE288 inserted at the C-terminus, and LSD0055.021 with three XTEN of AE144, AE144, and AE288 inserted at position 1900, with the B domain and at the C-terminus. The FVIII-XTEN half-life values were estimated using the WinNonlin program.

[0673] Results: The study results are summarized in Table 46, and the PK curves are shown in FIG. 48. The study results clearly demonstrated the additive effect of multiple XTEN insertions on FVIII half-life extension. With single XTEN insertions, the half-life of FVIII was extended from 0.25 hr to 3.2-4.0 hr, a 13 to 16-fold increase. When the B and CT XTEN insertions were combined together, the FVIII half-life was further extended to 10.6 hr, a 42-fold prolongation. Finally, in the case of a third XTEN insertion added at position 1900 to the B/CT construct, the half-life reached 16 hr in the FVIII-VWF DKO mice, a 64-fold increase.

TABLE 46
Additive effect of XTEN insertions
on FVIII t_{1/2} in FVIII/VWF DKO mice

| | BDD- | pSD- | pSD- | pSD- | LSD- | LSD- |
|---|---|---|---|---|---|---|
| Treatment | FVIII | 062 | 0005 | 0019 | 0003.006 | 0055.021 |
| XTEN | None | 1900 | B | CT | B/CT | 1900/B/CT |
| Insertion site | | | | | | |
| Recovery | 21.3 | 35.3 | 44.9 | 33.3 | 39.0 | 37.2 |
| t½ | 0.25 | 3.8 | 3.2 | 4.0 | 10.6 | 16.0 |
| (hr) | | | | | | |
| t½ Increase | | 15 | 13 | 16 | 42 | 64 |
| (fold) | | | | | | |

### Example 52: Evaluation of FVIII-XTEN Interference with the Binding of Anti-FVIII Antibodies Using the Bethesday Assay

[0674] The ability of XTEN insertions in the FVIII molecule to interfer with binding by pre-existing anti-FVIII antibodies to the FVIII-XTEN fusion protein was evaluated in order to determine their utility in treating patients with anti-FVIII inhibitory antibodies.

[0675] Methods: To assess the binding of anti-FVIII antibodies, two FVIII-XTEN variants (PSD088, with 144 XTEN inserted at the locations of 26/403/1656/1900; and PSD-090, with 144 XTEN inserted at the locations of 26/1656/1720/1900) were tested in comparison with Refacto (a marketed rFVIII) against plasma samples from three hemophilia A patients with factor VIII inhibitors (designated 04-483, 05-505, and GK1838-2079), as well as a sheep anti-FVIII poly-clonal antibody from Affinity Biologicals Inc (F8C-EIA-C). The Bethesda titer of the four anti-FVIII ab against the two FVIII-XTEN variants (pSD-088 and pSD-090) and the Refacto control were determined using modified Bethesda assay methods, detailed as follows. Heat inactivated anti-FVIII antibody samples at various dilutions were incubated with 1 IU/mL of each FVIII variant (diluted in 1× in FVIII chromogenic assay buffer) at a 1:1 ratio. The FVIII/antibody mixtures were then incubated for 2 hours in a 37° C. incubator. After the incubation, the samples were diluted for 10-fold with 1×FVIII chromogenic assay buffer, and 25 μL of diluted mixture were then used for a FVIII chromogenic assay, The percentage of remaining FVIII activity was calculated against the post-incubation activity of a known non-neutralizing sample. Bethesda units were calculated using the following formula: BU=dilution factor X (LN(percent of remaining activity)+6.6438).

[0676] Results: The results are listed in Table 47. Decreased Bethesda unit (BU) titers were observed for all four antibodies when tested against the two FVIII-XTEN variants, in comparison with Refacto. A 5 to 8-fold fold decrease against PSD-088 and a 3 to 5-fold decrease against pSD-090, respectively, were obtained. The inhibition curves against FVIII variants for each antibody were plotted (FIG. 49) and compared to Refacto, and demonstrates a clear left-shift of the inhibition curve for the two FVIII-XTEN molecules, with the pSD-088 FVIII-XTEN variant resulting in a further left-shift compared to pSD-090. These results clearly demonstrate that: 1) both FVIII-XTEN variant fusion proteins are more resistant to pre-existing anti-FVIII inhibitory antibodies than Refacto; and 2) PSD-088 is more resistant to anti-FVIII antibodies than PSD-090, which may provide information useful in determining the differences on the XTEN insertion sites in interferring with the binding of anti-FVIII antibodies. Under the conditions of the experiment, the results provide some support for the potential use of FVIII-XTEN compositions for treating hemophilia A patients with factor VIII inhibitors.

TABLE 47
Anti-FVIII antibody Bethesda titer against FVIII-XTEN variants

| | Anti-FVIII ab. | | | |
|---|---|---|---|---|
| | | | GK1838- | F8C-EIA- |
| FVIII | 04-483 | 05-505 | 2079 | C |
| pSD-088 (16/403/1656/1900) | 2.5 | 8 | 47 | 57 |
| pSD-090 (26/1656/1720/1900) | 3.4 | 12 | 55 | 96 |
| Refacto | 12 | 66 | 268 | 337 |

### Example 53: Half-Life Evaluations of FVIII XTEN Fusion Molecules Containing Four XTEN Insertions in Hemophilia a Mice

[0677] Methods: Eight FVIII-XTEN fusion proteins with four XTEN insertions each at defined locations were tested in FVIII/VWF DKO mice to evaluate the effect of the XTEN insertions on FVIII half-life extension: LSD0071.001, contains 403-AG144, 1900-AE144, 745(B)-AE144, 2332(CT)-AE288 XTEN insertions (designated as the FVIII amino acid number and the XTEN inserted); LSD0071.002, containing 403-AE144, 1900-AE144, 745(B)-AE144, 2332(CT)-AE288 XTEN insertions; LSD0072.001, containing 403-AG144, 1900-AG144, 745(B)-AE144, 2332(CT)-AE288 XTEN insertions; LSD0072.002, containing 403-AE144, 1900-AG144, 745(B)-AE144, 2332(CT)-AE288 XTEN insertions; pBC0247.004, containing 18-AG144, 403-AE144, 1656-AG144, 2332(CT)-AE288 XTEN insertions; pBC0251.002, containing 18-AG144, 1656-AG144, 1900-AE144, 2332(CT)-AE288 XTEN insertions; pSD088, containing 26-AG144, 403-AE144, 1656)-AG144, 1900-AE144 XTEN insertions and pSD090, containing 26-AG144, 1656-Ag144, 1720-AG144, 1900-AE144 XTEN insertions. FVIII/VWF DKO mice were treated, as generally described in Example 32, with a single intravenous administration of FVIII-XTEN transfection cell media concentrate of the eight constructs at 100-200 IU/kg, and plasma samples were subsequently collected at 5 min, 8 hrs, 24 hrs, 48 hrs, 72 hrs and 96 hrs post-dosing. Plasma FVIII activity was tested using the FVIII chromogenic assay and FVIII-XTEN half-life was estimated using the WinNonlin program.

[0678] Results: All of the eight FVIII XTEN fusion molecules containing four XTEN insertions exhibited longer half-life than unmodified FVIII (results in Table 48). Three molecules with XTEN insertions at positions 403, 1900, B domain, and C-terminal achieved half-life up to 16.3 hrs, which is a 65-fold improvement in comparison to unmodified BDD FVIII. However, the molecules tested with XTEN insertions at 26/403/1656/1900 (pSD088), or at 26/1656/1720/1900 (pSD090) showed half-life of 9.1 hrs and 9.5 hrs, respectively, which, in comparison to BDD FVIII, represents an increase of 36-fold and 38-fold, respectively. pBC247.004 (XTEN insertions at 18/403/1656/CT) and pBC251.002 (XTEN insertions at 18/1900/1656/CT) achieved half-life values of 14.1 hrs and 13 hrs, respectively. The results demonstrate that multiple XTEN insertions (in this case, four XTEN insertions for each FVIII molecule) can significantly improve FVIII half-life. It further shows that the effect of XTEN on FVIII half-life is insertion site dependent, even in the event of multiple XTEN insertions.

TABLE 48
PK of FVIII-XTEN variants with four XTEN insertions
in FVIII/VWF DKO mice

| Treatment | XTEN Insertions | t½ (hr) | t½ Increase (fold) |
|---|---|---|---|
| BDD-FVIII | None | 0.25 | NA |
| LSD0071.001 | 403AG/1900AE/B/CT | 16.2 | 64.8 |
| LSD0071.002 | 403AE/1900AE/B/CT | 16.3 | 65.2 |
| LSD0072.001 | 403AG/1900AG/B/CT | 11.8 | 47.2 |
| LSD0072.002 | 403AE/1900AG/B/CT | 16.1 | 64.4 |
| pBC247.004 | 18/403/1656/CT | 14.1 | 56.4 |
| pBC251.002 | 18/1900/1656/CT | 13.0 | 52 |
| pSD088 | 26/403/1656/1900 | 9.1 | 36.4 |
| pSD090 | 26/1656/1720/1900 | 9.5 | 38 |

TABLE 49
Exemplary Biological Activity, Exemplary Assays and Preferred Indications

| Biologically Active | | Exemplary Activity | |
|---|---|---|---|
| Protein | Biological Activity | Assays | Preferred Indication: |
| Factor VIII | Coagulation factor VIII is a | Chromogenix assay | Hemophilia A; |
| (Factor VIII; | factor essential for | (Rosen S, Scand J | bleeding; |
| Octocog alfa; | hemostasis. This gene | Haematol (1984) 33 | Factor VIII |
| Moroctocog | encodes coagulation | (Suppl 40): 139-45); | deficiency; |
| alfa; | factor VIII, which participates | Chromogenix | bleeding episodes |
| Recombinant | in the intrinsic pathway of | Coamatic ® Factor VIII | in patients with |
| Antihemophilic | blood coagulation; factor VIII | assay; one-stage | factor VIII inhibitor; |
| factor; | is a cofactor for factor IXa | clotting assay | Surgery-related |
| Nordiate; | which, in the presence of Ca + | (Lethagen, S., et al., | hemorrhagic |
| ReFacto; | 2 and phospholipids, | Scandinavian J | episodes |
| Kogenate; | converts factor X to the | Haematology (1986) | |
| Kogenate | activated form Xa. This gene | 37: 448-453. | |
| SF; Helixate; | produces two alternatively | One-stage clotting | |
| Recombinate) | spliced transcripts. | assay and two-stage | |
| | Transcript variant I encodes | clotting assay | |
| | a large glycoprotein, isoform | (Barrowcliffe TW, | |
| | a, which circulates in plasma | Semin Thromb | |
| | and associates with von | Hemost. (2002) | |
| | Willebrand | 28(3): 247-256); | |
| | factor in a noncovalent | Development of a | |
| | complex. This protein | simple | |
| | undergoes multiple | chromogenic factor VIII | |
| | cleavage events. Transcript | assay for | |
| | variant 2 encodes a putative | clinical use. | |
| | small protein, isoform b, | (Wagenvoord RJ, | |
| | which consists primarily of | Hendrix HH, | |
| | the phospholipid binding | Hemker HC. | |
| | domain of factor VIIIc. This | Haemostasis | |
| | binding domain is essential | 1989; 19(4): 196-204) | |
| | for coagulant activity. | Bethesda assay | |
| | Defects in this gene results | (Verbruggen B, et al. | |
| | in hemophilia A, a common | Improvements in factor | |
| | recessive X-linked | VIII inhibitor detection: | |
| | coagulation disorder. | From Bethesda to | |
| | | Nijmegen. Semin | |
| | | Thromb Hemost. 2009 | |
| | | Nov; 35(8): 752-759) | |

TABLE 50
Exemplary CFXTEN comprising FVIII and internal/external XTEN sequences (SEQ ID
NOS 1537-1554, respectively, in order of appearance)

| CFXTEN | |
|---|---|
| Name | Amino Acid Sequence |
| FVIII BDD2 | ATRRYYLGAVELSWDYMQSDLGELPVDARFPPRVPKSFPFNTSVVYKKTLFVEFTVHLFNI |
| (A1-K127- | AKPRPPWMGLLGPTIQAEVYDTVVITLKNMASHPVSLHAVGVSYWKASEGAEYDDQTSQ |
| AE144- | REKEDDKGGSEPATSGSETPGTSESATPESGPGSEPATSGSETPGSPAGSPTSTEEGTSTEPSE |
| V128-N745- | GSAPGSEPATSGSETPGSEPATSGSETPGSEPATSGSETPGTSTEPSEGSAPGTSESATPESGPG |
| AE288- | SEPATSGSETPGTSTEPSEGSAPGVFPGGSHTYVWQVLKENGPMASDPLCLTYSYLSHVDL |
| P1640- | VKDLNSGLIGALLVCREGSLAKEKTQTLHKFILLFAVFDEGKSWHSETKNSLMQDRDAASA |
| Y2332) | RAWPKMHTVNGYVNRSLPGLIGCHRKSVYWHVIGMGTTPEVHSIFLEGHTFLVRNHRQAS |
| | LEISPITFLTAQTLLMDLGQFLLFCHISSHQHDGMEAYVKVDSCPEEPQLRMKNNEEAEDYD |
| | DDLTDSEMDVVRFDDDNSPSFIQIRSVAKKHPKTWVHYIAAEEEDWDYAPLVLAPDDRSY |
| | KSQYLNNGPQRIGRKYKKVRFMAYTDETFKTREAIQHESGILGPLLYGEVGDTLLIIFKNQA |
| | SRPYNIYPHGITDVRPLYSRRLPKGVKHLKDFPILPGEIFKYKWTVTVEDGPTKSDPRCLTRY |
| | YSSFVNMERDLASGLIGPLLICYKESVDQRGNQIMSDKRNVILFSVFDENRSWYLTENIQRF |
| | LPNPAGVQLEDPEFQASNIMHSINGYVFDSLQLSVCLHEVAYWYILSIGAQTDFLSVFFSGY |
| | TFKHKMVYEDTLTLFPFSGETVFMSMENPGLWILGCHNSDFRNRGMTALLKVSSCDKNTG |
| | DYYEDSYEDISAYLLSKNNAIEPRSFSQNGGTSESATPESGPGSEPATSGSETPGTSESATPES |
| | GPGSEPATSGSETPGTSESATPESGPGTSTEPSEGSAPGSPAGSPTSTEEGTSESATPESGPGSE |
| | PATSGSETPGTSESATPESGPGSPAGSPTSTEEGSPAGSPTSTEEGTSTEPSEGSAPGTSESATP |
| | ESGPGTSESATPESGPGTSESATPESGPGSEPATSGSETPGSEPATSGSETPGSPAGSPTSTEEG |
| | TSTEPSEGSAPGTSTEPSEGSAPGSEPATSGSETPGTSESATPESGPGTSTEPSEGSAPGPPVLK |
| | RHQREITRTTLQSDQEEIDYDDTISVEMKKEDFDIYDEDENQSPRSFQKKTRHYFIAAVERL |
| | WDYGMSSSPHVLRNRAQSGSVPQFKKVVFQEFTDGSFTQPLYRGELNEHLGLLGPYIRAEV |
| | EDNIMVTFRNQASRPYSFYSSLISYEEDQRQGAEPRKNFVKPNETKTYFWKVQHHMAPTK |
| | DEFDCKAWAYFSDVDLEKDVHSGLIGPLLVCHTNTLNPAHGRQVTVQEFALFFTIFDETKS |
| | WYFTENMERNCRAPCNIQMEDPTFKENYRFHAINGYIMDTLPGLVMAQDQRIRWYLLSMG |
| | SNENIHSIHFSGHVFTVRKKEEYKMALYNLYPGVFETVEMLPSKAGIWRVECLIGEHLHAG |
| | MSTLFLVYSNKCQTPLGMASGHIRDFQITASGQYGQWAPKLARLHYSGSINAWSTKEPFSW |
| | IKVDLLAPMIIHGIKTQGARQKFSSLYISQFIIMYSLDGKKWQTYRGNSTGTLMVFFGNVDS |
| | SGIKHNIFNPPIIARYIRLHPTHYSIRSTLRMELMGCDLNSCSMPLGMESKAISDAQITASSYF |
| | TNMFATWSPSKARLHLQGRSNAWRPQVNNPKEWLQVDFQKTMKVTGVTTQGVKSLLTS |
| | MYVKEFLISSSQDGHQWTLFFQNGKVKVFQGNQDSFTPVVNSLDPPLLTRYLRIHPQSWVH |
| | QIALRMEVLGCEAQDLY |
| FVIII BDD2 | ATRRYYLGAVELSWDYMQSDLGELPVDARFPPRVPKSFPFNTSVVYKKTLFVEFTVHLFNI |
| (A1-A375- | AKPRPPWMGLLGPTIQAEVYDTVVITLKNMASHPVSLHAVGVSYWKASEGAEYDDQTSQ |
| AE576- | REKEDDKVFPGGSHTYVWQVLKENGPMASDPLCLTYSYLSHVDLVKDLNSGLIGALLVCR |
| K376-N745- | EGSLAKEKTQTLHKFILLFAVFDEGKSWHSETKNSLMQDRDAASARAWPKMHTVNGYVN |
| AE144- | RSLPGLIGCHRKSVYWHVIGMGTTPEVHSIFLEGHTFLVRNHRQASLEISPITFLTAQTLLMD |
| P1640- | LGQFLLFCHISSHQHDGMEAYVKVDSCPEEPQLRMKNNEEAEDYDDDLTDSEMDVVRFDD |
| Y2332) | DNSPSFIQIRSVAGGSPAGSPTSTEEGTSESATPESGPGTSTEPSEGSAPGSPAGSPTSTEEGTS |
| | TEPSEGSAPGTSTEPSEGSAPGTSESATPESGPGSEPATSGSETPGSEPATSGSETPGSPAGSPT |
| | STEEGTSESATPESGPGTSTEPSEGSAPGTSTEPSEGSAPGSPAGSPTSTEEGTSTEPSEGSAPG |
| | TSTEPSEGSAPGTSESATPESGPGTSTEPSEGSAPGTSESATPESGPGSEPATSGSETPGTSTEP |
| | SEGSAPGTSTEPSEGSAPGTSESATPESGPGTSESATPESGPGSPAGSPTSTEEGTSESATPESG |
| | PGSEPATSGSETPGTSESATPESGPGTSTEPSEGSAPGTSTEPSEGSAPGTSTEPSEGSAPGTST |
| | EPSEGSAPGTSTEPSEGSAPGTSTEPSEGSAPGSPAGSPTSTEEGTSTEPSEGSAPGTSESATPE |
| | SGPGSEPATSGSETPGTSESATPESGPGSEPATSGSETPGTSESATPESGPGTSTEPSEGSAPGT |
| | SESATPESGPGSPAGSPTSTEEGSPAGSPTSTEEGSPAGSPTSTEEGTSESATPESGPGTSTEPS |
| | EGSAPGKKHPKTWVHYIAAEEEDWDYAPLVLAPDDRSYKSQYLNNGPQRIGRKYKKVRF |
| | MAYTDETFKTREAIQHESGILGPLLYGEVGDTLLIIFKNQASRPYNIYPHGITDVRPLYSRRL |
| | PKGVKHLKDFPILPGEIFKYKWTVTVEDGPTKSDPRCLTRYYSSFVNMERDLASGLIGPLLI |
| | CYKESVDQRGNQIMSDKRNVILFSVFDENRSWYLTENIQRFLPNPAGVQLEDPEFQASNIM |
| | HSINGYVFDSLQLSVCLHEVAYWYILSIGAQTDFLSVFFSGYTFKHKMVYEDTLTLFPFSGE |
| | TVFMSMENPGLWILGCHNSDFRNRGMTALLKVSSCDKNTGDYYEDSYEDISAYLLSKNNA |
| | IEPRSFSQNGGSEPATSGSETPGTSESATPESGPGSEPATSGSETPGSPAGSPTSTEEGTSTEPS |
| | EGSAPGSEPATSGSETPGSEPATSGSETPGSEPATSGSETPGTSTEPSEGSAPGTSESATPESGP |
| | GSEPATSGSETPGTSTEPSEGSAPGPPVLKRHQREITRTTLQSDQEEIDYDDTISVEMKKEDF |
| | DIYDEDENQSPRSFQKKTRHYFIAAVERLWDYGMSSSPHVLRNRAQSGSVPQFKKVVFQEF |
| | TDGSFTQPLYRGELNEHLGLLGPYIRAEVEDNIMVTFRNQASRPYSFYSSLISYEEDQRQGA |
| | EPRKNFVKPNETKTYFWKVQHHMAPTKDEFDCKAWAYFSDVDLEKDVHSGLIGPLLVCH |
| | TNTLNPAHGRQVTVQEFALFFTIFDETKSWYFTENMERNCRAPCNIQMEDPTFKENYRFHA |
| | INGYIMDTLPGLVMAQDQRIRWYLLSMGSNENIHSIHFSGHVFTVRKKEEYKMALYNLYPG |
| | VFETVEMLPSKAGIWRVECLIGEHLHAGMSTLFLVYSNKCQTPLGMASGHIRDFQITASGQ |
| | YGQWAPKLARLHYSGSINAWSTKEPFSWIKVDLLAPMIIHGIKTQGARQKFSSLYISQFIIMY |
| | SLDGKKWQTYRGNSTGTLMVFFGNVDSSGIKHNIFNPPIIARYIRLHPTHYSIRSTLRMELM |
| | GCDLNSCSMPLGMESKAISDAQITASSYFTNMFATWSPSKARLHLQGRSNAWRPQVNNPK |
| | EWLQVDFQKTMKVTGVTTQGVKSLLTSMYVKEFLISSSQDGHQWTLFFQNGKVKVFQGN |
| | QDSFTPVVNSLDPPLLTRYLRIHPQSWVHQIALRMEVLGCEAQDLY |
| FVIII BDD2 | ATRRYYLGAVELSWDYMQSDLGELPVDARFPPRVPKSFPFNTSVVYKKTLFVEFTVHLFNI |
| (A1-Y1792- | AKPRPPWMGLLGPTIQAEVYDTVVITLKNMASHPVSLHAVGVSYWKASEGAEYDDQTSQ |
| AF144- | REKEDDKVFPGGSHTYVWQVLKENGPMASDPLCLTYSYLSHVDLVKDLNSGLIGALLVCR |
| E1793- | EGSLAKEKTQTLHKFILLFAVFDEGKSWHSETKNSLMQDRDAASARAWPKMHTVNGYVN |
| Y2332- | RSLPGLIGCHRKSVYWHVIGMGTTPEVHSIFLEGHTFLVRNHRQASLEISPITFLTAQTLLMD |
| AE864) | LGQFLLFCHISSHQHDGMEAYVKVDSCPEEPQLRMKNNEEAEDYDDDLTDSEMDVVRFDD |
| | DNSPSFIQIRSVAKKHPKTWVHYIAAEEEDWDYAPLVLAPDDRSYKSQYLNNGPQRIGRKY |
| | KKVRFMAYTDETFKTREAIQHESGILGPLLYGEVGDTLLIIFKNQASRPYNIYPHGITDVRPL |
| | YSRRLPKGVKHLKDFPILPGEIFKYKWTVTVEDGPTKSDPRCLTRYYSSFVNMERDLASGLI |
| | GPLLICYKESVDQRGNQIMSDKRNVILFSVFDENRSWYLTENIQRFLPNPAGVQLEDPEFQA |
| | SNIMHSINGYVFDSLQLSVCLHEVAYWYILSIGAQTDFLSVFFSGYTFKHKMVYEDTLTLFP |
| | FSGETVFMSMENPGLWILGCHNSDFRNRGMTALLKVSSCDKNTGDYYEDSYEDISAYLLS |
| | KNNAIEPRSFSQNPPVLKRHQREITRTTLQSDQEEIDYDDTISVEMKKEDFDIYDEDENQSPR |
| | SFQKKTRHYFIAAVERLWDYGMSSSPHVLRNRAQSGSVPQFKKVVFQEFTDGSFTQPLYRG |
| | ELNEHLGLLGPYIRAEVEDNIMVTFRNQASRPYSFYSSLISYGGTSTPESGSASPGTSPSGESS |
| | TAPGTSPSGESSTAPGSTSSTAESPGPGSTSESPSGTAPGSTSSTAESPGPGTSPSGESSTAPGT |
| | STPESGSASPGSTSSTAESPGPGTSPSGESSTAPGTSPSGESSTAPGTSPSGESSTAPGEEDQRQ |
| | GAEPRKNFVKPNETKTYFWKVQHHMAPTKDEFDCKAWAYFSDVDLEKDVHSGLIGPLLV |
| | CHTNTLNPAHGRQVTVQEFALFFTIFDETKSWYFTENMERNCRAPCNIQMEDPTFKENYRF |
| | HAINGYIMDTLPGLVMAQDQRIRWYLLSMGSNENIHSIHFSGHVFTVRKKEEYKMALYNL |
| | YPGVFETVEMLPSKAGIWRVECLIGEHLHAGMSTLFLVYSNKCQTPLGMASGHIRDFQITA |
| | SGQYGQWAPKLARLHYSGSINAWSTKEPFSWIKVDLLAPMIIHGIKTQGARQKFSSLYISQFI |
| | IMYSLDGKKWQTYRGNSTGTLMVFFGNVDSSGIKHNIFNPPIIARYIRLHPTHYSIRSTLRME |
| | LMGCDLNSCSMPLGMESKAISDAQITASSYFTNMFATWSPSKARLHLQGRSNAWRPQVNN |
| | PKEWLQVDFQKTMKVTGVTTQGVKSLLTSMYVKEFLISSSQDGHQWTLFFQNGKVKVFQ |
| | GNQDSFTPVVNSLDPPLLTRYLRIHPQSWVHQIALRMEVLGCEAQDLYGGSPAGSPTSTEE |
| | GTSESATPESGPGTSTEPSEGSAPGSPAGSPTSTEEGTSTEPSEGSAPGTSTEPSEGSAPGTSES |
| | ATPESGPGSEPATSGSETPGSEPATSGSETPGSPAGSPTSTEEGTSESATPESGPGTSTEPSEGS |
| | APGTSTEPSEGSAPGSPAGSPTSTEEGTSTEPSEGSAPGTSTEPSEGSAPGTSESATPESGPGTS |
| | TEPSEGSAPGTSESATPESGPGSEPATSGSETPGTSTEPSEGSAPGTSTEPSEGSAPGTSESATP |
| | ESGPGTSESATPESGPGSPAGSPTSTEEGTSESATPESGPGSEPATSGSETPGTSESATPESGPG |
| | TSTEPSEGSAPGTSTEPSEGSAPGTSTEPSEGSAPGTSTEPSEGSAPGTSTEPSEGSAPGTSTEP |
| | SEGSAPGSPAGSPTSTEEGTSTEPSEGSAPGTSESATPESGPGSEPATSGSETPGTSESATPESG |
| | PGSEPATSGSETPGTSESATPESGPGTSTEPSEGSAPGTSESATPESGPGSPAGSPTSTEEGSPA |
| | GSPTSTEEGSPAGSPTSTEEGTSESATPESGPGTSTEPSEGSAPGTSESATPESGPGSEPATSGS |
| | ETPGTSESATPESGPGSEPATSGSETPGTSESATPESGPGTSTEPSEGSAPGSPAGSPTSTEEGT |
| | SESATPESGPGSEPATSGSETPGTSESATPESGPGSPAGSPTSTEEGSPAGSPTSTEEGTSTEPS |
| | EGSAPGTSESATPESGPGTSESATPESGPGTSESATPESGPGSEPATSGSETPGSEPATSGSETP |
| | GSPAGSPTSTEEGTSTEPSEGSAPGTSTEPSEGSAPGSEPATSGSETPGTSESATPESGPGTSTE |
| | PSEGSAP |
| FVIII BDD2 | ATRRYYLGAVELSWDYMQSDLGELPVDARFPPRVPKSFPFNTSVVYKKTLFVEFTVHLFNI |
| (A1-Y2043- | AKPRPPWMGLLGPTIQAEVYDTVVITLKNMASHPVSLHAVGVSYWKASEGAEYDDQTSQ |
| AG144- | REKEDDKVFPGGSHTYVWQVLKENGPMASDPLCLTYSYLSHVDLVKDLNSGLIGALLVCR |
| G2044- | EGSLAKEKTQTLHKFILLFAVFDEGKSWHSETKNSLMQDRDAASARAWPKMHTVNGYVN |
| Q2222- | RSLPGLIGCHRKSVYWHVIGMGTTPEVHSIFLEGHTFLVRNHRQASLEISPITFLTAQTLLMD |
| AG864- | LGQFLLFCHISSHQHDGMEAYVKVDSCPEEPQLRMKNNEEAEDYDDDLTDSEMDVVRFDD |
| V2223- | DNSPSFIQIRSVAKKHPKTWVHYIAAEEEDWDYAPLVLAPDDRSYKSQYLNNGPQRIGRKY |
| Y2332) | KKVRFMAYTDETFKTREAIQHESGILGPLLYGEVGDTLLIIFKNQASRPYNIYPHGITDVRPL |
| | YSRRLPKGVKHLKDFPILPGEIFKYKWTVTVEDGPTKSDPRCLTRYYSSFVNMERDLASGLI |
| | GPLLICYKESVDQRGNQIMSDKRNVILFSVFDENRSWYLTENIQRFLPNPAGVQLEDPEFQA |
| | SNIMHSINGYVFDSLQLSVCLHEVAYWYILSIGAQTDFLSVFFSGYTFKHKMVYEDTLTLFP |
| | FSGETVFMSMENPGLWILGCHNSDFRNRGMTALLKVSSCDKNTGDYYEDSYEDISAYLLS |
| | KNNAIEPRSFSQNPPVLKRHQREITRTTLQSDQEEIDYDDTISVEMKKEDFDIYDEDENQSPR |
| | SFQKKTRHYFIAAVERLWDYGMSSSPHVLRNRAQSGSVPQFKKVVFQEFTDGSFTQPLYRG |
| | ELNEHLGLLGPYIRAEVEDNIMVTFRNQASRPYSFYSSLISYEEDQRQGAEPRKNFVKPNET |
| | KTYFWKVQHHMAPTKDEFDCKAWAYFSDVDLEKDVHSGLIGPLLVCHTNTLNPAHGRQV |
| | TVQEFALFFTIFDETKSWYFTENMERNCRAPCNIQMEDPTFKENYRFHAINGYIMDTLPGLV |
| | MAQDQRIRWYLLSMGSNENIHSIHFSGHVFTVRKKEEYKMALYNLYPGVFETVEMLPSKA |
| | GIWRVECLIGEHLHAGMSTLFLVYSNKCQTPLGMASGHIRDFQITASGQYGPGSSPSASTGT |
| | GPGSSPSASTGTGPGTPGSGTASSSPGSSTPSGATGSPGSSPSASTGTGPGASPGTSSTGSPGT |
| | PGSGTASSSPGSSTPSGATGSPGTPGSGTASSSPGASPGTSSTGSPGASPGTSSTGSPGTPGSG |
| | TASSSGGQWAPKLARLHYSGSINAWSTKEPFSWIKVDLLAPMIIHGIKTQGARQKFSSLYIS |
| | QFIIMYSLDGKKWQTYRGNSTGTLMVFFGNVDSSGIKHNIFNPPIIARYIRLHPTHYSIRSTLR |
| | MELMGCDLNSCSMPLGMESKAISDAQITASSYFTNMFATWSPSKARLHLQGRSNAWRPQG |
| | GASPGTSSTGSPGSSPSASTGTGPGSSPSASTGTGPGTPGSGTASSSPGSSTPSGATGSPGSSPS |
| | ASTGTGPGASPGTSSTGSPGTPGSGTASSSPGSSTPSGATGSPGTPGSGTASSSPGASPGTSST |
| | GSPGASPGTSSTGSPGTPGSGTASSSPGSSTPSGATGSPGASPGTSSTGSPGTPGSGTASSSPG |
| | SSTPSGATGSPGSSPSASTGTGPGSSPSASTGTGPGSSTPSGATGSPGSSTPSGATGSPGASPG |
| | TSSTGSPGASPGTSSTGSPGASPGTSSTGSPGTPGSGTASSSPGASPGTSSTGSPGASPGTSSTG |
| | SPGASPGTSSTGSPGSSPSASTGTGPGTPGSGTASSSPGASPGTSSTGSPGASPGTSSTGSPGA |
| | SPGTSSTGSPGSSTPSGATGSPGSSTPSGATGSPGASPGTSSTGSPGTPGSGTASSSPGSSTPSG |
| | ATGSPGSSTPSGATGSPGSSTPSGATGSPGSSPSASTGTGPGASPGTSSTGSPGASPGTSSTGS |
| | PGTPGSGTASSSPGASPGTSSTGSPGASPGTSSTGSPGASPGTSSTGSPGASPGTSSTGSPGTP |
| | GSGTASSSPGSSTPSGATGSPGTPGSGTASSSPGSSTPSGATGSPGTPGSGTASSSPGSSTPSG |
| | ATGSPGSSTPSGATGSPGSSPSASTGTGPGSSPSASTGTGPGASPGTSSTGSPGTPGSGTASSS |
| | PGSSTPSGATGSPGSSPSASTGTGPGSSPSASTGTGPGASPGTSSTGSPGASPGTSSTGSPGSST |
| | PSGATGSPGSSPSASTGTGPGASPGTSSTGSPGSSPSASTGTGPGTPGSGTASSSPGSSTPSGA |
| | TGSPGSSTPSGATGSPGASPGTSSTGSPGVNNPKEWLQVDFQKTMKVTGVTTQGVKSLLTS |
| | MYVKEFLISSSQDGHQWTLFFQNGKVKVFQGNQDSFTPVVNSLDPPLLTRYLRIHPQSWVH |
| | QIALRMEVLGCEAQDLY |
| FVIII BDD2 | ATRRYYLGAVELSWDYMQSDLGELPVDARFPPRVPKSFPFNTSVVYKKTLFVEFTVHLFN |
| (A1-G1799- | IAKPRPPWMGLLGPTIQAEVYDTVVITLKNMASHPVSLHAVGVSYWKASEGAEYDDQTS |
| AE144- | QREKEDDKVFPGGSHTYVWQVLKENGPMASDPLCLTYSYLSHVDLVKDLNSGLIGALLV |
| A1800- | CREGSLAKEKTQTLHKFILLFAVFDEGKSWHSETKNSLMQDRDAASARAWPKMHTVNGY |
| F2093- | VNRSLPGLIGCHRKSVYWHVIGMGTTPEVHSIFLEGHTFLVRNHRQASLEISPITFLTAQTL |
| AE42- | LMDLGQFLLFCHISSHQHDGMEAYVKVDSCPEEPQLRMKNNEEAEDYDDDLTDSEMDVV |
| S2094- | RFDDDNSPSFIQIRSVAKKHPKTWVHYIAAEEEDWDYAPLVLAPDDRSYKSQYLNNGPQR |
| V2223- | IGRKYKKVRFMAYTDETFKTREAIQHESGILGPLLYGEVGDTLLIIFKNQASRPYNIYPHGIT |
| AE42- | DVRPLYSRRLPKGVKHLKDFPILPGEIFKYKWTVTVEDGPTKSDPRCLTRYYSSFVNMERD |
| N2224- | LASGLIGPLLICYKESVDQRGNQIMSDKRNVILFSVFDENRSWYLTENIQRFLPNPAGVQLE |
| AE42- | DPEFQASNIMHSINGYVFDSLQLSVCLHEVAYWYILSIGAQTDFLSVFFSGYTFKHKMVYE |
| N2225- | DTLTLFPFSGETVFMSMENPGLWILGCHNSDFRNRGMTALLKVSSCDKNTGDYYEDSYED |
| G2278- | ISAYLLSKNNAIEPRSFSQNPPVLKRHQREITRTTLQSDQEEIDYDDTISVEMKKEDFDIYDE |
| AE42- | DENQSPRSFQKKTRHYFIAAVERLWDYGMSSSPHVLRNRAQSGSVPQFKKVVFQEFTDGS |
| K2279- | FTQPLYRGELNEHLGLLGPYIRAEVEDNIMVTFRNQASRPYSFYSSLISYEEDQRQGGGSEP |
| Y2332) | ATSGSETPGTSESATPESGPGSEPATSGSETPGSPAGSPTSTEEGTSTEPSEGSAPGSEPATSG |
| | SETPGSEPATSGSETPGSEPATSGSETPGTSTEPSEGSAPGTSESATPESGPGSEPATSGSETP |
| | GTSTEPSEGSAPGAEPRKNFVKPNETKTYFWKVQHHMAPTKDEFDCKAWAYFSDVDLEK |
| | DVHSGLIGPLLVCHTNTLNPAHGRQVTVQEFALFFTIFDETKSWYFTENMERNCRAPCNIQ |
| | MEDPTFKENYRFHAINGYIMDTLPGLVMAQDQRIRWYLLSMGSNENIHSIHFSGHVFTVR |
| | KKEEYKMALYNLYPGVFETVEMLPSKAGIWRVECLIGEHLHAGMSTLFLVYSNKCQTPL |
| | GMASGHIRDFQITASGQYGQWAPKLARLHYSGSINAWSTKEPFSWIKVDLLAPMIIHGIKT |
| | QGARQKFGSEPATSGSETPGTSESATPESGPGTSTEPSEGSAPGSPAGSPGSSLYISQFIIMYS |
| | LDGKKWQTYRGNSTGTLMVFFGNVDSSGIKHNIFNPPIIARYIRLHPTHYSIRSTLRMELMG |
| | CDLNSCSMPLGMESKAISDAQITASSYFTNMFATWSPSKARLHLQGRSNAWRPQVGPAGS |
| | PTSTEEGTSTEPSEGSAPGTSESATPESGPGSEPATSGGNNPKEWLQVDFQKTMKVTGVTT |
| | QGVKSLLTSMYVKEFLISSSQDGHQWTLFFQNGGTEPSEGSAPGSPAGSPTSTEEGTSESAT |
| | PESGPGSEPATSGSKVKVFQGNQDSFTPVVNSLDPPLLTRYLRIHPQSWVHQIALRMEVLG |
| | CEAQDLY |
| FVIII BDD2 | ATRRYYLGAVELSWDYMQSDLGELPVDARGPGSSPSASTGTGPGSSPSASTGTGPGTPGSG |
| (A1-R28- | TASSSPGSSTPSGATGSPGSSPSASTGTGPGASPGTSSTGSPGTPGSGTASSSPGSSTPSGATGS |
| AG144-F29- | PGTPGSGTASSSPGASPGTSSTGSPGASPGTSSTGSPGTPGSGTASSSGFPPRVPKSFPFNTSV |
| G244- | VYKKTLFVEFTVHLFNIAKPRPPWMGLLGPTIQAEVYDTVVITLKNMASHPVSLHAVGVSY |
| AG288- | WKASEGAEYDDQTSQREKEDDKVFPGGSHTYVWQVLKENGPMASDPLCLTYSYLSHVDL |
| L245- | VKDLNSGLIGALLVCREGSLAKEKTQTLHKFILLFAVFDEGKSWHSETKNSLMQDRDAASA |
| R2090- | RAWPKMHTVNGYVNRSLPGGPGASPGTSSTGSPGASPGTSSTGSPGTPGSGTASSSPGSSTP |
| AG576- | SGATGSPGTPGSGTASSSPGSSTPSGATGSPGTPGSGTASSSPGSSTPSGATGSPGSSTPSGAT |
| Q2091- | GSPGSSPSASTGTGPGSSPSASTGTGPGASPGTSSTGSPGTPGSGTASSSPGSSTPSGATGSPG |
| Y2332- | SSPSASTGTGPGSSPSASTGTGPGASPGTSSTGSPGASPGTSSTGSPGSSTPSGATGSPGSSPSA |
| AG864) | STGTGPGASPGTSSTGSPGSSPSASTGTGPGTPGSGTASSSPGSSTPSGATGSGLIGCHRKSVY |
| | WHVIGMGTTPEVHSIFLEGHTFLVRNHRQASLEISPITFLTAQTLLMDLGQFLLFCHISSHQH |
| | DGMEAYVKVDSCPEEPQLRMKNNEEAEDYDDDLTDSEMDVVRFDDDNSPSFIQIRSVAKK |
| | HPKTWVHYIAAEEEDWDYAPLVLAPDDRSYKSQYLNNGPQRIGRKYKKVRFMAYTDETF |
| | KTREAIQHESGILGPLLYGEVGDTLLIIFKNQASRPYNIYPHGITDVRPLYSRRLPKGVKHLK |
| | DFPILPGEIFKYKWTVTVEDGPTKSDPRCLTRYYSSFVNMERDLASGLIGPLLICYKESVDQR |
| | GNQIMSDKRNVILFSVFDENRSWYLTENIQRFLPNPAGVQLEDPEFQASNIMHSINGYVFDS |
| | LQLSVCLHEVAYWYILSIGAQTDFLSVFFSGYTFKHKMVYEDTLTLFPFSGETVFMSMENP |
| | GLWILGCHNSDFRNRGMTALLKVSSCDKNTGDYYEDSYEDISAYLLSKNNAIEPRSFSQNP |
| | PVLKRHQREITRTTLQSDQEEIDYDDTISVEMKKEDFDIYDEDENQSPRSFQKKTRHYFIAA |
| | VERLWDYGMSSSPHVLRNRAQSGSVPQFKKVVFQEFTDGSFTQPLYRGELNEHLGLLGPYI |
| | RAEVEDNIMVTFRNQASRPYSFYSSLISYEEDQRQGAEPRKNFVKPNETKTYFWKVQHHM |
| | APTKDEFDCKAWAYFSDVDLEKDVHSGLIGPLLVCHTNTLNPAHGRQVTVQEFALFFTIFD |
| | ETKSWYFTENMERNCRAPCNIQMEDPTFKENYRFHAGINGYIMDTLPGLVMAQDQRIRWY |
| | LLSMGSNENIHSIHFSGHVFTVRKKEEYKMALYNLYPGVFETVEMLPSKAGIWRVECLIGE |
| | HLHAGMSTLFLVYSNKCQTPLGMASGHIRDFQITASGQYGQWAPKLARLHYSGSINAWST |
| | KEPFSWIKVDLLAPMIIHGIKTQGARGSPAGSPTSTEEGTSESATPESGPGTSTEPSEGSAPGS |
| | PAGSPTSTEEGTSTEPSEGSAPGTSTEPSEGSAPGTSESATPESGPGSEPATSGSETPGSEPATS |
| | GSETPGSPAGSPTSTEEGTSESATPESGPGTSTEPSEGSAPGTSTEPSEGSAPGSPAGSPTSTEE |
| | GTSTEPSEGSAPGTSTEPSEGSAPGTSESATPESGPGTSTEPSEGSAPGTSESATPESGPGSEPA |
| | TSGSETPGTSTEPSEGSAPGTSTEPSEGSAPGTSESATPESGPGTSESATPESGPGSPAGSPTST |
| | EEGTSESATPESGPGSEPATSGSETPGTSESATPESGPGTSTEPSEGSAPGTSTEPSEGSAPGTS |
| | TEPSEGSAPGTSTEPSEGSAPGTSTEPSEGSAPGTSTEPSEGSAPGSPAGSPTSTEEGTSTEPSE |
| | GSAPGTSESATPESGPGSEPATSGSETPGTSESATPESGPGSEPATSGSETPGTSESATPESGPG |
| | TSTEPSEGSAPGTSESATPESGPGSPAGSPTSTEEGSPAGSPTSTEEGSPAGSPTSTEEGTSESA |
| | TPESGPGTSTEPSEGSAPGQKFSSLYISQFIIMYSLDGKKWQTYRGNSTGTLMVFFGNVDSS |
| | GIKHNIFNPPIIARYIRLHPTHYSIRSTLRMELMGCDLNSCSMPLGMESKAISDAQITASSYFT |
| | NMFATWSPSKARLHLQGRSNAWRPQVNNPKEWLQVDFQKTMKVTGVTTQGVKSLLTSM |
| | YVKEFLISSSQDGHQWTLFFQNGKVKVFQGNQDSFTPVVNSLDPPLLTRYLRIHPQSWVHQ |
| | IALRMEVLGCEAQDLYGGSPAGSPTSTEEGTSESATPESGPGTSTEPSEGSAPGSPAGSPTST |
| | EEGTSTEPSEGSAPGTSTEPSEGSAPGTSESATPESGPGSEPATSGSETPGSEPATSGSETPGSP |
| | AGSPTSTEEGTSESATPESGPGTSTEPSEGSAPGTSTEPSEGSAPGSPAGSPTSTEEGTSTEPSE |
| | GSAPGTSTEPSEGSAPGTSESATPESGPGTSTEPSEGSAPGTSESATPESGPGSEPATSGSETPG |
| | TSTEPSEGSAPGTSTEPSEGSAPGTSESATPESGPGTSESATPESGPGSPAGSPTSTEEGTSESA |
| | TPESGPGSEPATSGSETPGTSESATPESGPGTSTEPSEGSAPGTSTEPSEGSAPGTSTEPSEGSA |
| | PGTSTEPSEGSAPGTSTEPSEGSAPGTSTEPSEGSAPGSPAGSPTSTEEGTSTEPSEGSAPGTSE |
| | SATPESGPGSEPATSGSETPGTSESATPESGPGSEPATSGSETPGTSESATPESGPGTSTEPSEG |
| | SAPGTSESATPESGPGSPAGSPTSTEEGSPAGSPTSTEEGSPAGSPTSTEEGTSESATPESGPGT |
| | STEPSEGSAPGTSESATPESGPGSEPATSGSETPGTSESATPESGPGSEPATSGSETPGTSESAT |
| | PESGPGTSTEPSEGSAPGSPAGSPTSTEEGTSESATPESGPGSEPATSGSETPGTSESATPESGP |
| | GSPAGSPTSTEEGSPAGSPTSTEEGTSTEPSEGSAPGTSESATPESGPGTSESATPESGPGTSES |
| | ATPESGPGSEPATSGSETPGSEPATSGSETPGSPAGSPTSTEEGTSTEPSEGSAPGTSTEPSEGS |
| | APGSEPATSGSETPGTSESATPESGPGTSTEPSEGSAP |
| FVIII | ATRRYYLGAVELSWDYMQSDLGELPVDARFPPRVPKSFPFNTSVVYKKTLFVEFTDHLFNI |
| (A1-T1651- | AKPRPPWMGLLGPTIQAEVYDTVVITLKNMASHPVSLHAVGVSYWKASEGAEYDDQTSQ |
| AG576- | REKEDDKVFPGGSHTYVWQVLKENGPMASDPLCLTYSYLSHVDLVKDLNSGLIGALLVCR |
| R1652- | EGSLAKEKTQTLHKFILLFAVFDEGKSWHSETKNSLMQDRDAASARAWPKMHTVNGYVN |
| K1808- | RSLPGLIGCHRKSVYWHVIGMGTTPEVHSIFLEGHTFLVRNHRQASLEISPITFLTAQTLLMD |
| AG144- | LGQFLLFCHISSHQHDGMEAYVKVDSCPEEPQLRMKNNEEAEDYDDDLTDSEMDVVRFDD |
| P1809- | DNSPSFIQIRSVAKKHPKTWVHYIAAEEEDWDYAPLVLAPDDRSYKSQYLNNGPQRIGRKY |
| F2093- | KKVRFMAYTDETFKTREAIQHESGILGPLLYGEVGDTLLIIFKNQASRPYNIYPHGITDVRPL |
| AG288- | YSRRLPKGVKHLKDFPILPGEIFKYKWTVTVEDGPTKSDPRCLTRYYSSFVNMERDLASGLI |
| S2094- | GPLLICYKESVDQRGNQIMSDKRNVILFSVFDENRSWYLTENIQRFLPNPAGVQLEDPEFQA |
| Y2332) | SNIMHSINGYVFDSLQLSVCLHEVAYWYILSIGAQTDFLSVFFSGYTFKHKMVYEDTLTLFP |
| | FSGETVFMSMENPGLWILGCHNSDFRNRGMTALLKVSSCDKNTGDYYEDSYEDISAYLLS |
| | KNNAIEPRSFSQNSRHPSTRQKQFNATTIPENDIEKTDPWFAHRTPMPKIQNVSSSDLLMLLR |
| | QSPTPHGLSLSDLQEAKYETFSDDPSPGAIDSNNSLSEMTHFRPQLHHSGDMVFTPESGLQL |
| | RLNEKLGTTAATELKKLDFKVSSTSNNLISTIPSDNLAAGTDNTSSLGPPSMPVHYDSQLDT |
| | TLFGKKSSPLTESGGPLSLSEENNDSKLLESGLMNSQESSWGKNVSSTESGRLFKGKRAHGP |
| | ALLTKDNALFKVSISLLKTNKTSNNSATNRKTHIDGPSLLIENSPSVWQNILESDTEFKKVTP |
| | LIHDRMLMDKNATALRLNHMSNKTTSSKNMEMVQQKKEGPIPPDAQNPDMSFFKMLFLPE |
| | SARWIQRTHGKNSLNSGQGPSPKQLVSLGPEKSVEGQNFLSEKNKVVVGKGEFTKDVGLK |
| | EMVFPSSRNLFLTNLDNLHENNTHNQEKKIQEEIEKKETLIQENVVLPQIHTVTGTKNFMKN |
| | LFLLSTRQNVEGSYDGAYAPVLQDFRSLNDSTNRTKKHTAHFSKKGEEENLEGLGNQTKQI |
| | VEKYACTTRISPNTSQQNFVTQRSKRALKQFRLPLEETELEKRIIVDDTSTQWSKNMKHLTP |
| | STLTQIDYNEKEKGAITQSPLSDCLTRSHSIPQANRSPLPIAKVSSFPSIRPIYLTRVLFQDNSS |
| | HLPAASYRKKDSGVQESSHFLQGAKKNNLSLAILTLEMTGDQREVGSLGTSATNSVTYKK |
| | VENTVLPKPDLPKTSGKVELLPKVHIYQKDLFPTETSNGSPGHLDLVEGSLLQGTEGAIKWN |
| | EANRPGKVPFLRVATESSAKTPSKLLDPLAWDNHYGTQIPKEEWKSQEKSPEKTAFKKKDT |
| | ILSLNACESNHAIAAINEGQNKPEIEVTWAKQGRTERLCSQNPPVLKRHQREITGPGTPGSGT |
| | ASSSPGSSTPSGATGSPGSSPSASTGTGPGSSPSASTGTGPGSSTPSGATGSPGSSTPSGATGSP |
| | GASPGTSSTGSPGASPGTSSTGSPGASPGTSSTGSPGTPGSGTASSSPGASPGTSSTGSPGASP |
| | GTSSTGSPGASPGTSSTGSPGSSPSASTGTGPGTPGSGTASSSPGASPGTSSTGSPGASPGTSST |
| | GSPGASPGTSSTGSPGSSTPSGATGSPGSSTPSGATGSPGASPGTSSTGSPGTPGSGTASSSPG |
| | SSTPSGATGSPGSSTPSGATGSPGSSTPSGATGSPGSSPSASTGTGPGASPGTSSTGSPGASPG |
| | TSSTGSPGTPGSGTASSSPGASPGTSSTGSPGASPGTSSTGSPGASPGTSSTGSPGASPGTSSTG |
| | SPGTPGSGTASSSPGSSTPSGATGSPGTPGSGTASSSPGSSTPSGATGSPGTPGSGTASSSPGSS |
| | TPSGATGSPGSSTPSGATGSPGSSPSASTGTGPGSSPSASTGTGPGASPGTSSTGSPGTPGSGT |
| | ASSSPGSSTPSGATGSPGSSPSASTGTGPGSSPSASTGTGPGASPGTSSTGSSGRTTLQSDQEEI |
| | DYDDTISVEMKKEDFDIYDEDENQSPRSFQKKTRHYFIAAVERLWDYGMSSSPHVLRNRA |
| | QSGSVPQFKKVVFQEFTDGSFTQPLYRGELNEHLGLLGPYIRAEVEDNIMVTFRNQASRPYS |
| | FYSSLISYEEDQRQGAEPRKNFVKGSGTASSSPGSSTPSGATGSPGTPGSGTASSSPGSSTPSG |
| | ATGSPGSSTPSGATGSPGSSPSASTGTGPGSSPSASTGTGPGASPGTSSTGSPGTPGSGTASSS |
| | PGSSTPSGATGSPGSSPSASTGTGPGSSPSASTGTGPGASPGPNETKTYFWKVQHHMAPTKD |
| | EFDCKAWAYFSDVDLEKDVHSGLIGPLLVCHTNTLNPAHGRQVTVQEFALFFTIFDETKSW |
| | YFTENMERNCRAPCNIQMEDPTFKENYRFHAINGYIMDTLPGLVMAQDQRIRWYLLSMGS |
| | NENIHSIHFSGHVFTVRKKEEYKMALYNLYPGVFETVEMLPSKAGIWRVECLIGEHLHAGM |
| | STLFLVYSNKCQTPLGMASGHIRDFQITASGQYGQWAPKLARLHYSGSINAWSTKEPFSWI |
| | KVDLLAPMIIHGIKTQGARQKFGPGASPGTSSTGSPGASPGTSSTGSPGTPGSGTASSSPGSST |
| | PSGATGSPGTPGSGTASSSPGSSTPSGATGSPGTPGSGTASSSPGSSTPSGATGSPGSSTPSGA |
| | TGSPGSSPSASTGTGPGSSPSASTGTGPGASPGTSSTGSPGTPGSGTASSSPGSSTPSGATGSP |
| | GSSPSASTGTGPGSSPSASTGTGPGASPGTSSTGSPGASPGTSSTGSPGSSTPSGATGSPGSSPS |
| | ASTGTGPGASPGTSSTGSPGSSPSASTGTGPGTPGSGTASSSPGSSTPSGATGSGSSLYISQFII |
| | MYSLDGKKWQTYRGNSTGTLMVFFGNVDSSGIKHNIFNPPIIARYIRLHPTHYSIRSTLRME |
| | LMGCDLNSCSMPLGMESKAISDAQITASSYFTNMFATWSPSKARLHLQGRSNAWRPQVNN |
| | PKEWLQVDFQKTMKVTGVTTQGVKSLLTSMYVKEFLISSSQDGHQWTLFFQNGKVKVFQ |
| | GNQDSFTPVVNSLDPPLLTRYLRIHPQSWVHQIALRMEVLGCEAQDLY |
| FVIII BDD2 | ATRRYYLGAVELSWDYMQSDLGELPVDAGGAPSPSASTGTGPGTPGSGTASSSPGSSTPSG |
| (A1-A28- | ATGSPGPSGPGRFPPRVPKSFPFNTSVVYKKTLFVEFTVHLFNIAKPRPPWMGLLGPTIQAEV |
| AG42-F29- | YDTVVITLKNMASHPVSLHAVGVSYWKASEGAEYDDQTSQREKEGGPGTPGSGTASSSPG |
| E124- | SSTPSGATGSPGSSPSASTGTGPGASPGDDKVFPGGSHTYVWQVLKENGPMASDPLCLTYS |
| AG42- | YLSHVDLVKDLNSGLIGALLVCREGSLAKEKTQTLHKFILLFAVFDEGGSPSASTGTGPGAS |
| D125-E124- | PGTSSTGSPGTPGSGTASSSPGSSTPSGAGKSWHSETKNSLMQDRDAASARAWPKMHTVN |
| AG42- | GYVNSSLPGLIGCHRKSVYWHVIGMGTTPEVHSIFLEGHTFLVRNHRQASLEISPITFLTAQT |
| D125-P333- | LLMDLGQFLLFCHISSHQHDGMEAYVKVDSCPEEPGSASTGTGPGASPGTSSTGSPGTPGSG |
| AG42- | TASSSPGSSTPSGATGGQLRMKNNEEAEDYDDDLTDSEMDVVRFDDDNSPSFIQIRSVAKK |
| Q334- | HPKTWVHYIAAEEEDWDYAPLVLAPDDRSYKSQYLNNGPQRIGRKYKKVRFMAYTDETF |
| Y2332) | KTREAIQHESGILGPLLYGEVGDTLLIIFKNQASRPYNIYPHGITDVRPLYSRRLPKGVKHLK |
| | DFPILPGEIFKYKWTVTVEDGPTKSDPRCLTRYYSSFVNMERDLASGLIGPLLICYKESVDQR |
| | GNQIMSDKRNVILFSVFDENRSWYLTENIQRFLPNPAGVQLEDPEFQASNIMHSINGYVFDS |
| | LQLSVCLHEVAYWYILSIGAQTDFLSVFFSGYTFKHKMVYEDTLTLFPFSGETVFMSMENP |
| | GLWILGCHNSDFRNRGMTALLKVSSCDKNTGDYYEDSYEDISAYLLSKNNAIEPRSFSQNP |
| | PVLKRHQREITRTTLQSDQEEIDYDDTISVEMKKEDFDIYDEDENQSPRSFQKKTRHYFIAA |
| | VERLWDYGMSSSPHVLRNRAQSGSVPQFKKVVFQEFTDGSFTQPLYRGELNEHLGLLGPYI |
| | RAEVEDNIMVTFRNQASRPYSFYSSLISYEEDQRQGAEPRKNFVKPNETKTYFWKVQHHM |
| | APTKDEFDCKAWAYFSDVDLEKDVHSGLIGPLLVCHTNTLNPAHGRQVTVQEFALFFTIFD |
| | ETKSWYFTENMERNCRAPCNIQMEDPTFKENYRFHAINGYIMDTLPGLVMAQDQRIRWYL |
| | LSMGSNENIHSIHFSGHVFTVRKKEEYKMALYNLYPGVFETVEMLPSKAGIWRVECLIGEH |
| | LHAGMSTLFLVYSNKCQTPLGMASGHIRDFQITASGQYGQWAPKLARLHYSGSINAWSTK |
| | EPFSWIKVDLLAPMIIHGIKTQGARQKFSSLYISQFIIMYSLDGKKWQTYRGNSTGTLMVFF |
| | GNVDSSGIKHNIFNPPIIARYIRLHPTHYSIRSTLRMELMGCDLNSCSMPLGMESKAISDAQIT |
| | ASSYFTNMFATWTPSKARLHLQGRSNAWRPQVNNPKEWLQVDFQKTMKVTGVTTQGVK |
| | SLLTSMYVKEFLISSSQDGHQWTLFFQNGKVKVFQGNQDSFTPVVNSLDPPLLTRYLRIHPQ |
| | SWVHQIALRMEVLGCEAQDLY |
| FVIII | ATRRYYLGAVELSWDYMQSDLGELPVDARFPPRVPKSFPFNTSVVYKKTLFVEFTDHLFNI |
| (A1-D345- | AKPRPPWMGLLGPTIQAEVYDTVVITLKNMASHPVSLHAVGVSYWKASEGAEYDDQTSQ |
| AE144- | REKEDDKVFPGGSHTYVWQVLKENGPMASDPLCLTYSYLSHVDLVKDLNSGLIGALLVCR |
| Y346- | EGSLAKEKTQTLHKFILLFAVFDEGKSWHSETKNSLMQDRDAASARAWPKMHTVNGYVN |
| D403- | RSLPGLIGCHRKSVYWHVIGMGTTPEVHSIFLEGHTFLVRNHRQASLEISPITFLTAQTLLMD |
| AE144- | LGQFLLFCHISSHQHDGMEAYVKVDSCPEEPQLRMKNNEEAEDGGSEPATSGSETPGTSES |
| R405- | ATPESGPGSEPATSGSETPGSPAGSPTSTEEGTSTEPSEGSAPGSEPATSGSETPGSEPATSGSE |
| R1797- | TPGSEPATSGSETPGTSTEPSEGSAPGTSESATPESGPGSEPATSGSETPGTSTEPSEGSAPGYD |
| AE288- | DDLTDSEMDVVRFDDDNSPSFIQIRSVAKKHPKTWVHYIAAEEEDWDYAPLVLAPDDGGT |
| Q1798- | STPESGSASPGTSPSGESSTAPGTSPSGESSTAPGSTSSTAESPGPGSTSESPSGTAPGSTSSTAE |
| Y2322) | SPGPGTSPSGESSTAPGTSTPESGSASPGSTSSTAESPGPGTSPSGESSTAPGTSPSGESSTAPG |
| | TSPSGESSTAPGRSYKSQYLNNGPQRIGRKYKKVRFMAYTDETFKTREAIQHESGILGPLLY |
| | GEVGDTLLIIFKNQASRPYNIYPHGITDVRPLYSRRLPKGVKHLKDFPILPGEIFKYKWTVTV |
| | EDGPTKSDPRCLTRYYSSFVNMERDLASGLIGPLLICYKESVDQRGNQIMSDKRNVILFSVF |
| | DENRSWYLTENIQRFLPNPAGVQLEDPEFQASNIMHSINGYVFDSLQLSVCLHEVAYWYILS |
| | IGAQTDFLSVFFSGYTFKHKMVYEDTLTLFPFSGETVFMSMENPGLWILGCHNSDFRNRGM |
| | TALLKVSSCDKNTGDYYEDSYEDISAYLLSKNNAIEPRSFSQNSRHPSTRQKQFNATTIPEN |
| | DIEKTDPWFAHRTPMPKIQNVSSSDLLMLLRQSPTPHGLSLSDLQEAKYETFSDDPSPGAIDS |
| | NNSLSEMTHFRPQLHHSGDMVFTPESGLQLRLNEKLGTTAATELKKLDFKVSSTSNNLISTI |
| | PSDNLAAGTDNTSSLGPPSMPVHYDSQLDTTLFGKKSSPLTESGGPLSLSEENNDSKLLESG |
| | LMNSQESSWGKNVSSTESGRLFKGKRAHGPALLTKDNALFKVSISLLKTNKTSNNSATNRK |
| | THIDGPSLLIENSPSVWQNILESDTEFKKVTPLIHDRMLMDKNATALRLNHMSNKTTSSKN |
| | MEMVQQKKEGPIPPDAQNPDMSFFKMLFLPESARWIQRTHGKNSLNSGQGPSPKQLVSLGP |
| | EKSVEGQNFLSEKNKVVVGKGEFTKDVGLKEMVFPSSRNLFLTNLDNLHENNTHNQEKKI |
| | QEEIEKKETLIQENVVLPQIHTVTGTKNFMKNLFLLSTRQNVEGSYDGAYAPVLQDFRSLN |
| | DSTNRTKKHTAHFSKKGEEENLEGLGNQTKQIVEKYACTTRISPNTSQQNFVTQRSKRALK |
| | QFRLPLEETELEKRIIVDDTSTQWSKNMKHLTPSTLTQIDYNEKEKGAITQSPLSDCLTRSHSI |
| | PQANRSPLPIAKVSSFPSIRPIYLTRVLFQDNSSHLPAASYRKKDSGVQESSHFLQGAKKNNL |
| | SLAILTLEMTGDQREVGSLGTSATNSVTYKKVENTVLPKPDLPKTSGKVELLPKVHIYQKD |
| | LFPTETSNGSPGHLDLVEGSLLQGTEGAIKWNEANRPGKVPFLRVATESSAKTPSKLLDPLA |
| | WDNHYGTQIPKEEWKSQEKSPEKTAFKKKDTILSLNACESNHAIAAINEGQNKPEIEVTWA |
| | KQGRTERLCSQNPPVLKRHQREITRTTLQSDQEEIDYDDTISVEMKKEDFDIYDEDENQSPR |
| | SFQKKTRHYFIAAVERLWDYGMSSSPHVLRNRAQSGSVPQFKKVVFQEFTDGSFTQPLYRG |
| | ELNEHLGLLGPYIRAEVEDNIMVTFRNQASRPYSFYSSLISYEEDQRGGTSESATPESGPGSE |
| | PATSGSETPGTSESATPESGPGSEPATSGSETPGTSESATPESGPGTSTEPSEGSAPGSPAGSPT |
| | STEEGTSESATPESGPGSEPATSGSETPGTSESATPESGPGSPAGSPTSTEEGSPAGSPTSTEEG |
| | TSTEPSEGSAPGTSESATPESGPGTSESATPESGPGTSESATPESGPGSEPATSGSETPGSEPAT |
| | SGSETPGSPAGSPTSTEEGTSTEPSEGSAPGTSTEPSEGSAPGSEPATSGSETPGTSESATPESG |
| | PGTSTEPSEGSAPGQGAEPRKNFVKPNETKTYFWKVQHHMAPTKDEFDCKAWAYFSDVDL |
| | EKDVHSGLIGPLLVCHTNTLNPAHGRQVTVQEFALFFTIFDETKSWYFTENMERNCRAPCNI |
| | QMEDPTFKENYRFHAINGYIMDTLPGLVMAQDQRIRWYLLSMGSNENIHSIHFSGHVFTVR |
| | KKEEYKMALYNLYPGVFETVEMLPSKAGIWRVECLIGEHLHAGMSTLFLVYSNKCQTPLG |
| | MASGHIRDFQITASGQYGQWAPKLARLHYSGSINAWSTKEPFSWIKVDLLAPMIIHGIKTQG |
| | ARQKFSSLYISQFIIMYSLDGKKWQTYRGNSTGTLMVFFGNVDSSGIKHNIFNPPIIARYIRL |
| | HPTHYSIRSTLRMELMGCDLNSCSMPLGMESKAISDAQITASSYFTNMFATWSPSKARLHL |
| | QGRSNAWRPQVNNPKEWLQVDFQKTMKVTGVTTQGVKSLLTSMYVKEFLISSSQDGHQW |
| | TLFFQNGKVKVFQGNQDSFTPVVNSLDPPLLTRYLRIHPQSWVHQIALRMEVLGCEAQDLY |
| FVIII (A1- | ATRRYYLGAVELSWDYMQSDLGELPVDARFPPRVPKSFPFNTSVVYKKTLFVEFTVHLFNI |
| N745)- | AKPRPPWMGLLGPTIQAEVYDTVVITLKNMASHPVSLHAVGVSYWKASEGAEYDDQTSQ |
| AE864- | REKEDDKVFPGGSHTYVWQVLKENGPMASDPLCLTYSYLSHVDLVKDLNSGLIGALLVCR |
| (P1640- | EGSLAKEKTQTLHKFILLFAVFDEGKSWHSETKNSLMQDRDAASARAWPKMHTVNGYVN |
| Y2332) | RSLPGLIGCHRKSVYWHVIGMGTTPEVHSIFLEGHTFLVRNHRQASLEISPITFLTAQTLLMD |
| | LGQFLLFCHISSHQHDGMEAYVKVDSCPEEPQLRMKNNEEAEDYDDDLTDSEMDVVRFDD |
| | DNSPSFIQIRSVAKKHPKTWVHYIAAEEEDWDYAPLVLAPDDRSYKSQYLNNGPQRIGRKY |
| | KKVRFMAYTDETFKTREAIQHESGILGPLLYGEVGDTLLIIFKNQASRPYNIYPHGITDVRPL |
| | YSRRLPKGVKHLKDFPILPGEIFKYKWTVTVEDGPTKSDPRCLTRYYSSFVNMERDLASGLI |
| | GPLLICYKESVDQRGNQIMSDKRNVILFSVFDENRSWYLTENIQRFLPNPAGVQLEDPEFQA |
| | SNIMHSINGYVFDSLQLSVCLHEVAYWYILSIGAQTDFLSVFFSGYTFKHKMVYEDTLTLFP |
| | FSGETVFMSMENPGLWILGCHNSDFRNRGMTALLKVSSCDKNTGDYYEDSYEDISAYLLS |
| | KNNAIEPRSFSQNGGSPAGSPTSTEEGTSESATPESGPGTSTEPSEGSAPGSPAGSPTSTEEGT |
| | STEPSEGSAPGTSTEPSEGSAPGTSESATPESGPGSEPATSGSETPGSEPATSGSETPGSPAGSP |
| | TSTEEGTSESATPESGPGTSTEPSEGSAPGTSTEPSEGSAPGSPAGSPTSTEEGTSTEPSEGSAP |
| | GTSTEPSEGSAPGTSESATPESGPGTSTEPSEGSAPGTSESATPESGPGSEPATSGSETPGTSTE |
| | PSEGSAPGTSTEPSEGSAPGTSESATPESGPGTSESATPESGPGSPAGSPTSTEEGTSESATPES |
| | GPGSEPATSGSETPGTSESATPESGPGTSTEPSEGSAPGTSTEPSEGSAPGTSTEPSEGSAPGTS |
| | TEPSEGSAPGTSTEPSEGSAPGTSTEPSEGSAPGSPAGSPTSTEEGTSTEPSEGSAPGTSESATP |
| | ESGPGSEPATSGSETPGTSESATPESGPGSEPATSGSETPGTSESATPESGPGTSTEPSEGSAPG |
| | TSESATPESGPGSPAGSPTSTEEGSPAGSPTSTEEGSPAGSPTSTEEGTSESATPESGPGTSTEP |
| | SEGSAPGTSESATPESGPGSEPATSGSETPGTSESATPESGPGSEPATSGSETPGTSESATPESG |
| | PGTSTEPSEGSAPGSPAGSPTSTEEGTSESATPESGPGSEPATSGSETPGTSESATPESGPGSPA |
| | GSPTSTEEGSPAGSPTSTEEGTSTEPSEGSAPGTSESATPESGPGTSESATPESGPGTSESATPE |
| | SGPGSEPATSGSETPGSEPATSGSETPGSPAGSPTSTEEGTSTEPSEGSAPGTSTEPSEGSAPGS |
| | EPATSGSETPGTSESATPESGPGTSTEPSEGSAPGPPVLKRHQREITRTTLQSDQEEIDYDDTIS |
| | VEMKKEDFDIYDEDENQSPRSFQKKTRHYFIAAVERLWDYGMSSSPHVLRNRAQSGSVPQ |
| | FKKVVFQEFTDGSFTQPLYRGELNEHLGLLGPYIRAEVEDNIMVTFRNQASRPYSFYSSLISY |
| | EEDQRQGAEPRKNFVKPNETKTYFWKVQHHMAPTKDEFDCKAWAYFSDVDLEKDVHSG |
| | LIGPLLVCHTNTLNPAHGRQVTVQEFALFFTIFDETKSWYFTENMERNCRAPCNIQMEDPTF |
| | KENYRFHAINGYIMDTLPGLVMAQDQRIRWYLLSMGSNENIHSIHFSGHVFTVRKKEEYK |
| | MALYNLYPGVFETVEMLPSKAGIWRVECLIGEHLHAGMSTLFLVYSNKCQTPLGMASGHI |
| | RDFQITASGQYGQWAPKLARLHYSGSINAWSTKEPFSWIKVDLLAPMIIHGIKTQGARQKFS |
| | SLYISQFIIMYSLDGKKWQTYRGNSTGTLMVFFGNVDSSGIKHNIFNPPIIARYIRLHPTHYSI |
| | RSTLRMELMGCDLNSCSMPLGMESKAISDAQITASSYFTNMFATWSPSKARLHLQGRSNA |
| | WRPQVNNPKEWLQVDFQKTMKVTGVTTQGVKSLLTSMYVKEFLISSSQDGHQWTLFFQN |
| | GKVKVFQGNQDSFTPVVNSLDPPLLTRYLRIHPQSWVHQIALRMEVLGCEAQDLY |
| FVIII BDD9 | ATRRYYLGAVELSWDYMQSDLGELPVDARFPPRVPKSFPFNTSVVYKKTLFVEFTVHLFNI |
| (A1-N745)- | AKPRPPWMGLLGPTIQAEVYDTVVITLKNMASHPVSLHAVGVSYWKASEGAEYDDQTSQ |
| AE288- | REKEDDKVFPGGSHTYVWQVLKENGPMASDPLCLTYSYLSHVDLVKDLNSGLIGALLVCR |
| (P1640- | EGSLAKEKTQTLHKFILLFAVFDEGKSWHSETKNSLMQDRDAASARAWPKMHTVNGYVN |
| Y2332) | RSLPGLIGCHRKSVYWHVIGMGTTPEVHSIFLEGHTFLVRNHRQASLEISPITFLTAQTLLMD |
| | LGQFLLFCHISSHQHDGMEAYVKVDSCPEEPQLRMKNNEEAEDYDDDLTDSEMDVVRFDD |
| | DNSPSFIQIRSVAKKHPKTWVHYIAAEEEDWDYAPLVLAPDDRSYKSQYLNNGPQRIGRKY |
| | KKVRFMAYTDETFKTREAIQHESGILGPLLYGEVGDTLLIIFKNQASRPYNIYPHGITDVRPL |
| | YSRRLPKGVKHLKDFPILPGEIFKYKWTVTVEDGPTKSDPRCLTRYYSSFVNMERDLASGLI |
| | GPLLICYKESVDQRGNQIMSDKRNVILFSVFDENRSWYLTENIQRFLPNPAGVQLEDPEFQA |
| | SNIMHSINGYVFDSLQLSVCLHEVAYWYILSIGAQTDFLSVFFSGYTFKHKMVYEDTLTLFP |
| | FSGETVFMSMENPGLWILGCHNSDFRNRGMTALLKVSSCDKNTGDYYEDSYEDISAYLLS |
| | KNNAIEPRSFSQNGGTSESATPESGPGSEPATSGSETPGTSESATPESGPGSEPATSGSETPGT |
| | SESATPESGPGTSTEPSEGSAPGSPAGSPTSTEEGTSESATPESGPGSEPATSGSETPGTSESAT |
| | PESGPGSPAGSPTSTEEGSPAGSPTSTEEGTSTEPSEGSAPGTSESATPESGPGTSESATPESGP |
| | GTSESATPESGPGSEPATSGSETPGSEPATSGSETPGSPAGSPTSTEEGTSTEPSEGSAPGTSTE |
| | PSEGSAPGSEPATSGSETPGTSESATPESGPGTSTEPSEGSAPGPPVLKRHQREITRTTLQSDQ |
| | EEIDYDDTISVEMKKEDFDIYDEDENQSPRSFQKKTRHYFIAAVERLWDYGMSSSPHVLRN |
| | RAQSGSVPQFKKVVFQEFTDGSFTQPLYRGELNEHLGLLGPYIRAEVEDNIMVTFRNQASRP |
| | YSFYSSLISYEEDQRQGAEPRKNFVKPNETKTYFWKVQHHMAPTKDEFDCKAWAYFSDVD |
| | LEKDVHSGLIGPLLVCHTNTLNPAHGRQVTVQEFALFFTIFDETKSWYFTENMERNCRAPC |
| | NIQMEDPTFKENYRFHAINGYIMDTLPGLVMAQDQRIRWYLLSMGSNENIHSIHFSGHVFT |
| | VRKKEEYKMALYNLYPGVFETVEMLPSKAGIWRVECLIGEHLHAGMSTLFLVYSNKCQTP |
| | LGMASGHIRDFQITASGQYGQWAPKLARLHYSGSINAWSTKEPFSWIKVDLLAPMIIHGIKT |
| | QGARQKFSSLYISQFIIMYSLDGKKWQTYRGNSTGTLMVFFGNVDSSGIKHNIFNPPIIARYI |
| | RLHPTHYSIRSTLRMELMGCDLNSCSMPLGMESKAISDAQITASSYFTNMFATWSPSKARL |
| | HLQGRSNAWRPQVNNPKEWLQVDFQKTMKVTGVTTQGVKSLLTSMYVKEFLISSSQDGH |
| | QWTLFFQNGKVKVFQGNQDSFTPVVNSLDPPLLTRYLRIHPQSWVHQIALRMEVLGCEAQ |
| | DLY |
| FVIII BDD9 | ATRRYYLGAVELSWDYMQSDLGELPVDARFPPRVPKSFPFNTSVVYKKTLFVEFTVHLFNI |
| (A1-S743)- | AKPRPPWMGLLGPTIQAEVYDTVVITLKNMASHPVSLHAVGVSYWKASEGAEYDDQTSQ |
| AE288- | REKEDDKVFPGGSHTYVWQVLKENGPMASDPLCLTYSYLSHVDLVKDLNSGLIGALLVCR |
| (Q1638- | EGSLAKEKTQTLHKFILLFAVFDEGKSWHSETKNSLMQDRDAASARAWPKMHTVNGYVN |
| Y2332) | RSLPGLIGCHRKSVYWHVIGMGTTPEVHSIFLEGHTFLVRNHRQASLEISPITFLTAQTLLMD |
| | LGQFLLFCHISSHQHDGMEAYVKVDSCPEEPQLRMKNNEEAEDYDDDLTDSEMDVVRFDD |
| | DNSPSFIQIRSVAKKHPKTWVHYIAAEEEDWDYAPLVLAPDDRSYKSQYLNNGPQRIGRKY |
| | KKVRFMAYTDETFKTREAIQHESGILGPLLYGEVGDTLLIIFKNQASRPYNIYPHGITDVRPL |
| | YSRRLPKGVKHLKDFPILPGEIFKYKWTVTVEDGPTKSDPRCLTRYYSSFVNMERDLASGLI |
| | GPLLICYKESVDQRGNQIMSDKRNVILFSVFDENRSWYLTENIQRFLPNPAGVQLEDPEFQA |
| | SNIMHSINGYVFDSLQLSVCLHEVAYWYILSIGAQTDFLSVFFSGYTFKHKMVYEDTLTLFP |
| | FSGETVFMSMENPGLWILGCHNSDFRNRGMTALLKVSSCDKNTGDYYEDSYEDISAYLLS |
| | KNNAIEPRSFSGGTSESATPESGPGSEPATSGSETPGTSESATPESGPGSEPATSGSETPGTSES |
| | ATPESGPGTSTEPSEGSAPGSPAGSPTSTEEGTSESATPESGPGSEPATSGSETPGTSESATPES |
| | GPGSPAGSPTSTEEGSPAGSPTSTEEGTSTEPSEGSAPGTSESATPESGPGTSESATPESGPGTS |
| | ESATPESGPGSEPATSGSETPGSEPATSGSETPGSPAGSPTSTEEGTSTEPSEGSAPGTSTEPSE |
| | GSAPGSEPATSGSETPGTSESATPESGPGTSTEPSEGSAPGQNPPVLKRHQREITRTTLQSDQE |
| | EIDYDDTISVEMKKEDFDIYDEDENQSPRSFQKKTRHYFIAAVERLWDYGMSSSPHVLRNR |
| | AQSGSVPQFKKVVFQEFTDGSFTQPLYRGELNEHLGLLGPYIRAEVEDNIMVTFRNQASRP |
| | YSFYSSLISYEEDQRQGAEPRKNFVKPNETKTYFWKVQHHMAPTKDEFDCKAWAYFSDVD |
| | LEKDVHSGLIGPLLVCHTNTLNPAHGRQVTVQEFALFFTIFDETKSWYFTENMERNCRAPC |
| | NIQMEDPTFKENYRFHAINGYIMDTLPGLVMAQDQRIRWYLLSMGSNENIHSIHFSGHVFT |
| | VRKKEEYKMALYNLYPGVFETVEMLPSKAGIWRVECLIGEHLHAGMSTLFLVYSNKCQTP |
| | LGMASGHIRDFQITASGQYGQWAPKLARLHYSGSINAWSTKEPFSWIKVDLLAPMIIHGIKT |
| | QGARQKFSSLYISQFIIMYSLDGKKWQTYRGNSTGTLMVFFGNVDSSGIKHNIFNPPIIARYI |
| | RLHPTHYSIRSTLRMELMGCDLNSCSMPLGMESKAISDAQITASSYFTNMFATWSPSKARL |
| | HLQGRSNAWRPQVNNPKEWLQVDFQKTMKVTGVTTQGVKSLLTSMYVKEFLISSSQDGH |
| | QWTLFFQNGKVKVFQGNQDSFTPVVNSLDPPLLTRYLRIHPQSWVHQIALRMEVLGCEAQ |
| | DLY |
| FVIII BDD9 | ATRRYYLGAVELSWDYMQSDLGELPVDARFPPRVPKSFPFNTSVVYKKTLFVEFTVHLFNI |
| (A1-N745)- | AKPRPPWMGLLGPTIQAEVYDTVVITLKNMASHPVSLHAVGVSYWKASEGAEYDDQTSQ |
| AG288_2- | REKEDDKVFPGGSHTYVWQVLKENGPMASDPLCLTYSYLSHVDLVKDLNSGLIGALLVCR |
| (P1640- | EGSLAKEKTQTLHKFILLFAVFDEGKSWHSETKNSLMQDRDAASARAWPKMHTVNGYVN |
| Y2332)- | RSLPGLIGCHRKSVYWHVIGMGTTPEVHSIFLEGHTFLVRNHRQASLEISPITFLTAQTLLMD |
| AG288_2 | LGQFLLFCHISSHQHDGMEAYVKVDSCPEEPQLRMKNNEEAEDYDDDLTDSEMDVVRFDD |
| | DNSPSFIQIRSVAKKHPKTWVHYIAAEEEDWDYAPLVLAPDDRSYKSQYLNNGPQRIGRKY |
| | KKVRFMAYTDETFKTREAIQHESGILGPLLYGEVGDTLLIIFKNQASRPYNIYPHGITDVRPL |
| | YSRRLPKGVKHLKDFPILPGEIFKYKWTVTVEDGPTKSDPRCLTRYYSSFVNMERDLASGLI |
| | GPLLICYKESVDQRGNQIMSDKRNVILFSVFDENRSWYLTENIQRFLPNPAGVQLEDPEFQA |
| | SNIMHSINGYVFDSLQLSVCLHEVAYWYILSIGAQTDFLSVFFSGYTFKHKMVYEDTLTLFP |
| | FSGETVFMSMENPGLWILGCHNSDFRNRGMTALLKVSSCDKNTGDYYEDSYEDISAYLLS |
| | KNNAIEPRSFSQNGPGASPGTSSTGSPGASPGTSSTGSPGTPGSGTASSSPGSSTPSGATGSPG |
| | TPGSGTASSSPGSSTPSGATGSPGTPGSGTASSSPGSSTPSGATGSPGSSTPSGATGSPGSSPSA |
| | STGTGPGSSPSASTGTGPGASPGTSSTGSPGTPGSGTASSSPGSSTPSGATGSPGSSPSASTGT |
| | GPGSSPSASTGTGPGASPGTSSTGSPGASPGTSSTGSPGSSTPSGATGSPGSSPSASTGTGPGA |
| | SPGTSSTGSPGSSPSASTGTGPGTPGSGTASSSPGSSTPSGATGSGPPVLKRHQREITRTTLQS |
| | DQEEIDYDDTISVEMKKEDFDIYDEDENQSPRSFQKKTRHYFIAAVERLWDYGMSSSPHVL |
| | RNRAQSGSVPQFKKVVFQEFTDGSFTQPLYRGELNEHLGLLGPYIRAEVEDNIMVTFRNQA |
| | SRPYSFYSSLISYEEDQRQGAEPRKNFVKPNETKTYFWKVQHHMAPTKDEFDCKAWAYFS |
| | DVDLEKDVHSGLIGPLLVCHTNTLNPAHGRQVTVQEFALFFTIFDETKSWYFTENMERNCR |
| | APCNIQMEDPTFKENYRFHAINGYIMDTLPGLVMAQDQRIRWYLLSMGSNENIHSIHFSGH |
| | VFTVRKKEEYKMALYNLYPGVFETVEMLPSKAGIWRVECLIGEHLHAGMSTLFLVYSNKC |
| | QTPLGMASGHIRDFQITASGQYGQWAPKLARLHYSGSINAWSTKEPFSWIKVDLLAPMIIH |
| | GIKTQGARQKFSSLYISQFIIMYSLDGKKWQTYRGNSTGTLMVFFGNVDSSGIKHNIFNPPII |
| | ARYIRLHPTHYSIRSTLRMELMGCDLNSCSMPLGMESKAISDAQITASSYFTNMFATWSPSK |
| | ARLHLQGRSNAWRPQVNNPKEWLQVDFQKTMKVTGVTTQGVKSLLTSMYVKEFLISSSQ |
| | DGHQWTLFFQNGKVKVFQGNQDSFTPVVNSLDPPLLTRYLRIHPQSWVHQIALRMEVLGC |
| | EAQDLYGAGSPGAETAPGASPGTSSTGSPGASPGTSSTGSPGTPGSGTASSSPGSSTPSGATG |
| | SPGTPGSGTASSSPGSSTPSGATGSPGTPGSGTASSSPGSSTPSGATGSPGSSTPSGATGSPGSS |
| | PSASTGTGPGSSPSASTGTGPGASPGTSSTGSPGTPGSGTASSSPGSSTPSGATGSPGSSPSAST |
| | GTGPGSSPSASTGTGPGASPGTSSTGSPGASPGTSSTGSPGSSTPSGATGSPGSSPSASTGTGP |
| | GASPGTSSTGSPGSSPSASTGTGPGTPGSGTASSSPGSSTPSGATGSGAETAEQKLISEEDLSP |
| | ATG |
| FVIII BDD9 | ATRRYYLGAVELSWDYMQSDLGELPVDARFPPRVPKSFPFNTSVVYKKTLFVEFTVHLFNI |
| (A1-S743)- | AKPRPPWMGLLGPTIQAEVYDTVVITLKNMASHPVSLHAVGVSYWKASEGAEYDDQTSQ |
| AG288_2- | REKEDDKVFPGGSHTYVWQVLKENGPMASDPLCLTYSYLSHVDLVKDLNSGLIGALLVCR |
| (Q1638- | EGSLAKEKTQTLHKFILLFAVFDEGKSWHSETKNSLMQDRDAASARAWPKMHTVNGYVN |
| Y2332)- | RSLPGLIGCHRKSVYWHVIGMGTTPEVHSIFLEGHTFLVRNHRQASLEISPITFLTAQTLLMD |
| AG288_2 | LGQFLLFCHISSHQHDGMEAYVKVDSCPEEPQLRMKNNEEAEDYDDDLTDSEMDVVRFDD |
| | DNSPSFIQIRSVAKKHPKTWVHYIAAEEEDWDYAPLVLAPDDRSYKSQYLNNGPQRIGRKY |
| | KKVRFMAYTDETFKTREAIQHESGILGPLLYGEVGDTLLIIFKNQASRPYNIYPHGITDVRPL |
| | YSRRLPKGVKHLKDFPILPGEIFKYKWTVTVEDGPTKSDPRCLTRYYSSFVNMERDLASGLI |
| | GPLLICYKESVDQRGNQIMSDKRNVILFSVFDENRSWYLTENIQRFLPNPAGVQLEDPEFQA |
| | SNIMHSINGYVFDSLQLSVCLHEVAYWYILSIGAQTDFLSVFFSGYTFKHKMVYEDTLTLFP |
| | FSGETVFMSMENPGLWILGCHNSDFRNRGMTALLKVSSCDKNTGDYYEDSYEDISAYLLS |
| | KNNAIEPRSFSGPGASPGTSSTGSPGASPGTSSTGSPGTPGSGTASSSPGSSTPSGATGSPGTP |
| | GSGTASSSPGSSTPSGATGSPGTPGSGTASSSPGSSTPSGATGSPGSSTPSGATGSPGSSPSAST |
| | GTGPGSSPSASTGTGPGASPGTSSTGSPGTPGSGTASSSPGSSTPSGATGSPGSSPSASTGTGP |
| | GSSPSASTGTGPGASPGTSSTGSPGASPGTSSTGSPGSSTPSGATGSPGSSPSASTGTGPGASP |
| | GTSSTGSPGSSPSASTGTGPGTPGSGTASSSPGSSTPSGATGSGQNPPVLKRHQREITRTTLQS |
| | DQEEIDYDDTISVEMKKEDFDIYDEDENQSPRSFQKKTRHYFIAAVERLWDYGMSSSPHVL |
| | RNRAQSGSVPQFKKVVFQEFTDGSFTQPLYRGELNEHLGLLGPYIRAEVEDNIMVTFRNQA |
| | SRPYSFYSSLISYEEDQRQGAEPRKNFVKPNETKTYFWKVQHHMAPTKDEFDCKAWAYFS |
| | DVDLEKDVHSGLIGPLLVCHTNTLNPAHGRQVTVQEFALFFTIFDETKSWYFTENMERNCR |
| | APCNIQMEDPTFKENYRFHAINGYIMDTLPGLVMAQDQRIRWYLLSMGSNENIHSIHFSGH |
| | VFTVRKKEEYKMALYNLYPGVFETVEMLPSKAGIWRVECLIGEHLHAGMSTLFLVYSNKC |
| | QTPLGMASGHIRDFQITASGQYGQWAPKLARLHYSGSINAWSTKEPFSWIKVDLLAPMIIH |
| | GIKTQGARQKFSSLYISQFIIMYSLDGKKWQTYRGNSTGTLMVFFGNVDSSGIKHNIFNPPII |
| | ARYIRLHPTHYSIRSTLRMELMGCDLNSCSMPLGMESKAISDAQITASSYFTNMFATWSPSK |
| | ARLHLQGRSNAWRPQVNNPKEWLQVDFQKTMKVTGVTTQGVKSLLTSMYVKEFLISSSQ |
| | DGHQWTLFFQNGKVKVFQGNQDSFTPVVNSLDPPLLTRYLRIHPQSWVHQIALRMEVLGC |
| | EAQDLYGAGSPGAETAPGASPGTSSTGSPGASPGTSSTGSPGTPGSGTASSSPGSSTPSGATG |
| | SPGTPGSGTASSSPGSSTPSGATGSPGTPGSGTASSSPGSSTPSGATGSPGSSTPSGATGSPGSS |
| | PSASTGTGPGSSPSASTGTGPGASPGTSSTGSPGTPGSGTASSSPGSSTPSGATGSPGSSPSAST |
| | GTGPGSSPSASTGTGPGASPGTSSTGSPGASPGTSSTGSPGSSTPSGATGSPGSSPSASTGTGP |
| | GASPGTSSTGSPGSSPSASTGTGPGTPGSGTASSSPGSSTPSGATGSGAETAEQKLISEEDLSP |
| | ATG |
| FVIII | ATRRYYLGAVELSWDYMQSDLGELPVDARFPPRVPKSFPFNTSVVYKKTLFVEFTDHLFNI |
| BDD10 | AKPRPPWMGLLGPTIQAEVYDTVVITLKNMASHPVSLHAVGVSYWKASEGAEYDDQTSQ |
| (A1-N745)- | REKEDDKVFPGGSHTYVWQVLKENGPMASDPLCLTYSYLSHVDLVKDLNSGLIGALLVCR |
| AE288- | EGSLAKEKTQTLHKFILLFAVFDEGKSWHSETKNSLMQDRDAASARAWPKMHTVNGYVN |
| (P1640- | RSLPGLIGCHRKSVYWHVIGMGTTPEVHSIFLEGHTFLVRNHRQASLEISPITFLTAQTLLMD |
| Y2332)- | LGQFLLFCHISSHQHDGMEAYVKVDSCPEEPQLRMKNNEEAEDYDDDLTDSEMDVVRFDD |
| AE288 | DNSPSFIQIRSVAKKHPKTWVHYIAAEEEDWDYAPLVLAPDDRSYKSQYLNNGPQRIGRKY |
| | KKVRFMAYTDETFKTREAIQHESGILGPLLYGEVGDTLLIIFKNQASRPYNIYPHGITDVRPL |
| | YSRRLPKGVKHLKDFPILPGEIFKYKWTVTVEDGPTKSDPRCLTRYYSSFVNMERDLASGLI |
| | GPLLICYKESVDQRGNQIMSDKRNVILFSVFDENRSWYLTENIQRFLPNPAGVQLEDPEFQA |
| | SNIMHSINGYVFDSLQLSVCLHEVAYWYILSIGAQTDFLSVFFSGYTFKHKMVYEDTLTLFP |
| | FSGETVFMSMENPGLWILGCHNSDFRNRGMTALLKVSSCDKNTGDYYEDSYEDISAYLLS |
| | KNNAIEPRSFSQNGGTSESATPESGPGSEPATSGSETPGTSESATPESGPGSEPATSGSETPGT |
| | SESATPESGPGTSTEPSEGSAPGSPAGSPTSTEEGTSESATPESGPGSEPATSGSETPGTSESAT |
| | PESGPGSPAGSPTSTEEGSPAGSPTSTEEGTSTEPSEGSAPGTSESATPESGPGTSESATPESGP |
| | GTSESATPESGPGSEPATSGSETPGSEPATSGSETPGSPAGSPTSTEEGTSTEPSEGSAPGTSTE |
| | PSEGSAPGSEPATSGSETPGTSESATPESGPGTSTEPSEGSAPGPPVLKRHQAEITRTTLQSDQ |
| | EEIDYDDTISVEMKKEDFDIYDEDENQSPRSFQKKTRHYFIAAVERLWDYGMSSSPHVLRN |
| | RAQSGSVPQFKKVVFQEFTDGSFTQPLYRGELNEHLGLLGPYIRAEVEDNIMVTFRNQASRP |
| | YSFYSSLISYEEDQRQGAEPRKNFVKPNETKTYFWKVQHHMAPTKDEFDCKAWAYFSDVD |
| | LEKDVHSGLIGPLLVCHTNTLNPAHGRQVTVQEFALFFTIFDETKSWYFTENMERNCRAPC |
| | NIQMEDPTFKENYRFHAINGYIMDTLPGLVMAQDQRIRWYLLSMGSNENIHSIHFSGHVFT |
| | VRKKEEYKMALYNLYPGVFETVEMLPSKAGIWRVECLIGEHLHAGMSTLFLVYSNKCQTP |
| | LGMASGHIRDFQITASGQYGQWAPKLARLHYSGSINAWSTKEPFSWIKVDLLAPMIIHGIKT |
| | QGARQKFSSLYISQFIIMYSLDGKKWQTYRGNSTGTLMVFFGNVDSSGIKHNIFNPPIIARYI |
| | RLHPTHYSIRSTLRMELMGCDLNSCSMPLGMESKAISDAQITASSYFTNMFATWSPSKARL |
| | HLQGRSNAWRPQVNNPKEWLQVDFQKTMKVTGVTTQGVKSLLTSMYVKEFLISSSQDGH |
| | QWTLFFQNGKVKVFQGNQDSFTPVVNSLDPPLLTRYLRIHPQSWVHQIALRMEVLGCEAQ |
| | DLYGGTSESATPESGPGSEPATSGSETPGTSESATPESGPGSEPATSGSETPGTSESATPESGP |
| | GTSTEPSEGSAPGSPAGSPTSTEEGTSESATPESGPGSEPATSGSETPGTSESATPESGPGSPAG |
| | SPTSTEEGSPAGSPTSTEEGTSTEPSEGSAPGTSESATPESGPGTSESATPESGPGTSESATPES |
| | GPGSEPATSGSETPGSEPATSGSETPGSPAGSPTSTEEGTSTEPSEGSAPGTSTEPSEGSAPGSE |
| | PATSGSETPGTSESATPESGPGTSTEPSEGSAP |
| FVIII | ATRRYYLGAVELSWDYMQSDLGELPVDARFPPRVPKSFPFNTSVVYKKTLFVEFTDHLFNI |
| BDD10 | AKPRPPWMGLLGPTIQAEVYDTVVITLKNMASHPVSLHAVGVSYWKASEGAEYDDQTSQ |
| (A1-S743)- | REKEDDKVFPGGSHTYVWQVLKENGPMASDPLCLTYSYLSHVDLVKDLNSGLIGALLVCR |
| AE288- | EGSLAKEKTQTLHKFILLFAVFDEGKSWHSETKNSLMQDRDAASARAWPKMHTVNGYVN |
| (Q1638- | RSLPGLIGCHRKSVYWHVIGMGTTPEVHSIFLEGHTFLVRNHRQASLEISPITFLTAQTLLMD |
| Y2332)- | LGQFLLFCHISSHQHDGMEAYVKVDSCPEEPQLRMKNNEEAEDYDDDLTDSEMDVVRFDD |
| AE288 | DNSPSFIQIRSVAKKHPKTWVHYIAAEEEDWDYAPLVLAPDDRSYKSQYLNNGPQRIGRKY |
| | KKVRFMAYTDETFKTREAIQHESGILGPLLYGEVGDTLLIIFKNQASRPYNIYPHGITDVRPL |
| | YSRRLPKGVKHLKDFPILPGEIFKYKWTVTVEDGPTKSDPRCLTRYYSSFVNMERDLASGLI |
| | GPLLICYKESVDQRGNQIMSDKRNVILFSVFDENRSWYLTENIQRFLPNPAGVQLEDPEFQA |
| | SNIMHSINGYVFDSLQLSVCLHEVAYWYILSIGAQTDFLSVFFSGYTFKHKMVYEDTLTLFP |
| | FSGETVFMSMENPGLWILGCHNSDFRNRGMTALLKVSSCDKNTGDYYEDSYEDISAYLLS |
| | KNNAIEPRSFSGGTSESATPESGPGSEPATSGSETPGTSESATPESGPGSEPATSGSETPGTSES |
| | ATPESGPGTSTEPSEGSAPGSPAGSPTSTEEGTSESATPESGPGSEPATSGSETPGTSESATPES |
| | GPGSPAGSPTSTEEGSPAGSPTSTEEGTSTEPSEGSAPGTSESATPESGPGTSESATPESGPGTS |
| | ESATPESGPGSEPATSGSETPGSEPATSGSETPGSPAGSPTSTEEGTSTEPSEGSAPGTSTEPSE |
| | GSAPGSEPATSGSETPGTSESATPESGPGTSTEPSEGSAPGQNPPVLKRHQAEITRTTLQSDQE |
| | EIDYDDTISVEMKKEDFDIYDEDENQSPRSFQKKTRHYFIAAVERLWDYGMSSSPHVLRNR |
| | AQSGSVPQFKKVVFQEFTDGSFTQPLYRGELNEHLGLLGPYIRAEVEDNIMVTFRNQASRP |
| | YSFYSSLISYEEDQRQGAEPRKNFVKPNETKTYFWKVQHHMAPTKDEFDCKAWAYFSDVD |
| | LEKDVHSGLIGPLLVCHTNTLNPAHGRQVTVQEFALFFTIFDETKSWYFTENMERNCRAPC |
| | NIQMEDPTFKENYRFHAINGYIMDTLPGLVMAQDQRIRWYLLSMGSNENIHSIHFSGHVFT |
| | VRKKEEYKMALYNLYPGVFETVEMLPSKAGIWRVECLIGEHLHAGMSTLFLVYSNKCQTP |
| | LGMASGHIRDFQITASGQYGQWAPKLARLHYSGSINAWSTKEPFSWIKVDLLAPMIIHGIKT |
| | QGARQKFSSLYISQFIIMYSLDGKKWQTYRGNSTGTLMVFFGNVDSSGIKHNIFNPPIIARYI |
| | RLHPTHYSIRSTLRMELMGCDLNSCSMPLGMESKAISDAQITASSYFTNMFATWSPSKARL |
| | HLQGRSNAWRPQVNNPKEWLQVDFQKTMKVTGVTTQGVKSLLTSMYVKEFLISSSQDGH |
| | QWTLFFQNGKVKVFQGNQDSFTPVVNSLDPPLLTRYLRIHPQSWVHQIALRMEVLGCEAQ |
| | DLYGGTSESATPESGPGSEPATSGSETPGTSESATPESGPGSEPATSGSETPGTSESATPESGP |
| | GTSTEPSEGSAPGSPAGSPTSTEEGTSESATPESGPGSEPATSGSETPGTSESATPESGPGSPAG |
| | SPTSTEEGSPAGSPTSTEEGTSTEPSEGSAPGTSESATPESGPGTSESATPESGPGTSESATPES |
| | GPGSEPATSGSETPGSEPATSGSETPGSPAGSPTSTEEGTSTEPSEGSAPGTSTEPSEGSAPGSE |
| | PATSGSETPGTSESATPESGPGTSTEPSEGSAP |
| FVIII | ATRRYYLGAVELSWDYMQSDLGELPVDARFPPRVPKSFPFNTSVVYKKTLFVEFTDHLFNI |
| BDD10 | AKPRPPWMGLLGPTIQAEVYDTVVITLKNMASHPVSLHAVGVSYWKASEGAEYDDQTSQ |
| (A1-N745)- | REKEDDKVFPGGSHTYVWQVLKENGPMASDPLCLTYSYLSHVDLVKDLNSGLIGALLVCR |
| AG288_2- | EGSLAKEKTQTLHKFILLFAVFDEGKSWHSETKNSLMQDRDAASARAWPKMHTVNGYVN |
| (P1640- | RSLPGLIGCHRKSVYWHVIGMGTTPEVHSIFLEGHTFLVRNHRQASLEISPITFLTAQTLLMD |
| Y2332)- | LGQFLLFCHISSHQHDGMEAYVKVDSCPEEPQLRMKNNEEAEDYDDDLTDSEMDVVRFDD |
| AG288_2 | DNSPSFIQIRSVAKKHPKTWVHYIAAEEEDWDYAPLVLAPDDRSYKSQYLNNGPQRIGRKY |
| | KKVRFMAYTDETFKTREAIQHESGILGPLLYGEVGDTLLIIFKNQASRPYNIYPHGITDVRPL |
| | YSRRLPKGVKHLKDFPILPGEIFKYKWTVTVEDGPTKSDPRCLTRYYSSFVNMERDLASGLI |
| | GPLLICYKESVDQRGNQIMSDKRNVILFSVFDENRSWYLTENIQRFLPNPAGVQLEDPEFQA |
| | SNIMHSINGYVFDSLQLSVCLHEVAYWYILSIGAQTDFLSVFFSGYTFKHKMVYEDTLTLFP |
| | FSGETVFMSMENPGLWILGCHNSDFRNRGMTALLKVSSCDKNTGDYYEDSYEDISAYLLS |
| | KNNAIEPRSFSQNGPGASPGTSSTGSPGASPGTSSTGSPGTPGSGTASSSPGSSTPSGATGSPG |
| | TPGSGTASSSPGSSTPSGATGSPGTPGSGTASSSPGSSTPSGATGSPGSSTPSGATGSPGSSPSA |
| | STGTGPGSSPSASTGTGPGASPGTSSTGSPGTPGSGTASSSPGSSTPSGATGSPGSSPSASTGT |
| | GPGSSPSASTGTGPGASPGTSSTGSPGASPGTSSTGSPGSSTPSGATGSPGSSPSASTGTGPGA |
| | SPGTSSTGSPGSSPSASTGTGPGTPGSGTASSSPGSSTPSGATGSPPVLKRHQAEITRTTLQSD |
| | QEEIDYDDTISVEMKKEDFDIYDEDENQSPRSFQKKTRHYFIAAVERLWDYGMSSSPHVLR |
| | NRAQSGSVPQFKKVVFQEFTDGSFTQPLYRGELNEHLGLLGPYIRAEVEDNIMVTFRNQAS |
| | RPYSFYSSLISYEEDQRQGAEPRKNFVKPNETKTYFWKVQHHMAPTKDEFDCKAWAYFSD |
| | VDLEKDVHSGLIGPLLVCHTNTLNPAHGRQVTVQEFALFFTIFDETKSWYFTENMERNCRA |
| | PCNIQMEDPTFKENYRFHAINGYIMDTLPGLVMAQDQRIRWYLLSMGSNENIHSIHFSGHVF |
| | TVRKKEEYKMALYNLYPGVFETVEMLPSKAGIWRVECLIGEHLHAGMSTLFLVYSNKCQT |
| | PLGMASGHIRDFQITASGQYGQWAPKLARLHYSGSINAWSTKEPFSWIKVDLLAPMIIHGIK |
| | TQGARQKFSSLYISQFIIMYSLDGKKWQTYRGNSTGTLMVFFGNVDSSGIKHNIFNPPIIARY |
| | IRLHPTHYSIRSTLRMELMGCDLNSCSMPLGMESKAISDAQITASSYFTNMFATWSPSKARL |
| | HLQGRSNAWRPQVNNPKEWLQVDFQKTMKVTGVTTQGVKSLLTSMYVKEFLISSSQDGH |
| | QWTLFFQNGKVKVFQGNQDSFTPVVNSLDPPLLTRYLRIHPQSWVHQIALRMEVLGCEAQ |
| | DLYGAGSPGAETAPGASPGTSSTGSPGASPGTSSTGSPGTPGSGTASSSPGSSTPSGATGSPG |
| | TPGSGTASSSPGSSTPSGATGSPGTPGSGTASSSPGSSTPSGATGSPGSSTPSGATGSPGSSPSA |
| | STGTGPGSSPSASTGTGPGASPGTSSTGSPGTPGSGTASSSPGSSTPSGATGSPGSSPSASTGT |
| | GPGSSPSASTGTGPGASPGTSSTGSPGASPGTSSTGSPGSSTPSGATGSPGSSPSASTGTGPGA |
| | SPGTSSTGSPGSSPSASTGTGPGTPGSGTASSSPGSSTPSGATGSGAETAEQKLISEEDLSPATG |
| FVIII | ATRRYYLGAVELSWDYMQSDLGELPVDARFPPRVPKSFPFNTSVVYKKTLFVEFTDHLFNI |
| BDD10 | AKPRPPWMGLLGPTIQAEVYDTVVITLKNMASHPVSLHAVGVSYWKASEGAEYDDQTSQ |
| (A1-S743)- | REKEDDKVFPGGSHTYVWQVLKENGPMASDPLCLTYSYLSHVDLVKDLNSGLIGALLVCR |
| AG288_2- | EGSLAKEKTQTLHKFILLFAVFDEGKSWHSETKNSLMQDRDAASARAWPKMHTVNGYVN |
| (Q1638- | RSLPGLIGCHRKSVYWHVIGMGTTPEVHSIFLEGHTFLVRNHRQASLEISPITFLTAQTLLMD |
| Y2332)- | LGQFLLFCHISSHQHDGMEAYVKVDSCPEEPQLRMKNNEEAEDYDDDLTDSEMDVVRFDD |
| AG288_2 | DNSPSFIQIRSVAKKHPKTWVHYIAAEEEDWDYAPLVLAPDDRSYKSQYLNNGPQRIGRKY |
| | KKVRFMAYTDETFKTREAIQHESGILGPLLYGEVGDTLLIIFKNQASRPYNIYPHGITDVRPL |
| | YSRRLPKGVKHLKDFPILPGEIFKYKWTVTVEDGPTKSDPRCLTRYYSSFVNMERDLASGLI |
| | GPLLICYKESVDQRGNQIMSDKRNVILFSVFDENRSWYLTENIQRFLPNPAGVQLEDPEFQA |
| | SNIMHSINGYVFDSLQLSVCLHEVAYWYILSIGAQTDFLSVFFSGYTFKHKMVYEDTLTLFP |
| | FSGETVFMSMENPGLWILGCHNSDFRNRGMTALLKVSSCDKNTGDYYEDSYEDISAYLLS |
| | KNNAIEPRSFSGPGASPGTSSTGSPGASPGTSSTGSPGTPGSGTASSSPGSSTPSGATGSPGTP |
| | GSGTASSSPGSSTPSGATGSPGTPGSGTASSSPGSSTPSGATGSPGSSTPSGATGSPGSSPSAST |
| | GTGPGSSPSASTGTGPGASPGTSSTGSPGTPGSGTASSSPGSSTPSGATGSPGSSPSASTGTGP |
| | GSSPSASTGTGPGASPGTSSTGSPGASPGTSSTGSPGSSTPSGATGSPGSSPSASTGTGPGASP |
| | GTSSTGSPGSSPSASTGTGPGTPGSGTASSSPGSSTPSGATGSQNPPVLKRHQAEITRTTLQSD |
| | QEEIDYDDTISVEMKKEDFDIYDEDENQSPRSFQKKTRHYFIAAVERLWDYGMSSSPHVLR |
| | NRAQSGSVPQFKKVVFQEFTDGSFTQPLYRGELNEHLGLLGPYIRAEVEDNIMVTFRNQAS |
| | RPYSFYSSLISYEEDQRQGAEPRKNFVKPNETKTYFWKVQHHMAPTKDEFDCKAWAYFSD |
| | VDLEKDVHSGLIGPLLVCHTNTLNPAHGRQVTVQEFALFFTIFDETKSWYFTENMERNCRA |
| | PCNIQMEDPTFKENYRFHAINGYIMDTLPGLVMAQDQRIRWYLLSMGSNENIHSIHFSGHVF |
| | TVRKKEEYKMALYNLYPGVFETVEMLPSKAGIWRVECLIGEHLHAGMSTLFLVYSNKCQT |
| | PLGMASGHIRDFQITASGQYGQWAPKLARLHYSGSINAWSTKEPFSWIKVDLLAPMIIHGIK |
| | TQGARQKFSSLYISQFIIMYSLDGKKWQTYRGNSTGTLMVFFGNVDSSGIKHNIFNPPIIARY |
| | IRLHPTHYSIRSTLRMELMGCDLNSCSMPLGMESKAISDAQITASSYFTNMFATWSPSKARL |
| | HLQGRSNAWRPQVNNPKEWLQVDFQKTMKVTGVTTQGVKSLLTSMYVKEFLISSSQDGH |
| | QWTLFFQNGKVKVFQGNQDSFTPVVNSLDPPLLTRYLRIHPQSWVHQIALRMEVLGCEAQ |
| | DLYGAGSPGAETAPGASPGTSSTGSPGASPGTSSTGSPGTPGSGTASSSPGSSTPSGATGSPG |
| | TPGSGTASSSPGSSTPSGATGSPGTPGSGTASSSPGSSTPSGATGSPGSSTPSGATGSPGSSPSA |
| | STGTGPGSSPSASTGTGPGASPGTSSTGSPGTPGSGTASSSPGSSTPSGATGSPGSSPSASTGT |
| | GPGSSPSASTGTGPGASPGTSSTGSPGASPGTSSTGSPGSSTPSGATGSPGSSPSASTGTGPGA |
| | SPGTSSTGSPGSSPSASTGTGPGTPGSGTASSSPGSSTPSGATGSGAETAEQKLISEEDLSPATG |

Sequence name reflects N- to C-terminus configuration of the FVIII segments (amino acid spanning numbers relative to mature sequence) and XTEN components

TABLE 51
Exemplary CFXTEN comprising FVIII, cleavage sequences and XTEN sequences (SEQ
ID NOS 1555-1590, respectively, in order of appearance)

| CFXTEN | |
|---|---|
| Name | Amino Acid Sequence |
| SP-AE288- | MQIELSTCFFLCLLRFCFSGTSESATPESGPGSEPATSGSETPGTSESATPESGPGSEPATSGSETP |
| CS-L- | GTSESATPESGPGTSTEPSEGSAPGSPAGSPTSTEEGTSESATPESGPGSEPATSGSETPGTSESA |
| (FVIII_1- | TPESGPGSPAGSPTSTEEGSPAGSPTSTEEGTSTEPSEGSAPGTSESATPESGPGTSESATPESGP |
| 745)-AE288- | GTSESATPESGPGSEPATSGSETPGSEPATSGSETPGSPAGSPTSTEEGTSTEPSEGSAPGTSTEPS |
| (FVIII_1686- | EGSAPGSEPATSGSETPGTSESATPESGPGTSTEPSEGSAPQSPRSFQGPEGPSATRRYYLGAVE |
| 2332)-L- | LSWDYMQSDLGELPVDARFPPRVPKSFPFNTSVVYKKTLFVEFTVHLFNIAKPRPPWMGLLG |
| CS-AE288 | PTIQAEVYDTVVITLKNMASHPVSLHAVGVSYWKASEGAEYDDQTSQREKEDDKVFPGGSH |
| | TYVWQVLKENGPMASDPLCLTYSYLSHVDLVKDLNSGLIGALLVCREGSLAKEKTQTLHKFI |
| | LLFAVFDEGKSWHSETKNSLMQDRDAASARAWPKMHTVNGYVNRSLPGLIGCHRKSVYWH |
| | VIGMGTTPEVHSIFLEGHTFLVRNHRQASLEISPITFLTAQTLLMDLGQFLLFCHISSHQHDGM |
| | EAYVKVDSCPEEPQLRMKNNEEAEDYDDDLTDSEMDVVRFDDDNSPSFIQIRSVAKKHPKT |
| | WVHYIAAEEEDWDYAPLVLAPDDRSYKSQYLNNGPQRIGRKYKKVRFMAYTDETFKTREAI |
| | QHESGILGPLLYGEVGDTLLIIFKNQASRPYNIYPHGITDVRPLYSRRLPKGVKHLKDFPILPGEI |
| | FKYKWTVTVEDGPTKSDPRCLTRYYSSFVNMERDLASGLIGPLLICYKESVDQRGNQIMSDK |
| | RNVILFSVFDENRSWYLTENIQRFLPNPAGVQLEDPEFQASNIMHSINGYVFDSLQLSVCLHEV |
| | AYWYILSIGAQTDFLSVFFSGYTFKHKMVYEDTLTLFPFSGETVFMSMENPGLWILGCHNSDF |
| | RNRGMTALLKVSSCDKNTGDYYEDSYEDISAYLLSKNNAIEPRSFSQNGTSESATPESGPGSEP |
| | ATSGSETPGTSESATPESGPGSEPATSGSETPGTSESATPESGPGTSTEPSEGSAPGSPAGSPTST |
| | EEGTSESATPESGPGSEPATSGSETPGTSESATPESGPGSPAGSPTSTEEGSPAGSPTSTEEGTST |
| | EPSEGSAPGTSESATPESGPGTSESATPESGPGTSESATPESGPGSEPATSGSETPGSEPATSGSE |
| | TPGSPAGSPTSTEEGTSTEPSEGSAPGTSTEPSEGSAPGSEPATSGSETPGTSESATPESGPGTST |
| | EPSEGSAPQSPRSFQKKTRHYFIAAVERLWDYGMSSSPHVLRNRAQSGSVPQFKKVVFQEFTD |
| | GSFTQPLYRGELNEHLGLLGPYIRAEVEDNIMVTFRNQASRPYSFYSSLISYEEDQRQGAEPRK |
| | NFVKPNETKTYFWKVQHHMAPTKDEFDCKAWAYFSDVDLEKDVHSGLIGPLLVCHTNTLNP |
| | AHGRQVTVQEFALFFTIFDETKSWYFTENMERNCRAPCNIQMEDPTFKENYRFHAINGYIMD |
| | TLPGLVMAQDQRIRWYLLSMGSNENIHSIHFSGHVFTVRKKEEYKMALYNLYPGVFETVEML |
| | PSKAGIWRVECLIGEHLHAGMSTLFLVYSNKCQTPLGMASGHIRDFQITASGQYGQWAPKLA |
| | RLHYSGSINAWSTKEPFSWIKVDLLAPMIIHGIKTQGARQKFSSLYISQFIIMYSLDGKKWQTY |
| | RGNSTGTLMVFFGNVDSSGIKHNIFNPPIIARYIRLHPTHYSIRSTLRMELMGCDLNSCSMPLG |
| | MESKAISDAQITASSYFTNMFATWSPSKARLHLQGRSNAWRPQVNNPKEWLQVDFQKTMKV |
| | TGVTTQGVKSLLTSMYVKEFLISSSQDGHQWTLFFQNGKVKVFQGNQDSFTPVVNSLDPPLL |
| | TRYLRIHPQSWVHQIALRMEVLGCEAQDLYGPEGPSQSPRSFQGTSESATPESGPGSEPATSGS |
| | ETPGTSESATPESGPGSEPATSGSETPGTSESATPESGPGTSTEPSEGSAPGSPAGSPTSTEEGTS |
| | ESATPESGPGSEPATSGSETPGTSESATPESGPGSPAGSPTSTEEGSPAGSPTSTEEGTSTEPSEGS |
| | APGTSESATPESGPGTSESATPESGPGTSESATPESGPGSEPATSGSETPGSEPATSGSETPGSPA |
| | GSPTSTEEGTSTEPSEGSAPGTSTEPSEGSAPGSEPATSGSETPGTSESATPESGPGTSTEPSEGS |
| | AP |
| SP-AE576- | MQIELSTCFFLCLLRFCFSGSPAGSPTSTEEGTSESATPESGPGTSTEPSEGSAPGSPAGSPTSTEE |
| CS-L- | GTSTEPSEGSAPGTSTEPSEGSAPGTSESATPESGPGSEPATSGSETPGSEPATSGSETPGSPAGS |
| (FVIII_1- | PTSTEEGTSESATPESGPGTSTEPSEGSAPGTSTEPSEGSAPGSPAGSPTSTEEGTSTEPSEGSAP |
| 745)-AE576- | GTSTEPSEGSAPGTSESATPESGPGTSTEPSEGSAPGTSESATPESGPGSEPATSGSETPGTSTEPS |
| (FVIII_1686- | EGSAPGTSTEPSEGSAPGTSESATPESGPGTSESATPESGPGSPAGSPTSTEEGTSESATPESGPG |
| 2332)-L- | SEPATSGSETPGTSESATPESGPGTSTEPSEGSAPGTSTEPSEGSAPGTSTEPSEGSAPGTSTEPSE |
| CS-AE288 | GSAPGTSTEPSEGSAPGTSTEPSEGSAPGSPAGSPTSTEEGTSTEPSEGSAPGTSESATPESGPGS |
| | EPATSGSETPGTSESATPESGPGSEPATSGSETPGTSESATPESGPGTSTEPSEGSAPGTSESATP |
| | ESGPGSPAGSPTSTEEGSPAGSPTSTEEGSPAGSPTSTEEGTSESATPESGPGTSTEPSEGSAPQS |
| | PRSFQGPSGPATRRYYLGAVELSWDYMQSDLGELPVDARFPPRVPKSFPFNTSVVYKKTLFV |
| | EFTVHLFNIAKPRPPWMGLLGPTIQAEVYDTVVITLKNMASHPVSLHAVGVSYWKASEGAEY |
| | DDQTSQREKEDDKVFPGGSHTYVWQVLKENGPMASDPLCLTYSYLSHVDLVKDLNSGLIGA |
| | LLVCREGSLAKEKTQTLHKFILLFAVFDEGKSWHSETKNSLMQDRDAASARAWPKMHTVNG |
| | YVNRSLPGLIGCHRKSVYWHVIGMGTTPEVHSIFLEGHTFLVRNHRQASLEISPITFLTAQTLL |
| | MDLGQFLLFCHISSHQHDGMEAYVKVDSCPEEPQLRMKNNEEAEDYDDDLTDSEMDVVRFD |
| | DDNSPSFIQIRSVAKKHPKTWVHYIAAEEEDWDYAPLVLAPDDRSYKSQYLNNGPQRIGRKY |
| | KKVRFMAYTDETFKTREAIQHESGILGPLLYGEVGDTLLIIFKNQASRPYNIYPHGITDVRPLY |
| | SRRLPKGVKHLKDFPILPGEIFKYKWTVTVEDGPTKSDPRCLTRYYSSFVNMERDLASGLIGP |
| | LLICYKESVDQRGNQIMSDKRNVILFSVFDENRSWYLTENIQRFLPNPAGVQLEDPEFQASNI |
| | MHSINGYVFDSLQLSVCLHEVAYWYILSIGAQTDFLSVFFSGYTFKHKMVYEDTLTLFPFSGE |
| | TVFMSMENPGLWILGCHNSDFRNRGMTALLKVSSCDKNTGDYYEDSYEDISAYLLSKNNAIE |
| | PRSFSQNGSPAGSPTSTEEGTSESATPESGPGTSTEPSEGSAPGSPAGSPTSTEEGTSTEPSEGSA |
| | PGTSTEPSEGSAPGTSESATPESGPGSEPATSGSETPGSEPATSGSETPGSPAGSPTSTEEGTSES |
| | ATPESGPGTSTEPSEGSAPGTSTEPSEGSAPGSPAGSPTSTEEGTSTEPSEGSAPGTSTEPSEGSA |
| | PGTSESATPESGPGTSTEPSEGSAPGTSESATPESGPGSEPATSGSETPGTSTEPSEGSAPGTSTEP |
| | SEGSAPGTSESATPESGPGTSESATPESGPGSPAGSPTSTEEGTSESATPESGPGSEPATSGSETP |
| | GTSESATPESGPGTSTEPSEGSAPGTSTEPSEGSAPGTSTEPSEGSAPGTSTEPSEGSAPGTSTEPS |
| | EGSAPGTSTEPSEGSAPGSPAGSPTSTEEGTSTEPSEGSAPGTSESATPESGPGSEPATSGSETPG |
| | TSESATPESGPGSEPATSGSETPGTSESATPESGPGTSTEPSEGSAPGTSESATPESGPGSPAGSP |
| | TSTEEGSPAGSPTSTEEGSPAGSPTSTEEGTSESATPESGPGTSTEPSEGSAPQSPRSFQKKTRHY |
| | FIAAVERLWDYGMSSSPHVLRNRAQSGSVPQFKKVVFQEFTDGSFTQPLYRGELNEHLGLLG |
| | PYIRAEVEDNIMVTFRNQASRPYSFYSSLISYEEDQRQGAEPRKNFVKPNETKTYFWKVQHH |
| | MAPTKDEFDCKAWAYFSDVDLEKDVHSGLIGPLLVCHTNTLNPAHGRQVTVQEFALFFTIFD |
| | ETKSWYFTENMERNCRAPCNIQMEDPTFKENYRFHAINGYIMDTLPGLVMAQDQRIRWYLLS |
| | MGSNENIHSIHFSGHVFTVRKKEEYKMALYNLYPGVFETVEMLPSKAGIWRVECLIGEHLHA |
| | GMSTLFLVYSNKCQTPLGMASGHIRDFQITASGQYGQWAPKLARLHYSGSINAWSTKEPFSW |
| | IKVDLLAPMIIHGIKTQGARQKFSSLYISQFIIMYSLDGKKWQTYRGNSTGTLMVFFGNVDSSG |
| | IKHNIFNPPIIARYIRLHPTHYSIRSTLRMELMGCDLNSCSMPLGMESKAISDAQITASSYFTNM |
| | FATWSPSKARLHLQGRSNAWRPQVNNPKEWLQVDFQKTMKVTGVTTQGVKSLLTSMYVKE |
| | FLISSSQDGHQWTLFFQNGKVKVFQGNQDSFTPVVNSLDPPLLTRYLRIHPQSWVHQIALRME |
| | VLGCEAQDLYGPEGPSQSPRSFQGTSESATPESGPGSEPATSGSETPGTSESATPESGPGSEPAT |
| | SGSETPGTSESATPESGPGTSTEPSEGSAPGSPAGSPTSTEEGTSESATPESGPGSEPATSGSETP |
| | GTSESATPESGPGSPAGSPTSTEEGSPAGSPTSTEEGTSTEPSEGSAPGTSESATPESGPGTSESA |
| | TPESGPGTSESATPESGPGSEPATSGSETPGSEPATSGSETPGSPAGSPTSTEEGTSTEPSEGSAP |
| | GTSTEPSEGSAPGSEPATSGSETPGTSESATPESGPGTSTEPSEGSAP |
| SP- | MQIELSTCFFLCLLRFCFSATRRYYLGAVELSWDYMQSDLGELPVDARFPPRVPKSFPFNTSV |
| (FVIII_1- | VYKKTLFVEFTVHLFNIAKPRPPWMGLLGPTIQAEVYDTVVITLKNMASHPVSLHAVGVSYW |
| 745)- | KASEGAEYDDQTSQREKEDDKVFPGGSHTYVWQVLKENGPMASDPLCLTYSYLSHVDLVK |
| AE576- | DLNSGLIGALLVCREGSLAKEKTQTLHKFILLFAVFDEGKSWHSETKNSLMQDRDAASARAW |
| (FVIII_1686- | PKMHTVNGYVNRSLPGLIGCHRKSVYWHVIGMGTTPEVHSIFLEGHTFLVRNHRQASLEISPI |
| 2332)-L- | TFLTAQTLLMDLGQFLLFCHISSHQHDGMEAYVKVDSCPEEPQLRMKNNEEAEDYDDDLTD |
| CS-AE576 | SEMDVVRFDDDNSPSFIQIRSVAKKHPKTWVHYIAAEEEDWDYAPLVLAPDDRSYKSQYLNN |
| | GPQRIGRKYKKVRFMAYTDETFKTREAIQHESGILGPLLYGEVGDTLLIIFKNQASRPYNIYPH |
| | GITDVRPLYSRRLPKGVKHLKDFPILPGEIFKYKWTVTVEDGPTKSDPRCLTRYYSSFVNMER |
| | DLASGLIGPLLICYKESVDQRGNQIMSDKRNVILFSVFDENRSWYLTENIQRFLPNPAGVQLED |
| | PEFQASNIMHSINGYVFDSLQLSVCLHEVAYWYILSIGAQTDFLSVFFSGYTFKHKMVYEDTL |
| | TLFPFSGETVFMSMENPGLWILGCHNSDFRNRGMTALLKVSSCDKNTGDYYEDSYEDISAYL |
| | LSKNNAIEPRSFSQNGSPAGSPTSTEEGTSESATPESGPGTSTEPSEGSAPGSPAGSPTSTEEGTS |
| | TEPSEGSAPGTSTEPSEGSAPGTSESATPESGPGSEPATSGSETPGSEPATSGSETPGSPAGSPTS |
| | TEEGTSESATPESGPGTSTEPSEGSAPGTSTEPSEGSAPGSPAGSPTSTEEGTSTEPSEGSAPGTS |
| | TEPSEGSAPGTSESATPESGPGTSTEPSEGSAPGTSESATPESGPGSEPATSGSETPGTSTEPSEGS |
| | APGTSTEPSEGSAPGTSESATPESGPGTSESATPESGPGSPAGSPTSTEEGTSESATPESGPGSEP |
| | ATSGSETPGTSESATPESGPGTSTEPSEGSAPGTSTEPSEGSAPGTSTEPSEGSAPGTSTEPSEGS |
| | APGTSTEPSEGSAPGTSTEPSEGSAPGSPAGSPTSTEEGTSTEPSEGSAPGTSESATPESGPGSEP |
| | ATSGSETPGTSESATPESGPGSEPATSGSETPGTSESATPESGPGTSTEPSEGSAPGTSESATPES |
| | GPGSPAGSPTSTEEGSPAGSPTSTEEGSPAGSPTSTEEGTSESATPESGPGTSTEPSEGSAPQSPR |
| | SFQKKTRHYFIAAVERLWDYGMSSSPHVLRNRAQSGSVPQFKKVVFQEFTDGSFTQPLYRGE |
| | LNEHLGLLGPYIRAEVEDNIMVTFRNQASRPYSFYSSLISYEEDQRQGAEPRKNFVKPNETKT |
| | YFWKVQHHMAPTKDEFDCKAWAYFSDVDLEKDVHSGLIGPLLVCHTNTLNPAHGRQVTVQ |
| | EFALFFTIFDETKSWYFTENMERNCRAPCNIQMEDPTFKENYRFHAINGYIMDTLPGLVMAQD |
| | QRIRWYLLSMGSNENIHSIHFSGHVFTVRKKEEYKMALYNLYPGVFETVEMLPSKAGIWRVE |
| | CLIGEHLHAGMSTLFLVYSNKCQTPLGMASGHIRDFQITASGQYGQWAPKLARLHYSGSINA |
| | WSTKEPFSWIKVDLLAPMIIHGIKTQGARQKFSSLYISQFIIMYSLDGKKWQTYRGNSTGTLM |
| | VFFGNVDSSGIKHNIFNPPIIARYIRLHPTHYSIRSTLRMELMGCDLNSCSMPLGMESKAISDAQ |
| | ITASSYFTNMFATWSPSKARLHLQGRSNAWRPQVNNPKEWLQVDFQKTMKVTGVTTQGVK |
| | SLLTSMYVKEFLISSSQDGHQWTLFFQNGKVKVFQGNQDSFTPVVNSLDPPLLTRYLRIHPQS |
| | WVHQIALRMEVLGCEAQDLYGPEGPSQSPRSFQGSPAGSPTSTEEGTSESATPESGPGTSTEPS |
| | EGSAPGSPAGSPTSTEEGTSTEPSEGSAPGTSTEPSEGSAPGTSESATPESGPGSEPATSGSETPG |
| | SEPATSGSETPGSPAGSPTSTEEGTSESATPESGPGTSTEPSEGSAPGTSTEPSEGSAPGSPAGSP |
| | TSTEEGTSTEPSEGSAPGTSTEPSEGSAPGTSESATPESGPGTSTEPSEGSAPGTSESATPESGPG |
| | SEPATSGSETPGTSTEPSEGSAPGTSTEPSEGSAPGTSESATPESGPGTSESATPESGPGSPAGSP |
| | TSTEEGTSESATPESGPGSEPATSGSETPGTSESATPESGPGTSTEPSEGSAPGTSTEPSEGSAPG |
| | TSTEPSEGSAPGTSTEPSEGSAPGTSTEPSEGSAPGTSTEPSEGSAPGSPAGSPTSTEEGTSTEPSE |
| | GSAPGTSESATPESGPGSEPATSGSETPGTSESATPESGPGSEPATSGSETPGTSESATPESGPGT |
| | STEPSEGSAPGTSESATPESGPGSPAGSPTSTEEGSPAGSPTSTEEGSPAGSPTSTEEGTSESATPE |
| | SGPGTSTEPSEGSAP |
| SP-AE576- | MQIELSTCFFLCLLRFCFSGSPAGSPTSTEEGTSESATPESGPGTSTEPSEGSAPGSPAGSPTSTEE |
| CS-L- | GTSTEPSEGSAPGTSTEPSEGSAPGTSESATPESGPGSEPATSGSETPGSEPATSGSETPGSPAGS |
| (FVIII_1- | PTSTEEGTSESATPESGPGTSTEPSEGSAPGTSTEPSEGSAPGSPAGSPTSTEEGTSTEPSEGSAP |
| 745)- | GTSTEPSEGSAPGTSESATPESGPGTSTEPSEGSAPGTSESATPESGPGSEPATSGSETPGTSTEPS |
| AE576- | EGSAPGTSTEPSEGSAPGTSESATPESGPGTSESATPESGPGSPAGSPTSTEEGTSESATPESGPG |
| (FVIII_1686- | SEPATSGSETPGTSESATPESGPGTSTEPSEGSAPGTSTEPSEGSAPGTSTEPSEGSAPGTSTEPSE |
| 2332) | GSAPGTSTEPSEGSAPGTSTEPSEGSAPGSPAGSPTSTEEGTSTEPSEGSAPGTSESATPESGPGS |
| | EPATSGSETPGTSESATPESGPGSEPATSGSETPGTSESATPESGPGTSTEPSEGSAPGTSESATP |
| | ESGPGSPAGSPTSTEEGSPAGSPTSTEEGSPAGSPTSTEEGTSESATPESGPGTSTEPSEGSAPQS |
| | PRSFQGPEGPSATRRYYLGAVELSWDYMQSDLGELPVDARFPPRVPKSFPFNTSVVYKKTLF |
| | VEFTVHLFNIAKPRPPWMGLLGPTIQAEVYDTVVITLKNMASHPVSLHAVGVSYWKASEGAE |
| | YDDQTSQREKEDDKVFPGGSHTYVWQVLKENGPMASDPLCLTYSYLSHVDLVKDLNSGLIG |
| | ALLVCREGSLAKEKTQTLHKFILLFAVFDEGKSWHSETKNSLMQDRDAASARAWPKMHTVN |
| | GYVNRSLPGLIGCHRKSVYWHVIGMGTTPEVHSIFLEGHTFLVRNHRQASLEISPITFLTAQTL |
| | LMDLGQFLLFCHISSHQHDGMEAYVKVDSCPEEPQLRMKNNEEAEDYDDDLTDSEMDVVRF |
| | DDDNSPSFIQIRSVAKKHPKTWVHYIAAEEEDWDYAPLVLAPDDRSYKSQYLNNGPQRIGRK |
| | YKKVRFMAYTDETFKTREAIQHESGILGPLLYGEVGDTLLIIFKNQASRPYNIYPHGITDVRPL |
| | YSRRLPKGVKHLKDFPILPGEIFKYKWTVTVEDGPTKSDPRCLTRYYSSFVNMERDLASGLIG |
| | PLLICYKESVDQRGNQIMSDKRNVILFSVFDENRSWYLTENIQRFLPNPAGVQLEDPEFQASNI |
| | MHSINGYVFDSLQLSVCLHEVAYWYILSIGAQTDFLSVFFSGYTFKHKMVYEDTLTLFPFSGE |
| | TVFMSMENPGLWILGCHNSDFRNRGMTALLKVSSCDKNTGDYYEDSYEDISAYLLSKNNAIE |
| | PRSFSQNGSPAGSPTSTEEGTSESATPESGPGTSTEPSEGSAPGSPAGSPTSTEEGTSTEPSEGSA |
| | PGTSTEPSEGSAPGTSESATPESGPGSEPATSGSETPGSEPATSGSETPGSPAGSPTSTEEGTSES |
| | ATPESGPGTSTEPSEGSAPGTSTEPSEGSAPGSPAGSPTSTEEGTSTEPSEGSAPGTSTEPSEGSA |
| | PGTSESATPESGPGTSTEPSEGSAPGTSESATPESGPGSEPATSGSETPGTSTEPSEGSAPGTSTEP |
| | SEGSAPGTSESATPESGPGTSESATPESGPGSPAGSPTSTEEGTSESATPESGPGSEPATSGSETP |
| | GTSESATPESGPGTSTEPSEGSAPGTSTEPSEGSAPGTSTEPSEGSAPGTSTEPSEGSAPGTSTEPS |
| | EGSAPGTSTEPSEGSAPGSPAGSPTSTEEGTSTEPSEGSAPGTSESATPESGPGSEPATSGSETPG |
| | TSESATPESGPGSEPATSGSETPGTSESATPESGPGTSTEPSEGSAPGTSESATPESGPGSPAGSP |
| | TSTEEGSPAGSPTSTEEGSPAGSPTSTEEGTSESATPESGPGTSTEPSEGSAPQSPRSFQKKTRHY |
| | FIAAVERLWDYGMSSSPHVLRNRAQSGSVPQFKKVVFQEFTDGSFTQPLYRGELNEHLGLLG |
| | PYIRAEVEDNIMVTFRNQASRPYSFYSSLISYEEDQRQGAEPRKNFVKPNETKTYFWKVQHH |
| | MAPTKDEFDCKAWAYFSDVDLEKDVHSGLIGPLLVCHTNTLNPAHGRQVTVQEFALFFTIFD |
| | ETKSWYFTENMERNCRAPCNIQMEDPTFKENYRFHAINGYIMDTLPGLVMAQDQRIRWYLLS |
| | MGSNENIHSIHFSGHVFTVRKKEEYKMALYNLYPGVFETVEMLPSKAGIWRVECLIGEHLHA |
| | GMSTLFLVYSNKCQTPLGMASGHIRDFQITASGQYGQWAPKLARLHYSGSINAWSTKEPFSW |
| | IKVDLLAPMIIHGIKTQGARQKFSSLYISQFIIMYSLDGKKWQTYRGNSTGTLMVFFGNVDSSG |
| | IKHNIFNPPIIARYIRLHPTHYSIRSTLRMELMGCDLNSCSMPLGMESKAISDAQITASSYFTNM |
| | FATWSPSKARLHLQGRSNAWRPQVNNPKEWLQVDFQKTMKVTGVTTQGVKSLLTSMYVKE |
| | FLISSSQDGHQWTLFFQNGKVKVFQGNQDSFTPVVNSLDPPLLTRYLRIHPQSWVHQIALRME |
| | VLGCEAQDLY |
| SP-AE576- | MQIELSTCFFLCLLRFCFSGSPAGSPTSTEEGTSESATPESGPGTSTEPSEGSAPGSPAGSPTSTEE |
| CS-L- | GTSTEPSEGSAPGTSTEPSEGSAPGTSESATPESGPGSEPATSGSETPGSEPATSGSETPGSPAGS |
| (FVIII_1- | PTSTEEGTSESATPESGPGTSTEPSEGSAPGTSTEPSEGSAPGSPAGSPTSTEEGTSTEPSEGSAP |
| 743)- | GTSTEPSEGSAPGTSESATPESGPGTSTEPSEGSAPGTSESATPESGPGSEPATSGSETPGTSTEPS |
| AE288- | EGSAPGTSTEPSEGSAPGTSESATPESGPGTSESATPESGPGSPAGSPTSTEEGTSESATPESGPG |
| (FVIII_1686- | SEPATSGSETPGTSESATPESGPGTSTEPSEGSAPGTSTEPSEGSAPGTSTEPSEGSAPGTSTEPSE |
| 2332)-L- | GSAPGTSTEPSEGSAPGTSTEPSEGSAPGSPAGSPTSTEEGTSTEPSEGSAPGTSESATPESGPGS |
| CS-AE576 | EPATSGSETPGTSESATPESGPGSEPATSGSETPGTSESATPESGPGTSTEPSEGSAPGTSESATP |
| | ESGPGSPAGSPTSTEEGSPAGSPTSTEEGSPAGSPTSTEEGTSESATPESGPGTSTEPSEGSAPIEP |
| | RSPSGSPGATRRYYLGAVELSWDYMQSDLGELPVDARFPPRVPKSFPFNTSVVYKKTLFVEFT |
| | VHLFNIAKPRPPWMGLLGPTIQAEVYDTVVITLKNMASHPVSLHAVGVSYWKASEGAEYDD |
| | QTSQREKEDDKVFPGGSHTYVWQVLKENGPMASDPLCLTYSYLSHVDLVKDLNSGLIGALL |
| | VCREGSLAKEKTQTLHKFILLFAVFDEGKSWHSETKNSLMQDRDAASARAWPKMHTVNGY |
| | VNRSLPGLIGCHRKSVYWHVIGMGTTPEVHSIFLEGHTFLVRNHRQASLEISPITFLTAQTLLM |
| | DLGQFLLFCHISSHQHDGMEAYVKVDSCPEEPQLRMKNNEEAEDYDDDLTDSEMDVVRFDD |
| | DNSPSFIQIRSVAKKHPKTWVHYIAAEEEDWDYAPLVLAPDDRSYKSQYLNNGPQRIGRKYK |
| | KVRFMAYTDETFKTREAIQHESGILGPLLYGEVGDTLLIIFKNQASRPYNIYPHGITDVRPLYSR |
| | RLPKGVKHLKDFPILPGEIFKYKWTVTVEDGPTKSDPRCLTRYYSSFVNMERDLASGLIGPLLI |
| | CYKESVDQRGNQIMSDKRNVILFSVFDENRSWYLTENIQRFLPNPAGVQLEDPEFQASNIMHS |
| | INGYVFDSLQLSVCLHEVAYWYILSIGAQTDFLSVFFSGYTFKHKMVYEDTLTLFPFSGETVF |
| | MSMENPGLWILGCHNSDFRNRGMTALLKVSSCDKNTGDYYEDSYEDISAYLLSKNNAIEPRS |
| | FSGTSESATPESGPGSEPATSGSETPGTSESATPESGPGSEPATSGSETPGTSESATPESGPGTSTE |
| | PSEGSAPGSPAGSPTSTEEGTSESATPESGPGSEPATSGSETPGTSESATPESGPGSPAGSPTSTE |
| | EGSPAGSPTSTEEGTSTEPSEGSAPGTSESATPESGPGTSESATPESGPGTSESATPESGPGSEPA |
| | TSGSETPGSEPATSGSETPGSPAGSPTSTEEGTSTEPSEGSAPGTSTEPSEGSAPGSEPATSGSETP |
| | GTSESATPESGPGTSTEPSEGSAPQSPRSFQKKTRHYFIAAVERLWDYGMSSSPHVLRNRAQS |
| | GSVPQFKKVVFQEFTDGSFTQPLYRGELNEHLGLLGPYIRAEVEDNIMVTFRNQASRPYSFYS |
| | SLISYEEDQRQGAEPRKNFVKPNETKTYFWKVQHHMAPTKDEFDCKAWAYFSDVDLEKDV |
| | HSGLIGPLLVCHTNTLNPAHGRQVTVQEFALFFTIFDETKSWYFTENMERNCRAPCNIQMEDP |
| | TFKENYRFHAINGYIMDTLPGLVMAQDQRIRWYLLSMGSNENIHSIHFSGHVFTVRKKEEYK |
| | MALYNLYPGVFETVEMLPSKAGIWRVECLIGEHLHAGMSTLFLVYSNKCQTPLGMASGHIRD |
| | FQITASGQYGQWAPKLARLHYSGSINAWSTKEPFSWIKVDLLAPMIIHGIKTQGARQKFSSLYI |
| | SQFIIMYSLDGKKWQTYRGNSTGTLMVFFGNVDSSGIKHNIFNPPIIARYIRLHPTHYSIRSTLR |
| | MELMGCDLNSCSMPLGMESKAISDAQITASSYFTNMFATWSPSKARLHLQGRSNAWRPQVN |
| | NPKEWLQVDFQKTMKVTGVTTQGVKSLLTSMYVKEFLISSSQDGHQWTLFFQNGKVKVFQG |
| | NQDSFTPVVNSLDPPLLTRYLRIHPQSWVHQIALRMEVLGCEAQDLYGSPGIEPRSPSGSPAGS |
| | PTSTEEGTSESATPESGPGTSTEPSEGSAPGSPAGSPTSTEEGTSTEPSEGSAPGTSTEPSEGSAP |
| | GTSESATPESGPGSEPATSGSETPGSEPATSGSETPGSPAGSPTSTEEGTSESATPESGPGTSTEPS |
| | EGSAPGTSTEPSEGSAPGSPAGSPTSTEEGTSTEPSEGSAPGTSTEPSEGSAPGTSESATPESGPG |
| | TSTEPSEGSAPGTSESATPESGPGSEPATSGSETPGTSTEPSEGSAPGTSTEPSEGSAPGTSESATP |
| | ESGPGTSESATPESGPGSPAGSPTSTEEGTSESATPESGPGSEPATSGSETPGTSESATPESGPGT |
| | STEPSEGSAPGTSTEPSEGSAPGTSTEPSEGSAPGTSTEPSEGSAPGTSTEPSEGSAPGTSTEPSEG |
| | SAPGSPAGSPTSTEEGTSTEPSEGSAPGTSESATPESGPGSEPATSGSETPGTSESATPESGPGSE |
| | PATSGSETPGTSESATPESGPGTSTEPSEGSAPGTSESATPESGPGSPAGSPTSTEEGSPAGSPTS |
| | TEEGSPAGSPTSTEEGTSESATPESGPGTSTEPSEGSAP |
| SP-AG288- | MQIELSTCFFLCLLRFCFSPGASPGTSSTGSPGASPGTSSTGSPGTPGSGTASSSPGSSTPSGATG |
| CS-L- | SPGTPGSGTASSSPGSSTPSGATGSPGTPGSGTASSSPGSSTPSGATGSPGSSTPSGATGSPGSSP |
| (FVIII_1- | SASTGTGPGSSPSASTGTGPGASPGTSSTGSPGTPGSGTASSSPGSSTPSGATGSPGSSPSASTGT |
| 743)- | GPGSSPSASTGTGPGASPGTSSTGSPGASPGTSSTGSPGSSTPSGATGSPGSSPSASTGTGPGASP |
| AG576- | GTSSTGSPGSSPSASTGTGPGTPGSGTASSSPGSSTPSGATGSIEPRSPSGSPGATRRYYLGAVEL |
| (FVIII_1686- | SWDYMQSDLGELPVDARFPPRVPKSFPFNTSVVYKKTLFVEFTVHLFNIAKPRPPWMGLLGP |
| 2332)-L- | TIQAEVYDTVVITLKNMASHPVSLHAVGVSYWKASEGAEYDDQTSQREKEDDKVFPGGSHT |
| CS-AG288 | YVWQVLKENGPMASDPLCLTYSYLSHVDLVKDLNSGLIGALLVCREGSLAKEKTQTLHKFIL |
| | LFAVFDEGKSWHSETKNSLMQDRDAASARAWPKMHTVNGYVNRSLPGLIGCHRKSVYWHV |
| | IGMGTTPEVHSIFLEGHTFLVRNHRQASLEISPITFLTAQTLLMDLGQFLLFCHISSHQHDGME |
| | AYVKVDSCPEEPQLRMKNNEEAEDYDDDLTDSEMDVVRFDDDNSPSFIQIRSVAKKHPKTW |
| | VHYIAAEEEDWDYAPLVLAPDDRSYKSQYLNNGPQRIGRKYKKVRFMAYTDETFKTREAIQ |
| | HESGILGPLLYGEVGDTLLIIFKNQASRPYNIYPHGITDVRPLYSRRLPKGVKHLKDFPILPGEIF |
| | KYKWTVTVEDGPTKSDPRCLTRYYSSFVNMERDLASGLIGPLLICYKESVDQRGNQIMSDKR |
| | NVILFSVFDENRSWYLTENIQRFLPNPAGVQLEDPEFQASNIMHSINGYVFDSLQLSVCLHEVA |
| | YWYILSIGAQTDFLSVFFSGYTFKHKMVYEDTLTLFPFSGETVFMSMENPGLWILGCHNSDFR |
| | NRGMTALLKVSSCDKNTGDYYEDSYEDISAYLLSKNNAIEPRSFSPGTPGSGTASSSPGSSTPS |
| | GATGSPGSSPSASTGTGPGSSPSASTGTGPGSSTPSGATGSPGSSTPSGATGSPGASPGTSSTGSP |
| | GASPGTSSTGSPGASPGTSSTGSPGTPGSGTASSSPGASPGTSSTGSPGASPGTSSTGSPGASPGT |
| | SSTGSPGSSPSASTGTGPGTPGSGTASSSPGASPGTSSTGSPGASPGTSSTGSPGASPGTSSTGSP |
| | GSSTPSGATGSPGSSTPSGATGSPGASPGTSSTGSPGTPGSGTASSSPGSSTPSGATGSPGSSTPS |
| | GATGSPGSSTPSGATGSPGSSPSASTGTGPGASPGTSSTGSPGASPGTSSTGSPGTPGSGTASSSP |
| | GASPGTSSTGSPGASPGTSSTGSPGASPGTSSTGSPGASPGTSSTGSPGTPGSGTASSSPGSSTPS |
| | GATGSPGTPGSGTASSSPGSSTPSGATGSPGTPGSGTASSSPGSSTPSGATGSPGSSTPSGATGSP |
| | GSSPSASTGTGPGSSPSASTGTGPGASPGTSSTGSPGTPGSGTASSSPGSSTPSGATGSPGSSPSA |
| | STGTGPGSSPSASTGTGPGASPGTSSTGSQSPRSFQKKTRHYFIAAVERLWDYGMSSSPHVLR |
| | NRAQSGSVPQFKKVVFQEFTDGSFTQPLYRGELNEHLGLLGPYIRAEVEDNIMVTFRNQASRP |
| | YSFYSSLISYEEDQRQGAEPRKNFVKPNETKTYFWKVQHHMAPTKDEFDCKAWAYFSDVDL |
| | EKDVHSGLIGPLLVCHTNTLNPAHGRQVTVQEFALFFTIFDETKSWYFTENMERNCRAPCNIQ |
| | MEDPTFKENYRFHAINGYIMDTLPGLVMAQDQRIRWYLLSMGSNENIHSIHFSGHVFTVRKK |
| | EEYKMALYNLYPGVFETVEMLPSKAGIWRVECLIGEHLHAGMSTLFLVYSNKCQTPLGMAS |
| | GHIRDFQITASGQYGQWAPKLARLHYSGSINAWSTKEPFSWIKVDLLAPMIIHGIKTQGARQK |
| | FSSLYISQFIIMYSLDGKKWQTYRGNSTGTLMVFFGNVDSSGIKHNIFNPPIIARYIRLHPTHYSI |
| | RSTLRMELMGCDLNSCSMPLGMESKAISDAQITASSYFTNMFATWSPSKARLHLQGRSNAW |
| | RPQVNNPKEWLQVDFQKTMKVTGVTTQGVKSLLTSMYVKEFLISSSQDGHQWTLFFQNGKV |
| | KVFQGNQDSFTPVVNSLDPPLLTRYLRIHPQSWVHQIALRMEVLGCEAQDLYGSPGQSPRSFQ |
| | PGASPGTSSTGSPGASPGTSSTGSPGTPGSGTASSSPGSSTPSGATGSPGTPGSGTASSSPGSSTP |
| | SGATGSPGTPGSGTASSSPGSSTPSGATGSPGSSTPSGATGSPGSSPSASTGTGPGSSPSASTGTG |
| | PGASPGTSSTGSPGTPGSGTASSSPGSSTPSGATGSPGSSPSASTGTGPGSSPSASTGTGPGASPG |
| | TSSTGSPGASPGTSSTGSPGSSTPSGATGSPGSSPSASTGTGPGASPGTSSTGSPGSSPSASTGTG |
| | PGTPGSGTASSSPGSSTPSGATGS |
| SP-AG576- | MQIELSTCFFLCLLRFCFSPGTPGSGTASSSPGSSTPSGATGSPGSSPSASTGTGPGSSPSASTGT |
| CS-L- | GPGSSTPSGATGSPGSSTPSGATGSPGASPGTSSTGSPGASPGTSSTGSPGASPGTSSTGSPGTPG |
| (FVIII_1- | SGTASSSPGASPGTSSTGSPGASPGTSSTGSPGASPGTSSTGSPGSSPSASTGTGPGTPGSGTASS |
| 745)- | SPGASPGTSSTGSPGASPGTSSTGSPGASPGTSSTGSPGSSTPSGATGSPGSSTPSGATGSPGASP |
| AG288- | GTSSTGSPGTPGSGTASSSPGSSTPSGATGSPGSSTPSGATGSPGSSTPSGATGSPGSSPSASTGT |
| (FVIII_1686- | GPGASPGTSSTGSPGASPGTSSTGSPGTPGSGTASSSPGASPGTSSTGSPGASPGTSSTGSPGASP |
| 2332)-L- | GTSSTGSPGASPGTSSTGSPGTPGSGTASSSPGSSTPSGATGSPGTPGSGTASSSPGSSTPSGATG |
| CS-AE576 | SPGTPGSGTASSSPGSSTPSGATGSPGSSTPSGATGSPGSSPSASTGTGPGSSPSASTGTGPGASP |
| | GTSSTGSPGTPGSGTASSSPGSSTPSGATGSPGSSPSASTGTGPGSSPSASTGTGPGASPGTSSTG |
| | SQSPRSFQGSPGATRRYYLGAVELSWDYMQSDLGELPVDARFPPRVPKSFPFNTSVVYKKTLF |
| | VEFTVHLFNIAKPRPPWMGLLGPTIQAEVYDTVVITLKNMASHPVSLHAVGVSYWKASEGAE |
| | YDDQTSQREKEDDKVFPGGSHTYVWQVLKENGPMASDPLCLTYSYLSHVDLVKDLNSGLIG |
| | ALLVCREGSLAKEKTQTLHKFILLFAVFDEGKSWHSETKNSLMQDRDAASARAWPKMHTVN |
| | GYVNRSLPGLIGCHRKSVYWHVIGMGTTPEVHSIFLEGHTFLVRNHRQASLEISPITFLTAQTL |
| | LMDLGQFLLFCHISSHQHDGMEAYVKVDSCPEEPQLRMKNNEEAEDYDDDLTDSEMDVVRF |
| | DDDNSPSFIQIRSVAKKHPKTWVHYIAAEEEDWDYAPLVLAPDDRSYKSQYLNNGPQRIGRK |
| | YKKVRFMAYTDETFKTREAIQHESGILGPLLYGEVGDTLLIIFKNQASRPYNIYPHGITDVRPL |
| | YSRRLPKGVKHLKDFPILPGEIFKYKWTVTVEDGPTKSDPRCLTRYYSSFVNMERDLASGLIG |
| | PLLICYKESVDQRGNQIMSDKRNVILFSVFDENRSWYLTENIQRFLPNPAGVQLEDPEFQASNI |
| | MHSINGYVFDSLQLSVCLHEVAYWYILSIGAQTDFLSVFFSGYTFKHKMVYEDTLTLFPFSGE |
| | TVFMSMENPGLWILGCHNSDFRNRGMTALLKVSSCDKNTGDYYEDSYEDISAYLLSKNNAIE |
| | PRSFSQNPGASPGTSSTGSPGASPGTSSTGSPGTPGSGTASSSPGSSTPSGATGSPGTPGSGTASS |
| | SPGSSTPSGATGSPGTPGSGTASSSPGSSTPSGATGSPGSSTPSGATGSPGSSPSASTGTGPGSSP |
| | SASTGTGPGASPGTSSTGSPGTPGSGTASSSPGSSTPSGATGSPGSSPSASTGTGPGSSPSASTGT |
| | GPGASPGTSSTGSPGASPGTSSTGSPGSSTPSGATGSPGSSPSASTGTGPGASPGTSSTGSPGSSP |
| | SASTGTGPGTPGSGTASSSPGSSTPSGATGSQSPRSFQKKTRHYFIAAVERLWDYGMSSSPHVL |
| | RNRAQSGSVPQFKKVVFQEFTDGSFTQPLYRGELNEHLGLLGPYIRAEVEDNIMVTFRNQASR |
| | PYSFYSSLISYEEDQRQGAEPRKNFVKPNETKTYFWKVQHHMAPTKDEFDCKAWAYFSDVD |
| | LEKDVHSGLIGPLLVCHTNTLNPAHGRQVTVQEFALFFTIFDETKSWYFTENMERNCRAPCNI |
| | QMEDPTFKENYRFHAINGYIMDTLPGLVMAQDQRIRWYLLSMGSNENIHSIHFSGHVFTVRK |
| | KEEYKMALYNLYPGVFETVEMLPSKAGIWRVECLIGEHLHAGMSTLFLVYSNKCQTPLGMA |
| | SGHIRDFQITASGQYGQWAPKLARLHYSGSINAWSTKEPFSWIKVDLLAPMIIHGIKTQGARQ |
| | KFSSLYISQFIIMYSLDGKKWQTYRGNSTGTLMVFFGNVDSSGIKHNIFNPPIIARYIRLHPTHY |
| | SIRSTLRMELMGCDLNSCSMPLGMESKAISDAQITASSYFTNMFATWSPSKARLHLQGRSNA |
| | WRPQVNNPKEWLQVDFQKTMKVTGVTTQGVKSLLTSMYVKEFLISSSQDGHQWTLFFQNG |
| | KVKVFQGNQDSFTPVVNSLDPPLLTRYLRIHPQSWVHQIALRMEVLGCEAQDLYGSPGQSPR |
| | SFQGSPAGSPTSTEEGTSESATPESGPGTSTEPSEGSAPGSPAGSPTSTEEGTSTEPSEGSAPGTS |
| | TEPSEGSAPGTSESATPESGPGSEPATSGSETPGSEPATSGSETPGSPAGSPTSTEEGTSESATPES |
| | GPGTSTEPSEGSAPGTSTEPSEGSAPGSPAGSPTSTEEGTSTEPSEGSAPGTSTEPSEGSAPGTSE |
| | SATPESGPGTSTEPSEGSAPGTSESATPESGPGSEPATSGSETPGTSTEPSEGSAPGTSTEPSEGS |
| | APGTSESATPESGPGTSESATPESGPGSPAGSPTSTEEGTSESATPESGPGSEPATSGSETPGTSE |
| | SATPESGPGTSTEPSEGSAPGTSTEPSEGSAPGTSTEPSEGSAPGTSTEPSEGSAPGTSTEPSEGS |
| | APGTSTEPSEGSAPGSPAGSPTSTEEGTSTEPSEGSAPGTSESATPESGPGSEPATSGSETPGTSE |
| | SATPESGPGSEPATSGSETPGTSESATPESGPGTSTEPSEGSAPGTSESATPESGPGSPAGSPTST |
| | EEGSPAGSPTSTEEGSPAGSPTSTEEGTSESATPESGPGTSTEPSEGSAP |
| SP-(FVIII_1- | MQIELSTCFFLCLLRFCFSATRRYYLGAVELSWDYMQSDLGELPVDARFPPRVPKSFPFNTSV |
| 743)-AG576- | VYKKTLFVEFTVHLFNIAKPRPPWMGLLGPTIQAEVYDTVVITLKNMASHPVSLHAVGVSYW |
| (FVIII_1686- | KASEGAEYDDQTSQREKEDDKVFPGGSHTYVWQVLKENGPMASDPLCLTYSYLSHVDLVK |
| 2332)-L- | DLNSGLIGALLVCREGSLAKEKTQTLHKFILLFAVFDEGKSWHSETKNSLMQDRDAASARAW |
| CS-AG576 | PKMHTVNGYVNRSLPGLIGCHRKSVYWHVIGMGTTPEVHSIFLEGHTFLVRNHRQASLEISPI |
| | TFLTAQTLLMDLGQFLLFCHISSHQHDGMEAYVKVDSCPEEPQLRMKNNEEAEDYDDDLTD |
| | SEMDVVRFDDDNSPSFIQIRSVAKKHPKTWVHYIAAEEEDWDYAPLVLAPDDRSYKSQYLNN |
| | GPQRIGRKYKKVRFMAYTDETFKTREAIQHESGILGPLLYGEVGDTLLIIFKNQASRPYNIYPH |
| | GITDVRPLYSRRLPKGVKHLKDFPILPGEIFKYKWTVTVEDGPTKSDPRCLTRYYSSFVNMER |
| | DLASGLIGPLLICYKESVDQRGNQIMSDKRNVILFSVFDENRSWYLTENIQRFLPNPAGVQLED |
| | PEFQASNIMHSINGYVFDSLQLSVCLHEVAYWYILSIGAQTDFLSVFFSGYTFKHKMVYEDTL |
| | TLFPFSGETVFMSMENPGLWILGCHNSDFRNRGMTALLKVSSCDKNTGDYYEDSYEDISAYL |
| | LSKNNAIEPRSFSPGTPGSGTASSSPGSSTPSGATGSPGSSPSASTGTGPGSSPSASTGTGPGSST |
| | PSGATGSPGSSTPSGATGSPGASPGTSSTGSPGASPGTSSTGSPGASPGTSSTGSPGTPGSGTASS |
| | SPGASPGTSSTGSPGASPGTSSTGSPGASPGTSSTGSPGSSPSASTGTGPGTPGSGTASSSPGASP |
| | GTSSTGSPGASPGTSSTGSPGASPGTSSTGSPGSSTPSGATGSPGSSTPSGATGSPGASPGTSSTG |
| | SPGTPGSGTASSSPGSSTPSGATGSPGSSTPSGATGSPGSSTPSGATGSPGSSPSASTGTGPGASP |
| | GTSSTGSPGASPGTSSTGSPGTPGSGTASSSPGASPGTSSTGSPGASPGTSSTGSPGASPGTSSTG |
| | SPGASPGTSSTGSPGTPGSGTASSSPGSSTPSGATGSPGTPGSGTASSSPGSSTPSGATGSPGTPG |
| | SGTASSSPGSSTPSGATGSPGSSTPSGATGSPGSSPSASTGTGPGSSPSASTGTGPGASPGTSSTG |
| | SPGTPGSGTASSSPGSSTPSGATGSPGSSPSASTGTGPGSSPSASTGTGPGASPGTSSTGSQSPRS |
| | FQKKTRHYFIAAVERLWDYGMSSSPHVLRNRAQSGSVPQFKKVVFQEFTDGSFTQPLYRGEL |
| | NEHLGLLGPYIRAEVEDNIMVTFRNQASRPYSFYSSLISYEEDQRQGAEPRKNFVKPNETKTY |
| | FWKVQHHMAPTKDEFDCKAWAYFSDVDLEKDVHSGLIGPLLVCHTNTLNPAHGRQVTVQE |
| | FALFFTIFDETKSWYFTENMERNCRAPCNIQMEDPTFKENYRFHAINGYIMDTLPGLVMAQD |
| | QRIRWYLLSMGSNENIHSIHFSGHVFTVRKKEEYKMALYNLYPGVFETVEMLPSKAGIWRVE |
| | CLIGEHLHAGMSTLFLVYSNKCQTPLGMASGHIRDFQITASGQYGQWAPKLARLHYSGSINA |
| | WSTKEPFSWIKVDLLAPMIIHGIKTQGARQKFSSLYISQFIIMYSLDGKKWQTYRGNSTGTLM |
| | VFFGNVDSSGIKHNIFNPPIIARYIRLHPTHYSIRSTLRMELMGCDLNSCSMPLGMESKAISDAQ |
| | ITASSYFTNMFATWSPSKARLHLQGRSNAWRPQVNNPKEWLQVDFQKTMKVTGVTTQGVK |
| | SLLTSMYVKEFLISSSQDGHQWTLFFQNGKVKVFQGNQDSFTPVVNSLDPPLLTRYLRIHPQS |
| | WVHQIALRMEVLGCEAQDLYGSPGQSPRSFQPGTPGSGTASSSPGSSTPSGATGSPGSSPSAST |
| | GTGPGSSPSASTGTGPGSSTPSGATGSPGSSTPSGATGSPGASPGTSSTGSPGASPGTSSTGSPG |
| | ASPGTSSTGSPGTPGSGTASSSPGASPGTSSTGSPGASPGTSSTGSPGASPGTSSTGSPGSSPSAS |
| | TGTGPGTPGSGTASSSPGASPGTSSTGSPGASPGTSSTGSPGASPGTSSTGSPGSSTPSGATGSPG |
| | SSTPSGATGSPGASPGTSSTGSPGTPGSGTASSSPGSSTPSGATGSPGSSTPSGATGSPGSSTPSG |
| | ATGSPGSSPSASTGTGPGASPGTSSTGSPGASPGTSSTGSPGTPGSGTASSSPGASPGTSSTGSPG |
| | ASPGTSSTGSPGASPGTSSTGSPGASPGTSSTGSPGTPGSGTASSSPGSSTPSGATGSPGTPGSGT |
| | ASSSPGSSTPSGATGSPGTPGSGTASSSPGSSTPSGATGSPGSSTPSGATGSPGSSPSASTGTGPG |
| | SSPSASTGTGPGASPGTSSTGSPGTPGSGTASSSPGSSTPSGATGSPGSSPSASTGTGPGSSPSAS |
| | TGTGPGASPGTSSTGS |
| SP-AG288- | MQIELSTCFFLCLLRFCFSPGASPGTSSTGSPGASPGTSSTGSPGTPGSGTASSSPGSSTPSGATG |
| CS-L- | SPGTPGSGTASSSPGSSTPSGATGSPGTPGSGTASSSPGSSTPSGATGSPGSSTPSGATGSPGSSP |
| (FVIII_1- | SASTGTGPGSSPSASTGTGPGASPGTSSTGSPGTPGSGTASSSPGSSTPSGATGSPGSSPSASTGT |
| 743)- | GPGSSPSASTGTGPGASPGTSSTGSPGASPGTSSTGSPGSSTPSGATGSPGSSPSASTGTGPGASP |
| AG288- | GTSSTGSPGSSPSASTGTGPGTPGSGTASSSPGSSTPSGATGSQSPRSFQGPSGPATRRYYLGAV |
| (FVIII_1686- | ELSWDYMQSDLGELPVDARFPPRVPKSFPFNTSVVYKKTLFVEFTVHLFNIAKPRPPWMGLL |
| 2332)-L- | GPTIQAEVYDTVVITLKNMASHPVSLHAVGVSYWKASEGAEYDDQTSQREKEDDKVFPGGS |
| CS-AE288 | HTYVWQVLKENGPMASDPLCLTYSYLSHVDLVKDLNSGLIGALLVCREGSLAKEKTQTLHK |
| | FILLFAVFDEGKSWHSETKNSLMQDRDAASARAWPKMHTVNGYVNRSLPGLIGCHRKSVYW |
| | HVIGMGTTPEVHSIFLEGHTFLVRNHRQASLEISPITFLTAQTLLMDLGQFLLFCHISSHQHDG |
| | MEAYVKVDSCPEEPQLRMKNNEEAEDYDDDLTDSEMDVVRFDDDNSPSFIQIRSVAKKHPK |
| | TWVHYIAAEEEDWDYAPLVLAPDDRSYKSQYLNNGPQRIGRKYKKVRFMAYTDETFKTREA |
| | IQHESGILGPLLYGEVGDTLLIIFKNQASRPYNIYPHGITDVRPLYSRRLPKGVKHLKDFPILPGE |
| | IFKYKWTVTVEDGPTKSDPRCLTRYYSSFVNMERDLASGLIGPLLICYKESVDQRGNQIMSDK |
| | RNVILFSVFDENRSWYLTENIQRFLPNPAGVQLEDPEFQASNIMHSINGYVFDSLQLSVCLHEV |
| | AYWYILSIGAQTDFLSVFFSGYTFKHKMVYEDTLTLFPFSGETVFMSMENPGLWILGCHNSDF |
| | RNRGMTALLKVSSCDKNTGDYYEDSYEDISAYLLSKNNAIEPRSFSPGASPGTSSTGSPGASPG |
| | TSSTGSPGTPGSGTASSSPGSSTPSGATGSPGTPGSGTASSSPGSSTPSGATGSPGTPGSGTASSS |
| | PGSSTPSGATGSPGSSTPSGATGSPGSSPSASTGTGPGSSPSASTGTGPGASPGTSSTGSPGTPGS |
| | GTASSSPGSSTPSGATGSPGSSPSASTGTGPGSSPSASTGTGPGASPGTSSTGSPGASPGTSSTGS |
| | PGSSTPSGATGSPGSSPSASTGTGPGASPGTSSTGSPGSSPSASTGTGPGTPGSGTASSSPGSSTP |
| | SGATGSQSPRSFQKKTRHYFIAAVERLWDYGMSSSPHVLRNRAQSGSVPQFKKVVFQEFTDG |
| | SFTQPLYRGELNEHLGLLGPYIRAEVEDNIMVTFRNQASRPYSFYSSLISYEEDQRQGAEPRKN |
| | FVKPNETKTYFWKVQHHMAPTKDEFDCKAWAYFSDVDLEKDVHSGLIGPLLVCHTNTLNPA |
| | HGRQVTVQEFALFFTIFDETKSWYFTENMERNCRAPCNIQMEDPTFKENYRFHAINGYIMDTL |
| | PGLVMAQDQRIRWYLLSMGSNENIHSIHFSGHVFTVRKKEEYKMALYNLYPGVFETVEMLPS |
| | KAGIWRVECLIGEHLHAGMSTLFLVYSNKCQTPLGMASGHIRDFQITASGQYGQWAPKLARL |
| | HYSGSINAWSTKEPFSWIKVDLLAPMIIHGIKTQGARQKFSSLYISQFIIMYSLDGKKWQTYRG |
| | NSTGTLMVFFGNVDSSGIKHNIFNPPIIARYIRLHPTHYSIRSTLRMELMGCDLNSCSMPLGME |
| | SKAISDAQITASSYFTNMFATWSPSKARLHLQGRSNAWRPQVNNPKEWLQVDFQKTMKVTG |
| | VTTQGVKSLLTSMYVKEFLISSSQDGHQWTLFFQNGKVKVFQGNQDSFTPVVNSLDPPLLTR |
| | YLRIHPQSWVHQIALRMEVLGCEAQDLYGPSGPQSPRSFQGTSESATPESGPGSEPATSGSETP |
| | GTSESATPESGPGSEPATSGSETPGTSESATPESGPGTSTEPSEGSAPGSPAGSPTSTEEGTSESA |
| | TPESGPGSEPATSGSETPGTSESATPESGPGSPAGSPTSTEEGSPAGSPTSTEEGTSTEPSEGSAP |
| | GTSESATPESGPGTSESATPESGPGTSESATPESGPGSEPATSGSETPGSEPATSGSETPGSPAGS |
| | PTSTEEGTSTEPSEGSAPGTSTEPSEGSAPGSEPATSGSETPGTSESATPESGPGTSTEPSEGSAP |
| SP-AE576- | MQIELSTCFFLCLLRFCFSGSPAGSPTSTEEGTSESATPESGPGTSTEPSEGSAPGSPAGSPTSTEE |
| CS-L- | GTSTEPSEGSAPGTSTEPSEGSAPGTSESATPESGPGSEPATSGSETPGSEPATSGSETPGSPAGS |
| (FVIII_1- | PTSTEEGTSESATPESGPGTSTEPSEGSAPGTSTEPSEGSAPGSPAGSPTSTEEGTSTEPSEGSAP |
| 743)- | GTSTEPSEGSAPGTSESATPESGPGTSTEPSEGSAPGTSESATPESGPGSEPATSGSETPGTSTEPS |
| AG576- | EGSAPGTSTEPSEGSAPGTSESATPESGPGTSESATPESGPGSPAGSPTSTEEGTSESATPESGPG |
| (FVIII_1686- | SEPATSGSETPGTSESATPESGPGTSTEPSEGSAPGTSTEPSEGSAPGTSTEPSEGSAPGTSTEPSE |
| 2332) | GSAPGTSTEPSEGSAPGTSTEPSEGSAPGSPAGSPTSTEEGTSTEPSEGSAPGTSESATPESGPGS |
| | EPATSGSETPGTSESATPESGPGSEPATSGSETPGTSESATPESGPGTSTEPSEGSAPGTSESATP |
| | ESGPGSPAGSPTSTEEGSPAGSPTSTEEGSPAGSPTSTEEGTSESATPESGPGTSTEPSEGSAPQS |
| | PRSFQGSPGATRRYYLGAVELSWDYMQSDLGELPVDARFPPRVPKSFPFNTSVVYKKTLFVE |
| | FTVHLFNIAKPRPPWMGLLGPTIQAEVYDTVVITLKNMASHPVSLHAVGVSYWKASEGAEYD |
| | DQTSQREKEDDKVFPGGSHTYVWQVLKENGPMASDPLCLTYSYLSHVDLVKDLNSGLIGAL |
| | LVCREGSLAKEKTQTLHKFILLFAVFDEGKSWHSETKNSLMQDRDAASARAWPKMHTVNGY |
| | VNRSLPGLIGCHRKSVYWHVIGMGTTPEVHSIFLEGHTFLVRNHRQASLEISPITFLTAQTLLM |
| | DLGQFLLFCHISSHQHDGMEAYVKVDSCPEEPQLRMKNNEEAEDYDDDLTDSEMDVVRFDD |
| | DNSPSFIQIRSVAKKHPKTWVHYIAAEEEDWDYAPLVLAPDDRSYKSQYLNNGPQRIGRKYK |
| | KVRFMAYTDETFKTREAIQHESGILGPLLYGEVGDTLLIIFKNQASRPYNIYPHGITDVRPLYSR |
| | RLPKGVKHLKDFPILPGEIFKYKWTVTVEDGPTKSDPRCLTRYYSSFVNMERDLASGLIGPLLI |
| | CYKESVDQRGNQIMSDKRNVILFSVFDENRSWYLTENIQRFLPNPAGVQLEDPEFQASNIMHS |
| | INGYVFDSLQLSVCLHEVAYWYILSIGAQTDFLSVFFSGYTFKHKMVYEDTLTLFPFSGETVF |
| | MSMENPGLWILGCHNSDFRNRGMTALLKVSSCDKNTGDYYEDSYEDISAYLLSKNNAIEPRS |
| | FSPGTPGSGTASSSPGSSTPSGATGSPGSSPSASTGTGPGSSPSASTGTGPGSSTPSGATGSPGSS |
| | TPSGATGSPGASPGTSSTGSPGASPGTSSTGSPGASPGTSSTGSPGTPGSGTASSSPGASPGTSST |
| | GSPGASPGTSSTGSPGASPGTSSTGSPGSSPSASTGTGPGTPGSGTASSSPGASPGTSSTGSPGAS |
| | PGTSSTGSPGASPGTSSTGSPGSSTPSGATGSPGSSTPSGATGSPGASPGTSSTGSPGTPGSGTAS |
| | SSPGSSTPSGATGSPGSSTPSGATGSPGSSTPSGATGSPGSSPSASTGTGPGASPGTSSTGSPGAS |
| | PGTSSTGSPGTPGSGTASSSPGASPGTSSTGSPGASPGTSSTGSPGASPGTSSTGSPGASPGTSST |
| | GSPGTPGSGTASSSPGSSTPSGATGSPGTPGSGTASSSPGSSTPSGATGSPGTPGSGTASSSPGSS |
| | TPSGATGSPGSSTPSGATGSPGSSPSASTGTGPGSSPSASTGTGPGASPGTSSTGSPGTPGSGTAS |
| | SSPGSSTPSGATGSPGSSPSASTGTGPGSSPSASTGTGPGASPGTSSTGSQSPRSFQKKTRHYFIA |
| | AVERLWDYGMSSSPHVLRNRAQSGSVPQFKKVVFQEFTDGSFTQPLYRGELNEHLGLLGPYI |
| | RAEVEDNIMVTFRNQASRPYSFYSSLISYEEDQRQGAEPRKNFVKPNETKTYFWKVQHHMAP |
| | TKDEFDCKAWAYFSDVDLEKDVHSGLIGPLLVCHTNTLNPAHGRQVTVQEFALFFTIFDETKS |
| | WYFTENMERNCRAPCNIQMEDPTFKENYRFHAINGYIMDTLPGLVMAQDQRIRWYLLSMGS |
| | NENIHSIHFSGHVFTVRKKEEYKMALYNLYPGVFETVEMLPSKAGIWRVECLIGEHLHAGMS |
| | TLFLVYSNKCQTPLGMASGHIRDFQITASGQYGQWAPKLARLHYSGSINAWSTKEPFSWIKV |
| | DLLAPMIIHGIKTQGARQKFSSLYISQFIIMYSLDGKKWQTYRGNSTGTLMVFFGNVDSSGIKH |
| | NIFNPPIIARYIRLHPTHYSIRSTLRMELMGCDLNSCSMPLGMESKAISDAQITASSYFTNMFAT |
| | WSPSKARLHLQGRSNAWRPQVNNPKEWLQVDFQKTMKVTGVTTQGVKSLLTSMYVKEFLI |
| | SSSQDGHQWTLFFQNGKVKVFQGNQDSFTPVVNSLDPPLLTRYLRIHPQSWVHQIALRMEVL |
| | GCEAQDLY |
| FVIII | ATRRYYLGAVELSWDYMQSDLGELPVDARFPPRVPKSFPFNTSVVYKKTLFVEFTVHLFNIA |
| BDD2 | KPRPPWMGLLGPTIQAEVYDTVVITLKNMASHPVSLHAVGVSYWKASEGAEYDDQTSQREK |
| S367- | EDDKVFPGGSHTYVWQVLKENGPMASDPLCLTYSYLSHVDLVKDLNSGLIGALLVCREGSL |
| FXIa- | AKEKTQTLHKFILLFAVFDEGKSWHSETKNSLMQDRDAASARAWPKMHTVNGYVNSSLPGL |
| AE42- | IGCHRKSVYWHVIGMGTTPEVHSIFLEGHTFLVRNHRQASLEISPITFLTAQTLLMDLGQFLLF |
| F368- | CHISSHQHDGMEAYVKVDSCPEEPQLRMKNNEEAEDYDDDLTDSEMDVVRFDDDNSPSKLT |
| Y2332- | RAETGEPSEGSAPGSPAGSPTSTEEGTSESATPESGPGSEPATSGSGFIQIRSVAKKHPKTWVHY |
| FXIa- | IAAEEEDWDYAPLVLAPDDRSYKSQYLNNGPQRIGRKYKKVRFMAYTDETFKTREAIQHESG |
| AE864 | ILGPLLYGEVGDTLLIIFKNQASRPYNIYPHGITDVRPLYSRRLPKGVKHLKDFPILPGEIFKYK |
| | WTVTVEDGPTKSDPRCLTRYYSSFVNMERDLASGLIGPLLICYKESVDQRGNQIMSDKRNVIL |
| | FSVFDENRSWYLTENIQRFLPNPAGVQLEDPEFQASNIMHSINGYVFDSLQLSVCLHEVAYWY |
| | ILSIGAQTDFLSVFFSGYTFKHKMVYEDTLTLFPFSGETVFMSMENPGLWILGCHNSDFRNRG |
| | MTALLKVSSCDKNTGDYYEDSYEDISAYLLSKNNAIEPRSFSQNPPVLKRHQREITRTTLQSD |
| | QEEIDYDDTISVEMKKEDFDIYDEDENQSPRSFQKKTRHYFIAAVERLWDYGMSSSPHVLRNR |
| | AQSGSVPQFKKVVFQEFTDGSFTQPLYRGELNEHLGLLGPYIRAEVEDNIMVTFRNQASRPYS |
| | FYSSLISYEEDQRQGAEPRKNFVKPNETKTYFWKVQHHMAPTKDEFDCKAWAYFSDVDLEK |
| | DVHSGLIGPLLVCHTNTLNPAHGRQVTVQEFALFFTIFDETKSWYFTENMERNCRAPCNIQME |
| | DPTFKENYRFHAINGYIMDTLPGLVMAQDQRIRWYLLSMGSNENIHSIHFSGHVFTVRKKEEY |
| | KMALYNLYPGVFETVEMLPSKAGIWRVECLIGEHLHAGMSTLFLVYSNKCQTPLGMASGHIR |
| | DFQITASGQYGQWAPKLARLHYSGSINAWSTKEPFSWIKVDLLAPMIIHGIKTQGARQKFSSL |
| | YISQFIIMYSLDGKKWQTYRGNSTGTLMVFFGNVDSSGIKHNIFNPPIIARYIRLHPTHYSIRSTL |
| | RMELMGCDLNSCSMPLGMESKAISDAQITASSYFTNMFATWTPSKARLHLQGRSNAWRPQV |
| | NNPKEWLQVDFQKTMKVTGVTTQGVKSLLTSMYVKEFLISSSQDGHQWTLFFQNGKVKVFQ |
| | GNQDSFTPVVNSLDPPLLTRYLRIHPQSWVHQIALRMEVLGCEAQDLYKLTRAETGGSPAGSP |
| | TSTEEGTSESATPESGPGTSTEPSEGSAPGSPAGSPTSTEEGTSTEPSEGSAPGTSTEPSEGSAPG |
| | TSESATPESGPGSEPATSGSETPGSEPATSGSETPGSPAGSPTSTEEGTSESATPESGPGTSTEPSE |
| | GSAPGTSTEPSEGSAPGSPAGSPTSTEEGTSTEPSEGSAPGTSTEPSEGSAPGTSESATPESGPGT |
| | STEPSEGSAPGTSESATPESGPGSEPATSGSETPGTSTEPSEGSAPGTSTEPSEGSAPGTSESATPE |
| | SGPGTSESATPESGPGSPAGSPTSTEEGTSESATPESGPGSEPATSGSETPGTSESATPESGPGTS |
| | TEPSEGSAPGTSTEPSEGSAPGTSTEPSEGSAPGTSTEPSEGSAPGTSTEPSEGSAPGTSTEPSEGS |
| | APGSPAGSPTSTEEGTSTEPSEGSAPGTSESATPESGPGSEPATSGSETPGTSESATPESGPGSEP |
| | ATSGSETPGTSESATPESGPGTSTEPSEGSAPGTSESATPESGPGSPAGSPTSTEEGSPAGSPTST |
| | EEGSPAGSPTSTEEGTSESATPESGPGTSTEPSEGSAPGTSESATPESGPGSEPATSGSETPGTSE |
| | SATPESGPGSEPATSGSETPGTSESATPESGPGTSTEPSEGSAPGSPAGSPTSTEEGTSESATPES |
| | GPGSEPATSGSETPGTSESATPESGPGSPAGSPTSTEEGSPAGSPTSTEEGTSTEPSEGSAPGTSE |
| | SATPESGPGTSESATPESGPGTSESATPESGPGSEPATSGSETPGSEPATSGSETPGSPAGSPTST |
| | EEGTSTEPSEGSAPGTSTEPSEGSAPGSEPATSGSETPGTSESATPESGPGTSTEPSEGSAP |
| FVIII | ATRRYYLGAVELSWDYMQSDLGELPVDARFPPRVPKSFPFNTSVVYKKTLFVEFTVHLFNIA |
| BDD2 | KPRPPWMGLLGPTIQAEVYDTVVITLKNMASHPVSLHAVGVSYWKASEGAEYDDQTSQREK |
| N745- | EDDKVFPGGSHTYVWQVLKENGPMASDPLCLTYSYLSHVDLVKDLNSGLIGALLVCREGSL |
| FIXa- | AKEKTQTLHKFILLFAVFDEGKSWHSETKNSLMQDRDAASARAWPKMHTVNGYVNRSLPGL |
| AG288- | IGCHRKSVYWHVIGMGTTPEVHSIFLEGHTFLVRNHRQASLEISPITFLTAQTLLMDLGQFLLF |
| FIXa- | CHISSHQHDGMEAYVKVDSCPEEPQLRMKNNEEAEDYDDDLTDSEMDVVRFDDDNSPSFIQI |
| P1640- | RSVAKKHPKTWVHYIAAEEEDWDYAPLVLAPDDRSYKSQYLNNGPQRIGRKYKKVRFMAY |
| Y2332- | TDETFKTREAIQHESGILGPLLYGEVGDTLLIIFKNQASRPYNIYPHGITDVRPLYSRRLPKGVK |
| FIXa- | HLKDFPILPGEIFKYKWTVTVEDGPTKSDPRCLTRYYSSFVNMERDLASGLIGPLLICYKESVD |
| AG864 | QRGNQIMSDKRNVILFSVFDENRSWYLTENIQRFLPNPAGVQLEDPEFQASNIMHSINGYVFD |
| | SLQLSVCLHEVAYWYILSIGAQTDFLSVFFSGYTFKHKMVYEDTLTLFPFSGETVFMSMENPG |
| | LWILGCHNSDFRNRGMTALLKVSSCDKNTGDYYEDSYEDISAYLLSKNNAIEPRSFSQNPLGR |
| | IVGGPGASPGTSSTGSPGASPGTSSTGSPGTPGSGTASSSPGSSTPSGATGSPGTPGSGTASSSPG |
| | SSTPSGATGSPGTPGSGTASSSPGSSTPSGATGSPGSSTPSGATGSPGSSPSASTGTGPGSSPSAS |
| | TGTGPGASPGTSSTGSPGTPGSGTASSSPGSSTPSGATGSPGSSPSASTGTGPGSSPSASTGTGPG |
| | ASPGTSSTGSPGASPGTSSTGSPGSSTPSGATGSPGSSPSASTGTGPGASPGTSSTGSPGSSPSAS |
| | TGTGPGTPGSGTASSSPGSSTPSGATGSGPLGRIVGGPPVLKRHQREITRTTLQSDQEEIDYDDT |
| | ISVEMKKEDFDIYDEDENQSPRSFQKKTRHYFIAAVERLWDYGMSSSPHVLRNRAQSGSVPQ |
| | FKKVVFQEFTDGSFTQPLYRGELNEHLGLLGPYIRAEVEDNIMVTFRNQASRPYSFYSSLISYE |
| | EDQRQGAEPRKNFVKPNETKTYFWKVQHHMAPTKDEFDCKAWAYFSDVDLEKDVHSGLIG |
| | PLLVCHTNTLNPAHGRQVTVQEFALFFTIFDETKSWYFTENMERNCRAPCNIQMEDPTFKEN |
| | YRFHAINGYIMDTLPGLVMAQDQRIRWYLLSMGSNENIHSIHFSGHVFTVRKKEEYKMALYN |
| | LYPGVFETVEMLPSKAGIWRVECLIGEHLHAGMSTLFLVYSNKCQTPLGMASGHIRDFQITAS |
| | GQYGQWAPKLARLHYSGSINAWSTKEPFSWIKVDLLAPMIIHGIKTQGARQKFSSLYISQFIIM |
| | YSLDGKKWQTYRGNSTGTLMVFFGNVDSSGIKHNIFNPPIIARYIRLHPTHYSIRSTLRMELMG |
| | CDLNSCSMPLGMESKAISDAQITASSYFTNMFATWSPSKARLHLQGRSNAWRPQVNNPKEW |
| | LQVDFQKTMKVTGVTTQGVKSLLTSMYVKEFLISSSQDGHQWTLFFQNGKVKVFQGNQDSF |
| | TPVVNSLDPPLLTRYLRIHPQSWVHQIALRMEVLGCEAQDLYPLGRIVGGGASPGTSSTGSPG |
| | SSPSASTGTGPGSSPSASTGTGPGTPGSGTASSSPGSSTPSGATGSPGSSPSASTGTGPGASPGTS |
| | STGSPGTPGSGTASSSPGSSTPSGATGSPGTPGSGTASSSPGASPGTSSTGSPGASPGTSSTGSPG |
| | TPGSGTASSSPGSSTPSGATGSPGASPGTSSTGSPGTPGSGTASSSPGSSTPSGATGSPGSSPSAS |
| | TGTGPGSSPSASTGTGPGSSTPSGATGSPGSSTPSGATGSPGASPGTSSTGSPGASPGTSSTGSPG |
| | ASPGTSSTGSPGTPGSGTASSSPGASPGTSSTGSPGASPGTSSTGSPGASPGTSSTGSPGSSPSAS |
| | TGTGPGTPGSGTASSSPGASPGTSSTGSPGASPGTSSTGSPGASPGTSSTGSPGSSTPSGATGSPG |
| | SSTPSGATGSPGASPGTSSTGSPGTPGSGTASSSPGSSTPSGATGSPGSSTPSGATGSPGSSTPSG |
| | ATGSPGSSPSASTGTGPGASPGTSSTGSPGASPGTSSTGSPGTPGSGTASSSPGASPGTSSTGSPG |
| | ASPGTSSTGSPGASPGTSSTGSPGASPGTSSTGSPGTPGSGTASSSPGSSTPSGATGSPGTPGSGT |
| | ASSSPGSSTPSGATGSPGTPGSGTASSSPGSSTPSGATGSPGSSTPSGATGSPGSSPSASTGTGPG |
| | SSPSASTGTGPGASPGTSSTGSPGTPGSGTASSSPGSSTPSGATGSPGSSPSASTGTGPGSSPSAS |
| | TGTGPGASPGTSSTGSPGASPGTSSTGSPGSSTPSGATGSPGSSPSASTGTGPGASPGTSSTGSPG |
| | SSPSASTGTGPGTPGSGTASSSPGSSTPSGATGSPGSSTPSGATGSPGASPGTSSTGSP |
| FVIII | ATRRYYLGAVELSWDYMQSDLGELPVDARFPPRVPKSFPFNTSVVYKKTLFVEFTVHLFNIA |
| BDD2 | KPRPPWMGLLGPTIQAEVYDTVVITLKNMASHPVSLHAVGVSYWKASEGAEYDDQTSQREK |
| V128- | EDDKVLQVRIVGGGAPSPSASTGTGPGTPGSGTASSSPGSSTPSGATGSPGPSGPGLQVRIVGG |
| FVIIa- | FPGGSHTYVWQVLKENGPMASDPLCLTYSYLSHVDLVKDLNSGLIGALLVCREGSLAKEKTQ |
| AG42- | TLHKFILLFAVFDEGKSWHSETKNSLMQDRDAASARAWPKMHTVNGYVNRSLPGLIGCHRK |
| FVIIa- | SVYWHVIGMGTTPEVHSIFLEGHTFLVRNHRQASLEISPITFLTAQTLLMDLGQFLLFCHISSH |
| G2044- | QHDGMEAYVKVDSCPEEPQLRMKNNEEAEDYDDDLTDSEMDVVRFDDDNSPSFIQIRSVAK |
| FVIIa- | KHPKTWVHYIAAEEEDWDYAPLVLAPDDRSYKSQYLNNGPQRIGRKYKKVRFMAYTDETF |
| AG144- | KTREAIQHESGILGPLLYGEVGDTLLIIFKNQASRPYNIYPHGITDVRPLYSRRLPKGVKHLKDF |
| Y2332- | PILPGEIFKYKWTVTVEDGPTKSDPRCLTRYYSSFVNMERDLASGLIGPLLICYKESVDQRGNQ |
| FVIIa- | IMSDKRNVILFSVFDENRSWYLTENIQRFLPNPAGVQLEDPEFQASNIMHSINGYVFDSLQLSV |
| AG576 | CLHEVAYWYILSIGAQTDFLSVFFSGYTFKHKMVYEDTLTLFPFSGETVFMSMENPGLWILGC |
| | HNSDFRNRGMTALLKVSSCDKNTGDYYEDSYEDISAYLLSKNNAIEPRSFSQNPPVLKRHQRE |
| | ITRTTLQSDQEEIDYDDTISVEMKKEDFDIYDEDENQSPRSFQKKTRHYFIAAVERLWDYGMS |
| | SSPHVLRNRAQSGSVPQFKKVVFQEFTDGSFTQPLYRGELNEHLGLLGPYIRAEVEDNIMVTF |
| | RNQASRPYSFYSSLISYEEDQRQGAEPRKNFVKPNETKTYFWKVQHHMAPTKDEFDCKAWA |
| | YFSDVDLEKDVHSGLIGPLLVCHTNTLNPAHGRQVTVQEFALFFTIFDETKSWYFTENMERNC |
| | RAPCNIQMEDPTFKENYRFHAINGYIMDTLPGLVMAQDQRIRWYLLSMGSNENIHSIHFSGHV |
| | FTVRKKEEYKMALYNLYPGVFETVEMLPSKAGIWRVECLIGEHLHAGMSTLFLVYSNKCQTP |
| | LGMASGHIRDFQITASGQYGLQVRIVGGSGTASSSPGSSTPSGATGSPGTPGSGTASSSPGSSTP |
| | SGATGSPGSSTPSGATGSPGSSPSASTGTGPGSSPSASTGTGPGASPGTSSTGSPGTPGSGTASSS |
| | PGSSTPSGATGSPGSSPSASTGTGPGSSPSASTGTGPGASPGLQVRIVGGQWAPKLARLHYSGS |
| | INAWSTKEPFSWIKVDLLAPMIIHGIKTQGARQKFSSLYISQFIIMYSLDGKKWQTYRGNSTGT |
| | LMVFFGNVDSSGIKHNIFNPPIIARYIRLHPTHYSIRSTLRMELMGCDLNSCSMPLGMESKAISD |
| | AQITASSYFTNMFATWSPSKARLHLQGRSNAWRPQVNNPKEWLQVDFQKTMKVTGVTTQG |
| | VKSLLTSMYVKEFLISSSQDGHQWTLFFQNGKVKVFQGNQDSFTPVVNSLDPPLLTRYLRIHP |
| | QSWVHQIALRMEVLGCEAQDLYLQVRIVGGPGTPGSGTASSSPGSSTPSGATGSPGSSPSAST |
| | GTGPGSSPSASTGTGPGSSTPSGATGSPGSSTPSGATGSPGASPGTSSTGSPGASPGTSSTGSPG |
| | ASPGTSSTGSPGTPGSGTASSSPGASPGTSSTGSPGASPGTSSTGSPGASPGTSSTGSPGSSPSAS |
| | TGTGPGTPGSGTASSSPGASPGTSSTGSPGASPGTSSTGSPGASPGTSSTGSPGSSTPSGATGSPG |
| | SSTPSGATGSPGASPGTSSTGSPGTPGSGTASSSPGSSTPSGATGSPGSSTPSGATGSPGSSTPSG |
| | ATGSPGSSPSASTGTGPGASPGTSSTGSPGASPGTSSTGSPGTPGSGTASSSPGASPGTSSTGSPG |
| | ASPGTSSTGSPGASPGTSSTGSPGASPGTSSTGSPGTPGSGTASSSPGSSTPSGATGSPGTPGSGT |
| | ASSSPGSSTPSGATGSPGTPGSGTASSSPGSSTPSGATGSPGSSTPSGATGSPGSSPSASTGTGPG |
| | SSPSASTGTGPGASPGTSSTGSPGTPGSGTASSSPGSSTPSGATGSPGSSPSASTGTGPGSSPSAS |
| | TGTGPGASPGTSSTGS |
| AE864- | GSPAGSPTSTEEGTSESATPESGPGTSTEPSEGSAPGSPAGSPTSTEEGTSTEPSEGSAPGTSTEPS |
| FVIII- | EGSAPGTSESATPESGPGSEPATSGSETPGSEPATSGSETPGSPAGSPTSTEEGTSESATPESGPG |
| Thrombin- | TSTEPSEGSAPGTSTEPSEGSAPGSPAGSPTSTEEGTSTEPSEGSAPGTSTEPSEGSAPGTSESATP |
| AE144 | ESGPGTSTEPSEGSAPGTSESATPESGPGSEPATSGSETPGTSTEPSEGSAPGTSTEPSEGSAPGT |
| | SESATPESGPGTSESATPESGPGSPAGSPTSTEEGTSESATPESGPGSEPATSGSETPGTSESATPE |
| | SGPGTSTEPSEGSAPGTSTEPSEGSAPGTSTEPSEGSAPGTSTEPSEGSAPGTSTEPSEGSAPGTS |
| | TEPSEGSAPGSPAGSPTSTEEGTSTEPSEGSAPGTSESATPESGPGSEPATSGSETPGTSESATPES |
| | GPGSEPATSGSETPGTSESATPESGPGTSTEPSEGSAPGTSESATPESGPGSPAGSPTSTEEGSPA |
| | GSPTSTEEGSPAGSPTSTEEGTSESATPESGPGTSTEPSEGSAPGTSESATPESGPGSEPATSGSE |
| | TPGTSESATPESGPGSEPATSGSETPGTSESATPESGPGTSTEPSEGSAPGSPAGSPTSTEEGTSES |
| | ATPESGPGSEPATSGSETPGTSESATPESGPGSPAGSPTSTEEGSPAGSPTSTEEGTSTEPSEGSA |
| | PGTSESATPESGPGTSESATPESGPGTSESATPESGPGSEPATSGSETPGSEPATSGSETPGSPAG |
| | SPTSTEEGTSTEPSEGSAPGTSTEPSEGSAPGSEPATSGSETPGTSESATPESGPGTSTEPSEGSAP |
| | GATRRYYLGAVELSWDYMQSDLGELPVDARFPPRVPKSFPFNTSVVYKKTLFVEFTDHLFNI |
| | AKPRPPWMGLLGPTIQAEVYDTVVITLKNMASHPVSLHAVGVSYWKASEGAEYDDQTSQRE |
| | KEDDKVFPGGSHTYVWQVLKENGPMASDPLCLTYSYLSHVDLVKDLNSGLIGALLVCREGS |
| | LAKEKTQTLHKFILLFAVFDEGKSWHSETKNSLMQDRDAASARAWPKMHTVNGYVNRSLPG |
| | LIGCHRKSVYWHVIGMGTTPEVHSIFLEGHTFLVRNHRQASLEISPITFLTAQTLLMDLGQFLL |
| | FCHISSHQHDGMEAYVKVDSCPEEPQLRMKNNEEAEDYDDDLTDSEMDVVRFDDDNSPSFIQ |
| | IRSVAKKHPKTWVHYIAAEEEDWDYAPLVLAPDDRSYKSQYLNNGPQRIGRKYKKVRFMAY |
| | TDETFKTREAIQHESGILGPLLYGEVGDTLLIIFKNQASRPYNIYPHGITDVRPLYSRRLPKGVK |
| | HLKDFPILPGEIFKYKWTVTVEDGPTKSDPRCLTRYYSSFVNMERDLASGLIGPLLICYKESVD |
| | QRGNQIMSDKRNVILFSVFDENRSWYLTENIQRFLPNPAGVQLEDPEFQASNIMHSINGYVFD |
| | SLQLSVCLHEVAYWYILSIGAQTDFLSVFFSGYTFKHKMVYEDTLTLFPFSGETVFMSMENPG |
| | LWILGCHNSDFRNRGMTALLKVSSCDKNTGDYYEDSYEDISAYLLSKNNAIEPRSFSQNSRHP |
| | STRQKQFNATTIPENDIEKTDPWFAHRTPMPKIQNVSSSDLLMLLRQSPTPHGLSLSDLQEAKY |
| | ETFSDDPSPGAIDSNNSLSEMTHFRPQLHHSGDMVFTPESGLQLRLNEKLGTTAATELKKLDF |
| | KVSSTSNNLISTIPSDNLAAGTDNTSSLGPPSMPVHYDSQLDTTLFGKKSSPLTESGGPLSLSEE |
| | NNDSKLLESGLMNSQESSWGKNVSSTESGRLFKGKRAHGPALLTKDNALFKVSISLLKTNKT |
| | SNNSATNRKTHIDGPSLLIENSPSVWQNILESDTEFKKVTPLIHDRMLMDKNATALRLNHMSN |
| | KTTSSKNMEMVQQKKEGPIPPDAQNPDMSFFKMLFLPESARWIQRTHGKNSLNSGQGPSPKQ |
| | LVSLGPEKSVEGQNFLSEKNKVVVGKGEFTKDVGLKEMVFPSSRNLFLTNLDNLHENNTHNQ |
| | EKKIQEEIEKKETLIQENVVLPQIHTVTGTKNFMKNLFLLSTRQNVEGSYDGAYAPVLQDFRS |
| | LNDSTNRTKKHTAHFSKKGEEENLEGLGNQTKQIVEKYACTTRISPNTSQQNFVTQRSKRAL |
| | KQFRLPLEETELEKRIIVDDTSTQWSKNMKHLTPSTLTQIDYNEKEKGAITQSPLSDCLTRSHSI |
| | PQANRSPLPIAKVSSFPSIRPIYLTRVLFQDNSSHLPAASYRKKDSGVQESSHFLQGAKKNNLS |
| | LAILTLEMTGDQREVGSLGTSATNSVTYKKVENTVLPKPDLPKTSGKVELLPKVHIYQKDLFP |
| | TETSNGSPGHLDLVEGSLLQGTEGAIKWNEANRPGKVPFLRVATESSAKTPSKLLDPLAWDN |
| | HYGTQIPKEEWKSQEKSPEKTAFKKKDTILSLNACESNHAIAAINEGQNKPEIEVTWAKQGRT |
| | ERLCSQNPPVLKRHQREITRTTLQSDQEEIDYDDTISVEMKKEDFDIYDEDENQSPRSFQKKTR |
| | HYFIAAVERLWDYGMSSSPHVLRNRAQSGSVPQFKKVVFQEFTDGSFTQPLYRGELNEHLGL |
| | LGPYIRAEVEDNIMVTFRNQASRPYSFYSSLISYEEDQRQGAEPRKNFVKPNETKTYFWKVQH |
| | HMAPTKDEFDCKAWAYFSDVDLEKDVHSGLIGPLLVCHTNTLNPAHGRQVTVQEFALFFTIF |
| | DETKSWYFTENMERNCRAPCNIQMEDPTFKENYRFHAINGYIMDTLPGLVMAQDQRIRWYL |
| | LSMGSNENIHSIHFSGHVFTVRKKEEYKMALYNLYPGVFETVEMLPSKAGIWRVECLIGEHLH |
| | AGMSTLFLVYSNKCQTPLGMASGHIRDFQITASGQYGQWAPKLARLHYSGSINAWSTKEPFS |
| | WIKVDLLAPMIIHGIKTQGARQKFSSLYISQFIIMYSLDGKKWQTYRGNSTGTLMVFFGNVDS |
| | SGIKHNIFNPPIIARYIRLHPTHYSIRSTLRMELMGCDLNSCSMPLGMESKAISDAQITASSYFTN |
| | MFATWSPSKARLHLQGRSNAWRPQVNNPKEWLQVDFQKTMKVTGVTTQGVKSLLTSMYV |
| | KEFLISSSQDGHQWTLFFQNGKVKVFQGNQDSFTPVVNSLDPPLLTRYLRIHPQSWVHQIALR |
| | MEVLGCEAQDLYGLTPRSLLVGGSEPATSGSETPGTSESATPESGPGSEPATSGSETPGSPAGS |
| | PTSTEEGTSTEPSEGSAPGSEPATSGSETPGSEPATSGSETPGSEPATSGSETPGTSTEPSEGSAP |
| | GTSESATPESGPGSEPATSGSETPGTSTEPSEGSAP |
| FVIII | ATRRYYLGAVELSWDYMQSDLGELPVDARFPPRVPKSFPFNTSVVYKKTLFVEFTVHLFNIA |
| BDD3- | KPRPPWMGLLGPTIQAEVYDTVVITLKNMASHPVSLHAVGVSYWKASEGAEYDDQTSQREK |
| FXIIa- | EDDKVFPGGSHTYVWQVLKENGPMASDPLCLTYSYLSHVDLVKDLNSGLIGALLVCREGSL |
| AE144 | AKEKTQTLHKFILLFAVFDEGKSWHSETKNSLMQDRDAASARAWPKMHTVNGYVNRSLPGL |
| | IGCHRKSVYWHVIGMGTTPEVHSIFLEGHTFLVRNHRQASLEISPITFLTAQTLLMDLGQFLLF |
| | CHISSHQHDGMEAYVKVDSCPEEPQLRMKNNEEAEDYDDDLTDSEMDVVRFDDDNSPSFIQI |
| | RSVAKKHPKTWVHYIAAEEEDWDYAPLVLAPDDRSYKSQYLNNGPQRIGRKYKKVRFMAY |
| | TDETFKTREAIQHESGILGPLLYGEVGDTLLIIFKNQASRPYNIYPHGITDVRPLYSRRLPKGVK |
| | HLKDFPILPGEIFKYKWTVTVEDGPTKSDPRCLTRYYSSFVNMERDLASGLIGPLLICYKESVD |
| | QRGNQIMSDKRNVILFSVFDENRSWYLTENIQRFLPNPAGVQLEDPEFQASNIMHSINGYVFD |
| | SLQLSVCLHEVAYWYILSIGAQTDFLSVFFSGYTFKHKMVYEDTLTLFPFSGETVFMSMENPG |
| | LWILGCHNSDFRNRGMTALLKVSSCDKNTGDYYEDSYEDISAYLLSKNNAIEPRSFSQNPPVL |
| | KRHQGEITRTTLQSDQEEIDYDDTISVEMKKEDFDIYDEDENQSPRSFQKKTRHYFIAAVERL |
| | WDYGMSSSPHVLRNRAQSGSVPQFKKVVFQEFTDGSFTQPLYRGELNEHLGLLGPYIRAEVE |
| | DNIMVTFRNQASRPYSFYSSLISYEEDQRQGAEPRKNFVKPNETKTYFWKVQHHMAPTKDEF |
| | DCKAWAYFSDVDLEKDVHSGLIGPLLVCHTNTLNPAHGRQVTVQEFALFFTIFDETKSWYFT |
| | ENMERNCRAPCNIQMEDPTFKENYRFHAINGYIMDTLPGLVMAQDQRIRWYLLSMGSNENIH |
| | SIHFSGHVFTVRKKEEYKMALYNLYPGVFETVEMLPSKAGIWRVECLIGEHLHAGMSTLFLV |
| | YSNKCQTPLGMASGHIRDFQITASGQYGQWAPKLARLHYSGSINAWSTKEPFSWIKVDLLAP |
| | MIIHGIKTQGARQKFSSLYISQFIIMYSLDGKKWQTYRGNSTGTLMVFFGNVDSSGIKHNIFNP |
| | PIIARYIRLHPTHYSIRSTLRMELMGCDLNSCSMPLGMESKAISDAQITASSYFTNMFATWSPS |
| | KARLHLQGRSNAWRPQVNNPKEWLQVDFQKTMKVTGVTTQGVKSLLTSMYVKEFLISSSQD |
| | GHQWTLFFQNGKVKVFQGNQDSFTPVVNSLDPPLLTRYLRIHPQSWVHQIALRMEVLGCEA |
| | QDLYGTMTRIVGGGGSEPATSGSETPGTSESATPESGPGSEPATSGSETPGSPAGSPTSTEEGTS |
| | TEPSEGSAPGSEPATSGSETPGSEPATSGSETPGSEPATSGSETPGTSTEPSEGSAPGTSESATPES |
| | GPGSEPATSGSETPGTSTEPSEGSAP |
| FVIII | ATRRYYLGAVELSWDYMQSDLGELPVDARFPPRVPKSFPFNTSVVYKKTLFVEFTVHLFNIA |
| BDD3- | KPRPPWMGLLGPTIQAEVYDTVVITLKNMASHPVSLHAVGVSYWKASEGAEYDDQTSQREK |
| Elastase- | EDDKVFPGGSHTYVWQVLKENGPMASDPLCLTYSYLSHVDLVKDLNSGLIGALLVCREGSL |
| AE144 | AKEKTQTLHKFILLFAVFDEGKSWHSETKNSLMQDRDAASARAWPKMHTVNGYVNRSLPGL |
| | IGCHRKSVYWHVIGMGTTPEVHSIFLEGHTFLVRNHRQASLEISPITFLTAQTLLMDLGQFLLF |
| | CHISSHQHDGMEAYVKVDSCPEEPQLRMKNNEEAEDYDDDLTDSEMDVVRFDDDNSPSFIQI |
| | RSVAKKHPKTWVHYIAAEEEDWDYAPLVLAPDDRSYKSQYLNNGPQRIGRKYKKVRFMAY |
| | TDETFKTREAIQHESGILGPLLYGEVGDTLLIIFKNQASRPYNIYPHGITDVRPLYSRRLPKGVK |
| | HLKDFPILPGEIFKYKWTVTVEDGPTKSDPRCLTRYYSSFVNMERDLASGLIGPLLICYKESVD |
| | QRGNQIMSDKRNVILFSVFDENRSWYLTENIQRFLPNPAGVQLEDPEFQASNIMHSINGYVFD |
| | SLQLSVCLHEVAYWYILSIGAQTDFLSVFFSGYTFKHKMVYEDTLTLFPFSGETVFMSMENPG |
| | LWILGCHNSDFRNRGMTALLKVSSCDKNTGDYYEDSYEDISAYLLSKNNAIEPRSFSQNPPVL |
| | KRHQGEITRTTLQSDQEEIDYDDTISVEMKKEDFDIYDEDENQSPRSFQKKTRHYFIAAVERL |
| | WDYGMSSSPHVLRNRAQSGSVPQFKKVVFQEFTDGSFTQPLYRGELNEHLGLLGPYIRAEVE |
| | DNIMVTFRNQASRPYSFYSSLISYEEDQRQGAEPRKNFVKPNETKTYFWKVQHHMAPTKDEF |
| | DCKAWAYFSDVDLEKDVHSGLIGPLLVCHTNTLNPAHGRQVTVQEFALFFTIFDETKSWYFT |
| | ENMERNCRAPCNIQMEDPTFKENYRFHAINGYIMDTLPGLVMAQDQRIRWYLLSMGSNENIH |
| | SIHFSGHVFTVRKKEEYKMALYNLYPGVFETVEMLPSKAGIWRVECLIGEHLHAGMSTLFLV |
| | YSNKCQTPLGMASGHIRDFQITASGQYGQWAPKLARLHYSGSINAWSTKEPFSWIKVDLLAP |
| | MIIHGIKTQGARQKFSSLYISQFIIMYSLDGKKWQTYRGNSTGTLMVFFGNVDSSGIKHNIFNP |
| | PIIARYIRLHPTHYSIRSTLRMELMGCDLNSCSMPLGMESKAISDAQITASSYFTNMFATWSPS |
| | KARLHLQGRSNAWRPQVNNPKEWLQVDFQKTMKVTGVTTQGVKSLLTSMYVKEFLISSSQD |
| | GHQWTLFFQNGKVKVFQGNQDSFTPVVNSLDPPLLTRYLRIHPQSWVHQIALRMEVLGCEA |
| | QDLYGGGSEPATSGSETPGTSESATPESGPGSEPATSGSETPGSPAGSPTSTEEGTSTEPSEGSAP |
| | GSEPATSGSETPGSEPATSGSETPGSEPATSGSETPGTSTEPSEGSAPGTSESATPESGPGSEPAT |
| | SGSETPGTSTEPSEGSAP |
| FVIII | ATRRYYLGAVELSWDYMQSDLGELPVDARFPPRVPKSFPFNTSVVYKKTLFVEFTVHLFNIA |
| BDD3- | KPRPPWMGLLGPTIQAEVYDTVVITLKNMASHPVSLHAVGVSYWKASEGAEYDDQTSQREK |
| FXIa- | EDDKVFPGGSHTYVWQVLKENGPMASDPLCLTYSYLSHVDLVKDLNSGLIGALLVCREGSL |
| AE144 | AKEKTQTLHKFILLFAVFDEGKSWHSETKNSLMQDRDAASARAWPKMHTVNGYVNRSLPGL |
| | IGCHRKSVYWHVIGMGTTPEVHSIFLEGHTFLVRNHRQASLEISPITFLTAQTLLMDLGQFLLF |
| | CHISSHQHDGMEAYVKVDSCPEEPQLRMKNNEEAEDYDDDLTDSEMDVVRFDDDNSPSFIQI |
| | RSVAKKHPKTWVHYIAAEEEDWDYAPLVLAPDDRSYKSQYLNNGPQRIGRKYKKVRFMAY |
| | TDETFKTREAIQHESGILGPLLYGEVGDTLLIIFKNQASRPYNIYPHGITDVRPLYSRRLPKGVK |
| | HLKDFPILPGEIFKYKWTVTVEDGPTKSDPRCLTRYYSSFVNMERDLASGLIGPLLICYKESVD |
| | QRGNQIMSDKRNVILFSVFDENRSWYLTENIQRFLPNPAGVQLEDPEFQASNIMHSINGYVFD |
| | SLQLSVCLHEVAYWYILSIGAQTDFLSVFFSGYTFKHKMVYEDTLTLFPFSGETVFMSMENPG |
| | LWILGCHNSDFRNRGMTALLKVSSCDKNTGDYYEDSYEDISAYLLSKNNAIEPRSFSQNPPVL |
| | KRHQGEITRTTLQSDQEEIDYDDTISVEMKKEDFDIYDEDENQSPRSFQKKTRHYFIAAVERL |
| | WDYGMSSSPHVLRNRAQSGSVPQFKKVVFQEFTDGSFTQPLYRGELNEHLGLLGPYIRAEVE |
| | DNIMVTFRNQASRPYSFYSSLISYEEDQRQGAEPRKNFVKPNETKTYFWKVQHHMAPTKDEF |
| | DCKAWAYFSDVDLEKDVHSGLIGPLLVCHTNTLNPAHGRQVTVQEFALFFTIFDETKSWYFT |
| | ENMERNCRAPCNIQMEDPTFKENYRFHAINGYIMDTLPGLVMAQDQRIRWYLLSMGSNENIH |
| | SIHFSGHVFTVRKKEEYKMALYNLYPGVFETVEMLPSKAGIWRVECLIGEHLHAGMSTLFLV |
| | YSNKCQTPLGMASGHIRDFQITASGQYGQWAPKLARLHYSGSINAWSTKEPFSWIKVDLLAP |
| | MIIHGIKTQGARQKFSSLYISQFIIMYSLDGKKWQTYRGNSTGTLMVFFGNVDSSGIKHNIFNP |
| | PIIARYIRLHPTHYSIRSTLRMELMGCDLNSCSMPLGMESKAISDAQITASSYFTNMFATWSPS |
| | KARLHLQGRSNAWRPQVNNPKEWLQVDFQKTMKVTGVTTQGVKSLLTSMYVKEFLISSSQD |
| | GHQWTLFFQNGKVKVFQGNQDSFTPVVNSLDPPLLTRYLRIHPQSWVHQIALRMEVLGCEA |
| | QDLYGKLTRAETGGSEPATSGSETPGTSESATPESGPGSEPATSGSETPGSPAGSPTSTEEGTST |
| | EPSEGSAPGSEPATSGSETPGSEPATSGSETPGSEPATSGSETPGTSTEPSEGSAPGTSESATPES |
| | GPGSEPATSGSETPGTSTEPSEGSAP |
| FVIII | ATRRYYLGAVELSWDYMQSDLGELPVDARFPPRVPKSFPFNTSVVYKKTLFVEFTVHLFNIA |
| BDD3- | KPRPPWMGLLGPTIQAEVYDTVVITLKNMASHPVSLHAVGVSYWKASEGAEYDDQTSQREK |
| Thrombin- | EDDKVFPGGSHTYVWQVLKENGPMASDPLCLTYSYLSHVDLVKDLNSGLIGALLVCREGSL |
| AE144 | AKEKTQTLHKFILLFAVFDEGKSWHSETKNSLMQDRDAASARAWPKMHTVNGYVNRSLPGL |
| | IGCHRKSVYWHVIGMGTTPEVHSIFLEGHTFLVRNHRQASLEISPITFLTAQTLLMDLGQFLLF |
| | CHISSHQHDGMEAYVKVDSCPEEPQLRMKNNEEAEDYDDDLTDSEMDVVRFDDDNSPSFIQI |
| | RSVAKKHPKTWVHYIAAEEEDWDYAPLVLAPDDRSYKSQYLNNGPQRIGRKYKKVRFMAY |
| | TDETFKTREAIQHESGILGPLLYGEVGDTLLIIFKNQASRPYNIYPHGITDVRPLYSRRLPKGVK |
| | HLKDFPILPGEIFKYKWTVTVEDGPTKSDPRCLTRYYSSFVNMERDLASGLIGPLLICYKESVD |
| | QRGNQIMSDKRNVILFSVFDENRSWYLTENIQRFLPNPAGVQLEDPEFQASNIMHSINGYVFD |
| | SLQLSVCLHEVAYWYILSIGAQTDFLSVFFSGYTFKHKMVYEDTLTLFPFSGETVFMSMENPG |
| | LWILGCHNSDFRNRGMTALLKVSSCDKNTGDYYEDSYEDISAYLLSKNNAIEPRSFSQNPPVL |
| | KRHQGEITRTTLQSDQEEIDYDDTISVEMKKEDFDIYDEDENQSPRSFQKKTRHYFIAAVERL |
| | WDYGMSSSPHVLRNRAQSGSVPQFKKVVFQEFTDGSFTQPLYRGELNEHLGLLGPYIRAEVE |
| | DNIMVTFRNQASRPYSFYSSLISYEEDQRQGAEPRKNFVKPNETKTYFWKVQHHMAPTKDEF |
| | DCKAWAYFSDVDLEKDVHSGLIGPLLVCHTNTLNPAHGRQVTVQEFALFFTIFDETKSWYFT |
| | ENMERNCRAPCNIQMEDPTFKENYRFHAINGYIMDTLPGLVMAQDQRIRWYLLSMGSNENIH |
| | SIHFSGHVFTVRKKEEYKMALYNLYPGVFETVEMLPSKAGIWRVECLIGEHLHAGMSTLFLV |
| | YSNKCQTPLGMASGHIRDFQITASGQYGQWAPKLARLHYSGSINAWSTKEPFSWIKVDLLAP |
| | MIIHGIKTQGARQKFSSLYISQFIIMYSLDGKKWQTYRGNSTGTLMVFFGNVDSSGIKHNIFNP |
| | PIIARYIRLHPTHYSIRSTLRMELMGCDLNSCSMPLGMESKAISDAQITASSYFTNMFATWSPS |
| | KARLHLQGRSNAWRPQVNNPKEWLQVDFQKTMKVTGVTTQGVKSLLTSMYVKEFLISSSQD |
| | GHQWTLFFQNGKVKVFQGNQDSFTPVVNSLDPPLLTRYLRIHPQSWVHQIALRMEVLGCEA |
| | QDLYGLTPRSLLVGGSEPATSGSETPGTSESATPESGPGSEPATSGSETPGSPAGSPTSTEEGTS |
| | TEPSEGSAPGSEPATSGSETPGSEPATSGSETPGSEPATSGSETPGTSTEPSEGSAPGTSESATPES |
| | GPGSEPATSGSETPGTSTEPSEGSAP |
| AE144- | GSEPATSGSETPGTSESATPESGPGSEPATSGSETPGSPAGSPTSTEEGTSTEPSEGSAPGSEPAT |
| FVIII | SGSETPGSEPATSGSETPGSEPATSGSETPGTSTEPSEGSAPGTSESATPESGPGSEPATSGSETP |
| BDD2- | GTSTEPSEGSAPGATRRYYLGAVELSWDYMQSDLGELPVDARFPPRVPKSFPFNTSVVYKKT |
| MMP-17- | LFVEFTVHLFNIAKPRPPWMGLLGPTIQAEVYDTVVITLKNMASHPVSLHAVGVSYWKASEG |
| AE864 | AEYDDQTSQREKEDDKVFPGGSHTYVWQVLKENGPMASDPLCLTYSYLSHVDLVKDLNSGL |
| | IGALLVCREGSLAKEKTQTLHKFILLFAVFDEGKSWHSETKNSLMQDRDAASARAWPKMHT |
| | VNGYVNRSLPGLIGCHRKSVYWHVIGMGTTPEVHSIFLEGHTFLVRNHRQASLEISPITFLTAQ |
| | TLLMDLGQFLLFCHISSHQHDGMEAYVKVDSCPEEPQLRMKNNEEAEDYDDDLTDSEMDVV |
| | RFDDDNSPSFIQIRSVAKKHPKTWVHYIAAEEEDWDYAPLVLAPDDRSYKSQYLNNGPQRIG |
| | RKYKKVRFMAYTDETFKTREAIQHESGILGPLLYGEVGDTLLIIFKNQASRPYNIYPHGITDVR |
| | PLYSRRLPKGVKHLKDFPILPGEIFKYKWTVTVEDGPTKSDPRCLTRYYSSFVNMERDLASGL |
| | IGPLLICYKESVDQRGNQIMSDKRNVILFSVFDENRSWYLTENIQRFLPNPAGVQLEDPEFQAS |
| | NIMHSINGYVFDSLQLSVCLHEVAYWYILSIGAQTDFLSVFFSGYTFKHKMVYEDTLTLFPFS |
| | GETVFMSMENPGLWILGCHNSDFRNRGMTALLKVSSCDKNTGDYYEDSYEDISAYLLSKNN |
| | AIEPRSFSQNPPVLKRHQREITRTTLQSDQEEIDYDDTISVEMKKEDFDIYDEDENQSPRSFQKK |
| | TRHYFIAAVERLWDYGMSSSPHVLRNRAQSGSVPQFKKVVFQEFTDGSFTQPLYRGELNEHL |
| | GLLGPYIRAEVEDNIMVTFRNQASRPYSFYSSLISYEEDQRQGAEPRKNFVKPNETKTYFWKV |
| | QHHMAPTKDEFDCKAWAYFSDVDLEKDVHSGLIGPLLVCHTNTLNPAHGRQVTVQEFALFF |
| | TIFDETKSWYFTENMERNCRAPCNIQMEDPTFKENYRFHAINGYIMDTLPGLVMAQDQRIRW |
| | YLLSMGSNENIHSIHFSGHVFTVRKKEEYKMALYNLYPGVFETVEMLPSKAGIWRVECLIGEH |
| | LHAGMSTLFLVYSNKCQTPLGMASGHIRDFQITASGQYGQWAPKLARLHYSGSINAWSTKEP |
| | FSWIKVDLLAPMIIHGIKTQGARQKFSSLYISQFIIMYSLDGKKWQTYRGNSTGTLMVFFGNV |
| | DSSGIKHNIFNPPIIARYIRLHPTHYSIRSTLRMELMGCDLNSCSMPLGMESKAISDAQITASSYF |
| | TNMFATWSPSKARLHLQGRSNAWRPQVNNPKEWLQVDFQKTMKVTGVTTQGVKSLLTSM |
| | YVKEFLISSSQDGHQWTLFFQNGKVKVFQGNQDSFTPVVNSLDPPLLTRYLRIHPQSWVHQIA |
| | LRMEVLGCEAQDLYGAPLGLRLRGGSPAGSPTSTEEGTSESATPESGPGTSTEPSEGSAPGSPA |
| | GSPTSTEEGTSTEPSEGSAPGTSTEPSEGSAPGTSESATPESGPGSEPATSGSETPGSEPATSGSE |
| | TPGSPAGSPTSTEEGTSESATPESGPGTSTEPSEGSAPGTSTEPSEGSAPGSPAGSPTSTEEGTST |
| | EPSEGSAPGTSTEPSEGSAPGTSESATPESGPGTSTEPSEGSAPGTSESATPESGPGSEPATSGSE |
| | TPGTSTEPSEGSAPGTSTEPSEGSAPGTSESATPESGPGTSESATPESGPGSPAGSPTSTEEGTSES |
| | ATPESGPGSEPATSGSETPGTSESATPESGPGTSTEPSEGSAPGTSTEPSEGSAPGTSTEPSEGSA |
| | PGTSTEPSEGSAPGTSTEPSEGSAPGTSTEPSEGSAPGSPAGSPTSTEEGTSTEPSEGSAPGTSES |
| | ATPESGPGSEPATSGSETPGTSESATPESGPGSEPATSGSETPGTSESATPESGPGTSTEPSEGSA |
| | PGTSESATPESGPGSPAGSPTSTEEGSPAGSPTSTEEGSPAGSPTSTEEGTSESATPESGPGTSTEP |
| | SEGSAPGTSESATPESGPGSEPATSGSETPGTSESATPESGPGSEPATSGSETPGTSESATPESGP |
| | GTSTEPSEGSAPGSPAGSPTSTEEGTSESATPESGPGSEPATSGSETPGTSESATPESGPGSPAGS |
| | PTSTEEGSPAGSPTSTEEGTSTEPSEGSAPGTSESATPESGPGTSESATPESGPGTSESATPESGP |
| | GSEPATSGSETPGSEPATSGSETPGSPAGSPTSTEEGTSTEPSEGSAPGTSTEPSEGSAPGSEPAT |
| | SGSETPGTSESATPESGPGTSTEPSEGSAP |
| AE144- | GSEPATSGSETPGTSESATPESGPGSEPATSGSETPGSPAGSPTSTEEGTSTEPSEGSAPGSEPAT |
| FVIII | SGSETPGSEPATSGSETPGSEPATSGSETPGTSTEPSEGSAPGTSESATPESGPGSEPATSGSETP |
| BDD2- | GTSTEPSEGSAPGATRRYYLGAVELSWDYMQSDLGELPVDARFPPRVPKSFPFNTSVVYKKT |
| FXIIa- | LFVEFTVHLFNIAKPRPPWMGLLGPTIQAEVYDTVVITLKNMASHPVSLHAVGVSYWKASEG |
| AE864 | AEYDDQTSQREKEDDKVFPGGSHTYVWQVLKENGPMASDPLCLTYSYLSHVDLVKDLNSGL |
| | IGALLVCREGSLAKEKTQTLHKFILLFAVFDEGKSWHSETKNSLMQDRDAASARAWPKMHT |
| | VNGYVNRSLPGLIGCHRKSVYWHVIGMGTTPEVHSIFLEGHTFLVRNHRQASLEISPITFLTAQ |
| | TLLMDLGQFLLFCHISSHQHDGMEAYVKVDSCPEEPQLRMKNNEEAEDYDDDLTDSEMDVV |
| | RFDDDNSPSFIQIRSVAKKHPKTWVHYIAAEEEDWDYAPLVLAPDDRSYKSQYLNNGPQRIG |
| | RKYKKVRFMAYTDETFKTREAIQHESGILGPLLYGEVGDTLLIIFKNQASRPYNIYPHGITDVR |
| | PLYSRRLPKGVKHLKDFPILPGEIFKYKWTVTVEDGPTKSDPRCLTRYYSSFVNMERDLASGL |
| | IGPLLICYKESVDQRGNQIMSDKRNVILFSVFDENRSWYLTENIQRFLPNPAGVQLEDPEFQAS |
| | NIMHSINGYVFDSLQLSVCLHEVAYWYILSIGAQTDFLSVFFSGYTFKHKMVYEDTLTLFPFS |
| | GETVFMSMENPGLWILGCHNSDFRNRGMTALLKVSSCDKNTGDYYEDSYEDISAYLLSKNN |
| | AIEPRSFSQNPPVLKRHQREITRTTLQSDQEEIDYDDTISVEMKKEDFDIYDEDENQSPRSFQKK |
| | TRHYFIAAVERLWDYGMSSSPHVLRNRAQSGSVPQFKKVVFQEFTDGSFTQPLYRGELNEHL |
| | GLLGPYIRAEVEDNIMVTFRNQASRPYSFYSSLISYEEDQRQGAEPRKNFVKPNETKTYFWKV |
| | QHHMAPTKDEFDCKAWAYFSDVDLEKDVHSGLIGPLLVCHTNTLNPAHGRQVTVQEFALFF |
| | TIFDETKSWYFTENMERNCRAPCNIQMEDPTFKENYRFHAINGYIMDTLPGLVMAQDQRIRW |
| | YLLSMGSNENIHSIHFSGHVFTVRKKEEYKMALYNLYPGVFETVEMLPSKAGIWRVECLIGEH |
| | LHAGMSTLFLVYSNKCQTPLGMASGHIRDFQITASGQYGQWAPKLARLHYSGSINAWSTKEP |
| | FSWIKVDLLAPMIIHGIKTQGARQKFSSLYISQFIIMYSLDGKKWQTYRGNSTGTLMVFFGNV |
| | DSSGIKHNIFNPPIIARYIRLHPTHYSIRSTLRMELMGCDLNSCSMPLGMESKAISDAQITASSYF |
| | TNMFATWSPSKARLHLQGRSNAWRPQVNNPKEWLQVDFQKTMKVTGVTTQGVKSLLTSM |
| | YVKEFLISSSQDGHQWTLFFQNGKVKVFQGNQDSFTPVVNSLDPPLLTRYLRIHPQSWVHQIA |
| | LRMEVLGCEAQDLYGTMTRIVGGGGSPAGSPTSTEEGTSESATPESGPGTSTEPSEGSAPGSPA |
| | GSPTSTEEGTSTEPSEGSAPGTSTEPSEGSAPGTSESATPESGPGSEPATSGSETPGSEPATSGSE |
| | TPGSPAGSPTSTEEGTSESATPESGPGTSTEPSEGSAPGTSTEPSEGSAPGSPAGSPTSTEEGTST |
| | EPSEGSAPGTSTEPSEGSAPGTSESATPESGPGTSTEPSEGSAPGTSESATPESGPGSEPATSGSE |
| | TPGTSTEPSEGSAPGTSTEPSEGSAPGTSESATPESGPGTSESATPESGPGSPAGSPTSTEEGTSES |
| | ATPESGPGSEPATSGSETPGTSESATPESGPGTSTEPSEGSAPGTSTEPSEGSAPGTSTEPSEGSA |
| | PGTSTEPSEGSAPGTSTEPSEGSAPGTSTEPSEGSAPGSPAGSPTSTEEGTSTEPSEGSAPGTSES |
| | ATPESGPGSEPATSGSETPGTSESATPESGPGSEPATSGSETPGTSESATPESGPGTSTEPSEGSA |
| | PGTSESATPESGPGSPAGSPTSTEEGSPAGSPTSTEEGSPAGSPTSTEEGTSESATPESGPGTSTEP |
| | SEGSAPGTSESATPESGPGSEPATSGSETPGTSESATPESGPGSEPATSGSETPGTSESATPESGP |
| | GTSTEPSEGSAPGSPAGSPTSTEEGTSESATPESGPGSEPATSGSETPGTSESATPESGPGSPAGS |
| | PTSTEEGSPAGSPTSTEEGTSTEPSEGSAPGTSESATPESGPGTSESATPESGPGTSESATPESGP |
| | GSEPATSGSETPGSEPATSGSETPGSPAGSPTSTEEGTSTEPSEGSAPGTSTEPSEGSAPGSEPAT |
| | SGSETPGTSESATPESGPGTSTEPSEGSAP |
| AG144- | SGTASSSPGSSTPSGATGSPGTPGSGTASSSPGSSTPSGATGSPGSSTPSGATGSPGSSPSASTGT |
| FVIII | GPGSSPSASTGTGPGASPGTSSTGSPGTPGSGTASSSPGSSTPSGATGSPGSSPSASTGTGPGSSP |
| BDD2- | SASTGTGPGASPGATRRYYLGAVELSWDYMQSDLGELPVDARFPPRVPKSFPFNTSVVYKKT |
| FXIa- | LFVEFTVHLFNIAKPRPPWMGLLGPTIQAEVYDTVVITLKNMASHPVSLHAVGVSYWKASEG |
| AG576 | AEYDDQTSQREKEDDKVFPGGSHTYVWQVLKENGPMASDPLCLTYSYLSHVDLVKDLNSGL |
| | IGALLVCREGSLAKEKTQTLHKFILLFAVFDEGKSWHSETKNSLMQDRDAASARAWPKMHT |
| | VNGYVNRSLPGLIGCHRKSVYWHVIGMGTTPEVHSIFLEGHTFLVRNHRQASLEISPITFLTAQ |
| | TLLMDLGQFLLFCHISSHQHDGMEAYVKVDSCPEEPQLRMKNNEEAEDYDDDLTDSEMDVV |
| | RFDDDNSPSFIQIRSVAKKHPKTWVHYIAAEEEDWDYAPLVLAPDDRSYKSQYLNNGPQRIG |
| | RKYKKVRFMAYTDETFKTREAIQHESGILGPLLYGEVGDTLLIIFKNQASRPYNIYPHGITDVR |
| | PLYSRRLPKGVKHLKDFPILPGEIFKYKWTVTVEDGPTKSDPRCLTRYYSSFVNMERDLASGL |
| | IGPLLICYKESVDQRGNQIMSDKRNVILFSVFDENRSWYLTENIQRFLPNPAGVQLEDPEFQAS |
| | NIMHSINGYVFDSLQLSVCLHEVAYWYILSIGAQTDFLSVFFSGYTFKHKMVYEDTLTLFPFS |
| | GETVFMSMENPGLWILGCHNSDFRNRGMTALLKVSSCDKNTGDYYEDSYEDISAYLLSKNN |
| | AIEPRSFSQNPPVLKRHQREITRTTLQSDQEEIDYDDTISVEMKKEDFDIYDEDENQSPRSFQKK |
| | TRHYFIAAVERLWDYGMSSSPHVLRNRAQSGSVPQFKKVVFQEFTDGSFTQPLYRGELNEHL |
| | GLLGPYIRAEVEDNIMVTFRNQASRPYSFYSSLISYEEDQRQGAEPRKNFVKPNETKTYFWKV |
| | QHHMAPTKDEFDCKAWAYFSDVDLEKDVHSGLIGPLLVCHTNTLNPAHGRQVTVQEFALFF |
| | TIFDETKSWYFTENMERNCRAPCNIQMEDPTFKENYRFHAINGYIMDTLPGLVMAQDQRIRW |
| | YLLSMGSNENIHSIHFSGHVFTVRKKEEYKMALYNLYPGVFETVEMLPSKAGIWRVECLIGEH |
| | LHAGMSTLFLVYSNKCQTPLGMASGHIRDFQITASGQYGQWAPKLARLHYSGSINAWSTKEP |
| | FSWIKVDLLAPMIIHGIKTQGARQKFSSLYISQFIIMYSLDGKKWQTYRGNSTGTLMVFFGNV |
| | DSSGIKHNIFNPPIIARYIRLHPTHYSIRSTLRMELMGCDLNSCSMPLGMESKAISDAQITASSYF |
| | TNMFATWSPSKARLHLQGRSNAWRPQVNNPKEWLQVDFQKTMKVTGVTTQGVKSLLTSM |
| | YVKEFLISSSQDGHQWTLFFQNGKVKVFQGNQDSFTPVVNSLDPPLLTRYLRIHPQSWVHQIA |
| | LRMEVLGCEAQDLYGKLTRAETGPGTPGSGTASSSPGSSTPSGATGSPGSSPSASTGTGPGSSP |
| | SASTGTGPGSSTPSGATGSPGSSTPSGATGSPGASPGTSSTGSPGASPGTSSTGSPGASPGTSSTG |
| | SPGTPGSGTASSSPGASPGTSSTGSPGASPGTSSTGSPGASPGTSSTGSPGSSPSASTGTGPGTPG |
| | SGTASSSPGASPGTSSTGSPGASPGTSSTGSPGASPGTSSTGSPGSSTPSGATGSPGSSTPSGATG |
| | SPGASPGTSSTGSPGTPGSGTASSSPGSSTPSGATGSPGSSTPSGATGSPGSSTPSGATGSPGSSP |
| | SASTGTGPGASPGTSSTGSPGASPGTSSTGSPGTPGSGTASSSPGASPGTSSTGSPGASPGTSSTG |
| | SPGASPGTSSTGSPGASPGTSSTGSPGTPGSGTASSSPGSSTPSGATGSPGTPGSGTASSSPGSST |
| | PSGATGSPGTPGSGTASSSPGSSTPSGATGSPGSSTPSGATGSPGSSPSASTGTGPGSSPSASTGT |
| | GPGASPGTSSTGSPGTPGSGTASSSPGSSTPSGATGSPGSSPSASTGTGPGSSPSASTGTGPGASP |
| | GTSSTGS |
| AE144- | GSEPATSGSETPGTSESATPESGPGSEPATSGSETPGSPAGSPTSTEEGTSTEPSEGSAPGSEPAT |
| FXIa-FVIII | SGSETPGSEPATSGSETPGSEPATSGSETPGTSTEPSEGSAPGTSESATPESGPGSEPATSGSETP |
| BDD2- | GTSTEPSEGSAPGKLTRAETGATRRYYLGAVELSWDYMQSDLGELPVDARFPPRVPKSFPFNT |
| AE864 | SVVYKKTLFVEFTDHLFNIAKPRPPWMGLLGPTIQAEVYDTVVITLKNMASHPVSLHAVGVS |
| | YWKASEGAEYDDQTSQREKEDDKVFPGGSHTYVWQVLKENGPMASDPLCLTYSYLSHVDL |
| | VKDLNSGLIGALLVCREGSLAKEKTQTLHKFILLFAVFDEGKSWHSETKNSLMQDRDAASAR |
| | AWPKMHTVNGYVNRSLPGLIGCHRKSVYWHVIGMGTTPEVHSIFLEGHTFLVRNHRQASLEI |
| | SPITFLTAQTLLMDLGQFLLFCHISSHQHDGMEAYVKVDSCPEEPQLRMKNNEEAEDYDDDL |
| | TDSEMDVVRFDDDNSPSFIQIRSVAKKHPKTWVHYIAAEEEDWDYAPLVLAPDDRSYKSQYL |
| | NNGPQRIGRKYKKVRFMAYTDETFKTREAIQHESGILGPLLYGEVGDTLLIIFKNQASRPYNIY |
| | PHGITDVRPLYSRRLPKGVKHLKDFPILPGEIFKYKWTVTVEDGPTKSDPRCLTRYYSSFVNM |
| | ERDLASGLIGPLLICYKESVDQRGNQIMSDKRNVILFSVFDENRSWYLTENIQRFLPNPAGVQL |
| | EDPEFQASNIMHSINGYVFDSLQLSVCLHEVAYWYILSIGAQTDFLSVFFSGYTFKHKMVYED |
| | TLTLFPFSGETVFMSMENPGLWILGCHNSDFRNRGMTALLKVSSCDKNTGDYYEDSYEDISA |
| | YLLSKNNAIEPRSFSQNPPVLKRHQREITRTTLQSDQEEIDYDDTISVEMKKEDFDIYDEDENQ |
| | SPRSFQKKTRHYFIAAVERLWDYGMSSSPHVLRNRAQSGSVPQFKKVVFQEFTDGSFTQPLY |
| | RGELNEHLGLLGPYIRAEVEDNIMVTFRNQASRPYSFYSSLISYEEDQRQGAEPRKNFVKPNE |
| | TKTYFWKVQHHMAPTKDEFDCKAWAYFSDVDLEKDVHSGLIGPLLVCHTNTLNPAHGRQV |
| | TVQEFALFFTIFDETKSWYFTENMERNCRAPCNIQMEDPTFKENYRFHAINGYIMDTLPGLVM |
| | AQDQRIRWYLLSMGSNENIHSIHFSGHVFTVRKKEEYKMALYNLYPGVFETVEMLPSKAGIW |
| | RVECLIGEHLHAGMSTLFLVYSNKCQTPLGMASGHIRDFQITASGQYGQWAPKLARLHYSGS |
| | INAWSTKEPFSWIKVDLLAPMIIHGIKTQGARQKFSSLYISQFIIMYSLDGKKWQTYRGNSTGT |
| | LMVFFGNVDSSGIKHNIFNPPIIARYIRLHPTHYSIRSTLRMELMGCDLNSCSMPLGMESKAISD |
| | AQITASSYFTNMFATWSPSKARLHLQGRSNAWRPQVNNPKEWLQVDFQKTMKVTGVTTQG |
| | VKSLLTSMYVKEFLISSSQDGHQWTLFFQNGKVKVFQGNQDSFTPVVNSLDPPLLTRYLRIHP |
| | QSWVHQIALRMEVLGCEAQDLYGGSPAGSPTSTEEGTSESATPESGPGTSTEPSEGSAPGSPA |
| | GSPTSTEEGTSTEPSEGSAPGTSTEPSEGSAPGTSESATPESGPGSEPATSGSETPGSEPATSGSE |
| | TPGSPAGSPTSTEEGTSESATPESGPGTSTEPSEGSAPGTSTEPSEGSAPGSPAGSPTSTEEGTST |
| | EPSEGSAPGTSTEPSEGSAPGTSESATPESGPGTSTEPSEGSAPGTSESATPESGPGSEPATSGSE |
| | TPGTSTEPSEGSAPGTSTEPSEGSAPGTSESATPESGPGTSESATPESGPGSPAGSPTSTEEGTSES |
| | ATPESGPGSEPATSGSETPGTSESATPESGPGTSTEPSEGSAPGTSTEPSEGSAPGTSTEPSEGSA |
| | PGTSTEPSEGSAPGTSTEPSEGSAPGTSTEPSEGSAPGSPAGSPTSTEEGTSTEPSEGSAPGTSES |
| | ATPESGPGSEPATSGSETPGTSESATPESGPGSEPATSGSETPGTSESATPESGPGTSTEPSEGSA |
| | PGTSESATPESGPGSPAGSPTSTEEGSPAGSPTSTEEGSPAGSPTSTEEGTSESATPESGPGTSTEP |
| | SEGSAPGTSESATPESGPGSEPATSGSETPGTSESATPESGPGSEPATSGSETPGTSESATPESGP |
| | GTSTEPSEGSAPGSPAGSPTSTEEGTSESATPESGPGSEPATSGSETPGTSESATPESGPGSPAGS |
| | PTSTEEGSPAGSPTSTEEGTSTEPSEGSAPGTSESATPESGPGTSESATPESGPGTSESATPESGP |
| | GSEPATSGSETPGSEPATSGSETPGSPAGSPTSTEEGTSTEPSEGSAPGTSTEPSEGSAPGSEPAT |
| | SGSETPGTSESATPESGPGTSTEPSEGSAP |
| AE144- | GSEPATSGSETPGTSESATPESGPGSEPATSGSETPGSPAGSPTSTEEGTSTEPSEGSAPGSEPAT |
| FVIII | SGSETPGSEPATSGSETPGSEPATSGSETPGTSTEPSEGSAPGTSESATPESGPGSEPATSGSETP |
| BDD2- | GTSTEPSEGSAPGATRRYYLGAVELSWDYMQSDLGELPVDARFPPRVPKSFPFNTSVVYKKT |
| Y2332- | LFVEFTVHLFNIAKPRPPWMGLLGPTIQAEVYDTVVITLKNMASHPVSLHAVGVSYWKASEG |
| Thrombin- | AEYDDQTSQREKEDDKVFPGGSHTYVWQVLKENGPMASDPLCLTYSYLSHVDLVKDLNSGL |
| AE864 | IGALLVCREGSLAKEKTQTLHKFILLFAVFDEGKSWHSETKNSLMQDRDAASARAWPKMHT |
| | VNGYVNRSLPGLIGCHRKSVYWHVIGMGTTPEVHSIFLEGHTFLVRNHRQASLEISPITFLTAQ |
| | TLLMDLGQFLLFCHISSHQHDGMEAYVKVDSCPEEPQLRMKNNEEAEDYDDDLTDSEMDVV |
| | RFDDDNSPSFIQIRSVAKKHPKTWVHYIAAEEEDWDYAPLVLAPDDRSYKSQYLNNGPQRIG |
| | RKYKKVRFMAYTDETFKTREAIQHESGILGPLLYGEVGDTLLIIFKNQASRPYNIYPHGITDVR |
| | PLYSRRLPKGVKHLKDFPILPGEIFKYKWTVTVEDGPTKSDPRCLTRYYSSFVNMERDLASGL |
| | IGPLLICYKESVDQRGNQIMSDKRNVILFSVFDENRSWYLTENIQRFLPNPAGVQLEDPEFQAS |
| | NIMHSINGYVFDSLQLSVCLHEVAYWYILSIGAQTDFLSVFFSGYTFKHKMVYEDTLTLFPFS |
| | GETVFMSMENPGLWILGCHNSDFRNRGMTALLKVSSCDKNTGDYYEDSYEDISAYLLSKNN |
| | AIEPRSFSQNPPVLKRHQREITRTTLQSDQEEIDYDDTISVEMKKEDFDIYDEDENQSPRSFQKK |
| | TRHYFIAAVERLWDYGMSSSPHVLRNRAQSGSVPQFKKVVFQEFTDGSFTQPLYRGELNEHL |
| | GLLGPYIRAEVEDNIMVTFRNQASRPYSFYSSLISYEEDQRQGAEPRKNFVKPNETKTYFWKV |
| | QHHMAPTKDEFDCKAWAYFSDVDLEKDVHSGLIGPLLVCHTNTLNPAHGRQVTVQEFALFF |
| | TIFDETKSWYFTENMERNCRAPCNIQMEDPTFKENYRFHAINGYIMDTLPGLVMAQDQRIRW |
| | YLLSMGSNENIHSIHFSGHVFTVRKKEEYKMALYNLYPGVFETVEMLPSKAGIWRVECLIGEH |
| | LHAGMSTLFLVYSNKCQTPLGMASGHIRDFQITASGQYGQWAPKLARLHYSGSINAWSTKEP |
| | FSWIKVDLLAPMIIHGIKTQGARQKFSSLYISQFIIMYSLDGKKWQTYRGNSTGTLMVFFGNV |
| | DSSGIKHNIFNPPIIARYIRLHPTHYSIRSTLRMELMGCDLNSCSMPLGMESKAISDAQITASSYF |
| | TNMFATWSPSKARLHLQGRSNAWRPQVNNPKEWLQVDFQKTMKVTGVTTQGVKSLLTSM |
| | YVKEFLISSSQDGHQWTLFFQNGKVKVFQGNQDSFTPVVNSLDPPLLTRYLRIHPQSWVHQIA |
| | LRMEVLGCEAQDLYGLTPRSLLVGGSPAGSPTSTEEGTSESATPESGPGTSTEPSEGSAPGSPA |
| | GSPTSTEEGTSTEPSEGSAPGTSTEPSEGSAPGTSESATPESGPGSEPATSGSETPGSEPATSGSE |
| | TPGSPAGSPTSTEEGTSESATPESGPGTSTEPSEGSAPGTSTEPSEGSAPGSPAGSPTSTEEGTST |
| | EPSEGSAPGTSTEPSEGSAPGTSESATPESGPGTSTEPSEGSAPGTSESATPESGPGSEPATSGSE |
| | TPGTSTEPSEGSAPGTSTEPSEGSAPGTSESATPESGPGTSESATPESGPGSPAGSPTSTEEGTSES |
| | ATPESGPGSEPATSGSETPGTSESATPESGPGTSTEPSEGSAPGTSTEPSEGSAPGTSTEPSEGSA |
| | PGTSTEPSEGSAPGTSTEPSEGSAPGTSTEPSEGSAPGSPAGSPTSTEEGTSTEPSEGSAPGTSES |
| | ATPESGPGSEPATSGSETPGTSESATPESGPGSEPATSGSETPGTSESATPESGPGTSTEPSEGSA |
| | PGTSESATPESGPGSPAGSPTSTEEGSPAGSPTSTEEGSPAGSPTSTEEGTSESATPESGPGTSTEP |
| | SEGSAPGTSESATPESGPGSEPATSGSETPGTSESATPESGPGSEPATSGSETPGTSESATPESGP |
| | GTSTEPSEGSAPGSPAGSPTSTEEGTSESATPESGPGSEPATSGSETPGTSESATPESGPGSPAGS |
| | PTSTEEGSPAGSPTSTEEGTSTEPSEGSAPGTSESATPESGPGTSESATPESGPGTSESATPESGP |
| | GSEPATSGSETPGSEPATSGSETPGSPAGSPTSTEEGTSTEPSEGSAPGTSTEPSEGSAPGSEPAT |
| | SGSETPGTSESATPESGPGTSTEPSEGSAP |
| AE864- | GSPAGSPTSTEEGTSESATPESGPGTSTEPSEGSAPGSPAGSPTSTEEGTSTEPSEGSAPGTSTEPS |
| FVIII- | EGSAPGTSESATPESGPGSEPATSGSETPGSEPATSGSETPGSPAGSPTSTEEGTSESATPESGPG |
| MMP-17- | TSTEPSEGSAPGTSTEPSEGSAPGSPAGSPTSTEEGTSTEPSEGSAPGTSTEPSEGSAPGTSESATP |
| AE144 | ESGPGTSTEPSEGSAPGTSESATPESGPGSEPATSGSETPGTSTEPSEGSAPGTSTEPSEGSAPGT |
| | SESATPESGPGTSESATPESGPGSPAGSPTSTEEGTSESATPESGPGSEPATSGSETPGTSESATPE |
| | SGPGTSTEPSEGSAPGTSTEPSEGSAPGTSTEPSEGSAPGTSTEPSEGSAPGTSTEPSEGSAPGTS |
| | TEPSEGSAPGSPAGSPTSTEEGTSTEPSEGSAPGTSESATPESGPGSEPATSGSETPGTSESATPES |
| | GPGSEPATSGSETPGTSESATPESGPGTSTEPSEGSAPGTSESATPESGPGSPAGSPTSTEEGSPA |
| | GSPTSTEEGSPAGSPTSTEEGTSESATPESGPGTSTEPSEGSAPGTSESATPESGPGSEPATSGSE |
| | TPGTSESATPESGPGSEPATSGSETPGTSESATPESGPGTSTEPSEGSAPGSPAGSPTSTEEGTSES |
| | ATPESGPGSEPATSGSETPGTSESATPESGPGSPAGSPTSTEEGSPAGSPTSTEEGTSTEPSEGSA |
| | PGTSESATPESGPGTSESATPESGPGTSESATPESGPGSEPATSGSETPGSEPATSGSETPGSPAG |
| | SPTSTEEGTSTEPSEGSAPGTSTEPSEGSAPGSEPATSGSETPGTSESATPESGPGTSTEPSEGSAP |
| | GATRRYYLGAVELSWDYMQSDLGELPVDARFPPRVPKSFPFNTSVVYKKTLFVEFTDHLFNI |
| | AKPRPPWMGLLGPTIQAEVYDTVVITLKNMASHPVSLHAVGVSYWKASEGAEYDDQTSQRE |
| | KEDDKVFPGGSHTYVWQVLKENGPMASDPLCLTYSYLSHVDLVKDLNSGLIGALLVCREGS |
| | LAKEKTQTLHKFILLFAVFDEGKSWHSETKNSLMQDRDAASARAWPKMHTVNGYVNRSLPG |
| | LIGCHRKSVYWHVIGMGTTPEVHSIFLEGHTFLVRNHRQASLEISPITFLTAQTLLMDLGQFLL |
| | FCHISSHQHDGMEAYVKVDSCPEEPQLRMKNNEEAEDYDDDLTDSEMDVVRFDDDNSPSFIQ |
| | IRSVAKKHPKTWVHYIAAEEEDWDYAPLVLAPDDRSYKSQYLNNGPQRIGRKYKKVRFMAY |
| | TDETFKTREAIQHESGILGPLLYGEVGDTLLIIFKNQASRPYNIYPHGITDVRPLYSRRLPKGVK |
| | HLKDFPILPGEIFKYKWTVTVEDGPTKSDPRCLTRYYSSFVNMERDLASGLIGPLLICYKESVD |
| | QRGNQIMSDKRNVILFSVFDENRSWYLTENIQRFLPNPAGVQLEDPEFQASNIMHSINGYVFD |
| | SLQLSVCLHEVAYWYILSIGAQTDFLSVFFSGYTFKHKMVYEDTLTLFPFSGETVFMSMENPG |
| | LWILGCHNSDFRNRGMTALLKVSSCDKNTGDYYEDSYEDISAYLLSKNNAIEPRSFSQNSRHP |
| | STRQKQFNATTIPENDIEKTDPWFAHRTPMPKIQNVSSSDLLMLLRQSPTPHGLSLSDLQEAKY |
| | ETFSDDPSPGAIDSNNSLSEMTHFRPQLHHSGDMVFTPESGLQLRLNEKLGTTAATELKKLDF |
| | KVSSTSNNLISTIPSDNLAAGTDNTSSLGPPSMPVHYDSQLDTTLFGKKSSPLTESGGPLSLSEE |
| | NNDSKLLESGLMNSQESSWGKNVSSTESGRLFKGKRAHGPALLTKDNALFKVSISLLKTNKT |
| | SNNSATNRKTHIDGPSLLIENSPSVWQNILESDTEFKKVTPLIHDRMLMDKNATALRLNHMSN |
| | KTTSSKNMEMVQQKKEGPIPPDAQNPDMSFFKMLFLPESARWIQRTHGKNSLNSGQGPSPKQ |
| | LVSLGPEKSVEGQNFLSEKNKVVVGKGEFTKDVGLKEMVFPSSRNLFLTNLDNLHENNTHNQ |
| | EKKIQEEIEKKETLIQENVVLPQIHTVTGTKNFMKNLFLLSTRQNVEGSYDGAYAPVLQDFRS |
| | LNDSTNRTKKHTAHFSKKGEEENLEGLGNQTKQIVEKYACTTRISPNTSQQNFVTQRSKRAL |
| | KQFRLPLEETELEKRIIVDDTSTQWSKNMKHLTPSTLTQIDYNEKEKGAITQSPLSDCLTRSHSI |
| | PQANRSPLPIAKVSSFPSIRPIYLTRVLFQDNSSHLPAASYRKKDSGVQESSHFLQGAKKNNLS |
| | LAILTLEMTGDQREVGSLGTSATNSVTYKKVENTVLPKPDLPKTSGKVELLPKVHIYQKDLFP |
| | TETSNGSPGHLDLVEGSLLQGTEGAIKWNEANRPGKVPFLRVATESSAKTPSKLLDPLAWDN |
| | HYGTQIPKEEWKSQEKSPEKTAFKKKDTILSLNACESNHAIAAINEGQNKPEIEVTWAKQGRT |
| | ERLCSQNPPVLKRHQREITRTTLQSDQEEIDYDDTISVEMKKEDFDIYDEDENQSPRSFQKKTR |
| | HYFIAAVERLWDYGMSSSPHVLRNRAQSGSVPQFKKVVFQEFTDGSFTQPLYRGELNEHLGL |
| | LGPYIRAEVEDNIMVTFRNQASRPYSFYSSLISYEEDQRQGAEPRKNFVKPNETKTYFWKVQH |
| | HMAPTKDEFDCKAWAYFSDVDLEKDVHSGLIGPLLVCHTNTLNPAHGRQVTVQEFALFFTIF |
| | DETKSWYFTENMERNCRAPCNIQMEDPTFKENYRFHAINGYIMDTLPGLVMAQDQRIRWYL |
| | LSMGSNENIHSIHFSGHVFTVRKKEEYKMALYNLYPGVFETVEMLPSKAGIWRVECLIGEHLH |
| | AGMSTLFLVYSNKCQTPLGMASGHIRDFQITASGQYGQWAPKLARLHYSGSINAWSTKEPFS |
| | WIKVDLLAPMIIHGIKTQGARQKFSSLYISQFIIMYSLDGKKWQTYRGNSTGTLMVFFGNVDS |
| | SGIKHNIFNPPIIARYIRLHPTHYSIRSTLRMELMGCDLNSCSMPLGMESKAISDAQITASSYFTN |
| | MFATWSPSKARLHLQGRSNAWRPQVNNPKEWLQVDFQKTMKVTGVTTQGVKSLLTSMYV |
| | KEFLISSSQDGHQWTLFFQNGKVKVFQGNQDSFTPVVNSLDPPLLTRYLRIHPQSWVHQIALR |
| | MEVLGCEAQDLYGAPLGLRLRGGSEPATSGSETPGTSESATPESGPGSEPATSGSETPGSPAGS |
| | PTSTEEGTSTEPSEGSAPGSEPATSGSETPGSEPATSGSETPGSEPATSGSETPGTSTEPSEGSAP |
| | GTSESATPESGPGSEPATSGSETPGTSTEPSEGSAP |
| AF144- | GTSTPESGSASPGTSPSGESSTAPGTSPSGESSTAPGSTSSTAESPGPGSTSESPSGTAPGSTSSTA |
| FXIIa- | ESPGPGTSPSGESSTAPGTSTPESGSASPGSTSSTAESPGPGTSPSGESSTAPGTSPSGESSTAPGT |
| FVIII- | SPSGESSTAPGTMTRIVGGATRRYYLGAVELSWDYMQSDLGELPVDARFPPRVPKSFPFNTSV |
| FXIIa- | VYKKTLFVEFTDHLFNIAKPRPPWMGLLGPTIQAEVYDTVVITLKNMASHPVSLHAVGVSYW |
| AF864 | KASEGAEYDDQTSQREKEDDKVFPGGSHTYVWQVLKENGPMASDPLCLTYSYLSHVDLVK |
| | DLNSGLIGALLVCREGSLAKEKTQTLHKFILLFAVFDEGKSWHSETKNSLMQDRDAASARAW |
| | PKMHTVNGYVNRSLPGLIGCHRKSVYWHVIGMGTTPEVHSIFLEGHTFLVRNHRQASLEISPI |
| | TFLTAQTLLMDLGQFLLFCHISSHQHDGMEAYVKVDSCPEEPQLRMKNNEEAEDYDDDLTD |
| | SEMDVVRFDDDNSPSFIQIRSVAKKHPKTWVHYIAAEEEDWDYAPLVLAPDDRSYKSQYLNN |
| | GPQRIGRKYKKVRFMAYTDETFKTREAIQHESGILGPLLYGEVGDTLLIIFKNQASRPYNIYPH |
| | GITDVRPLYSRRLPKGVKHLKDFPILPGEIFKYKWTVTVEDGPTKSDPRCLTRYYSSFVNMER |
| | DLASGLIGPLLICYKESVDQRGNQIMSDKRNVILFSVFDENRSWYLTENIQRFLPNPAGVQLED |
| | PEFQASNIMHSINGYVFDSLQLSVCLHEVAYWYILSIGAQTDFLSVFFSGYTFKHKMVYEDTL |
| | TLFPFSGETVFMSMENPGLWILGCHNSDFRNRGMTALLKVSSCDKNTGDYYEDSYEDISAYL |
| | LSKNNAIEPRSFSQNSRHPSTRQKQFNATTIPENDIEKTDPWFAHRTPMPKIQNVSSSDLLMLL |
| | RQSPTPHGLSLSDLQEAKYETFSDDPSPGAIDSNNSLSEMTHFRPQLHHSGDMVFTPESGLQLR |
| | LNEKLGTTAATELKKLDFKVSSTSNNLISTIPSDNLAAGTDNTSSLGPPSMPVHYDSQLDTTLF |
| | GKKSSPLTESGGPLSLSEENNDSKLLESGLMNSQESSWGKNVSSTESGRLFKGKRAHGPALLT |
| | KDNALFKVSISLLKTNKTSNNSATNRKTHIDGPSLLIENSPSVWQNILESDTEFKKVTPLIHDR |
| | MLMDKNATALRLNHMSNKTTSSKNMEMVQQKKEGPIPPDAQNPDMSFFKMLFLPESARWIQ |
| | RTHGKNSLNSGQGPSPKQLVSLGPEKSVEGQNFLSEKNKVVVGKGEFTKDVGLKEMVFPSSR |
| | NLFLTNLDNLHENNTHNQEKKIQEEIEKKETLIQENVVLPQIHTVTGTKNFMKNLFLLSTRQN |
| | VEGSYDGAYAPVLQDFRSLNDSTNRTKKHTAHFSKKGEEENLEGLGNQTKQIVEKYACTTRI |
| | SPNTSQQNFVTQRSKRALKQFRLPLEETELEKRIIVDDTSTQWSKNMKHLTPSTLTQIDYNEKE |
| | KGAITQSPLSDCLTRSHSIPQANRSPLPIAKVSSFPSIRPIYLTRVLFQDNSSHLPAASYRKKDSG |
| | VQESSHFLQGAKKNNLSLAILTLEMTGDQREVGSLGTSATNSVTYKKVENTVLPKPDLPKTS |
| | GKVELLPKVHIYQKDLFPTETSNGSPGHLDLVEGSLLQGTEGAIKWNEANRPGKVPFLRVATE |
| | SSAKTPSKLLDPLAWDNHYGTQIPKEEWKSQEKSPEKTAFKKKDTILSLNACESNHAIAAINE |
| | GQNKPEIEVTWAKQGRTERLCSQNPPVLKRHQREITRTTLQSDQEEIDYDDTISVEMKKEDFD |
| | IYDEDENQSPRSFQKKTRHYFIAAVERLWDYGMSSSPHVLRNRAQSGSVPQFKKVVFQEFTD |
| | GSFTQPLYRGELNEHLGLLGPYIRAEVEDNIMVTFRNQASRPYSFYSSLISYEEDQRQGAEPRK |
| | NFVKPNETKTYFWKVQHHMAPTKDEFDCKAWAYFSDVDLEKDVHSGLIGPLLVCHTNTLNP |
| | AHGRQVTVQEFALFFTIFDETKSWYFTENMERNCRAPCNIQMEDPTFKENYRFHAINGYIMD |
| | TLPGLVMAQDQRIRWYLLSMGSNENIHSIHFSGHVFTVRKKEEYKMALYNLYPGVFETVEML |
| | PSKAGIWRVECLIGEHLHAGMSTLFLVYSNKCQTPLGMASGHIRDFQITASGQYGQWAPKLA |
| | RLHYSGSINAWSTKEPFSWIKVDLLAPMIIHGIKTQGARQKFSSLYISQFIIMYSLDGKKWQTY |
| | RGNSTGTLMVFFGNVDSSGIKHNIFNPPIIARYIRLHPTHYSIRSTLRMELMGCDLNSCSMPLG |
| | MESKAISDAQITASSYFTNMFATWSPSKARLHLQGRSNAWRPQVNNPKEWLQVDFQKTMKV |
| | TGVTTQGVKSLLTSMYVKEFLISSSQDGHQWTLFFQNGKVKVFQGNQDSFTPVVNSLDPPLL |
| | TRYLRIHPQSWVHQIALRMEVLGCEAQDLYGTMTRIVGGGSTSESPSGTAPGTSPSGESSTAP |
| | GSTSESPSGTAPGSTSESPSGTAPGTSTPESGSASPGTSTPESGSASPGSTSESPSGTAPGSTSESP |
| | SGTAPGTSPSGESSTAPGSTSESPSGTAPGTSPSGESSTAPGTSPSGESSTAPGSTSSTAESPGPGT |
| | SPSGESSTAPGTSPSGESSTAPGSTSSTAESPGPGTSTPESGSASPGTSTPESGSASPGSTSESPSG |
| | TAPGSTSESPSGTAPGTSTPESGSASPGSTSSTAESPGPGTSTPESGSASPGSTSESPSGTAPGTSP |
| | SGESSTAPGSTSSTAESPGPGTSPSGESSTAPGTSTPESGSASPGSTSSTAESPGPGSTSSTAESPG |
| | PGSTSSTAESPGPGSTSSTAESPGPGTSPSGESSTAPGSTSESPSGTAPGSTSESPSGTAPGTSTPE |
| | SGPXXXGASASGAPSTXXXXSESPSGTAPGSTSESPSGTAPGSTSESPSGTAPGSTSESPSGTAP |
| | GSTSESPSGTAPGSTSESPSGTAPGTSTPESGSASPGTSPSGESSTAPGTSPSGESSTAPGSTSSTA |
| | ESPGPGTSPSGESSTAPGTSTPESGSASPGSTSESPSGTAPGSTSESPSGTAPGTSPSGESSTAPGS |
| | TSESPSGTAPGTSTPESGSASPGTSTPESGSASPGSTSESPSGTAPGTSTPESGSASPGSTSSTAES |
| | PGPGSTSESPSGTAPGSTSESPSGTAPGTSPSGESSTAPGSTSSTAESPGPGTSPSGESSTAPGTST |
| | PESGSASPGTSPSGESSTAPGTSPSGESSTAPGTSPSGESSTAPGSTSSTAESPGPGSTSSTAESPG |
| | PGTSPSGESSTAPGSSPSASTGTGPGSSTPSGATGSPGSSTPSGATGSP |
| AE864- | GSPAGSPTSTEEGTSESATPESGPGTSTEPSEGSAPGSPAGSPTSTEEGTSTEPSEGSAPGTSTEPS |
| FVIII- | EGSAPGTSESATPESGPGSEPATSGSETPGSEPATSGSETPGSPAGSPTSTEEGTSESATPESGPG |
| FXIa- | TSTEPSEGSAPGTSTEPSEGSAPGSPAGSPTSTEEGTSTEPSEGSAPGTSTEPSEGSAPGTSESATP |
| AE144 | ESGPGTSTEPSEGSAPGTSESATPESGPGSEPATSGSETPGTSTEPSEGSAPGTSTEPSEGSAPGT |
| | SESATPESGPGTSESATPESGPGSPAGSPTSTEEGTSESATPESGPGSEPATSGSETPGTSESATPE |
| | SGPGTSTEPSEGSAPGTSTEPSEGSAPGTSTEPSEGSAPGTSTEPSEGSAPGTSTEPSEGSAPGTS |
| | TEPSEGSAPGSPAGSPTSTEEGTSTEPSEGSAPGTSESATPESGPGSEPATSGSETPGTSESATPES |
| | GPGSEPATSGSETPGTSESATPESGPGTSTEPSEGSAPGTSESATPESGPGSPAGSPTSTEEGSPA |
| | GSPTSTEEGSPAGSPTSTEEGTSESATPESGPGTSTEPSEGSAPGTSESATPESGPGSEPATSGSE |
| | TPGTSESATPESGPGSEPATSGSETPGTSESATPESGPGTSTEPSEGSAPGSPAGSPTSTEEGTSES |
| | ATPESGPGSEPATSGSETPGTSESATPESGPGSPAGSPTSTEEGSPAGSPTSTEEGTSTEPSEGSA |
| | PGTSESATPESGPGTSESATPESGPGTSESATPESGPGSEPATSGSETPGSEPATSGSETPGSPAG |
| | SPTSTEEGTSTEPSEGSAPGTSTEPSEGSAPGSEPATSGSETPGTSESATPESGPGTSTEPSEGSAP |
| | GATRRYYLGAVELSWDYMQSDLGELPVDARFPPRVPKSFPFNTSVVYKKTLFVEFTDHLFNI |
| | AKPRPPWMGLLGPTIQAEVYDTVVITLKNMASHPVSLHAVGVSYWKASEGAEYDDQTSQRE |
| | KEDDKVFPGGSHTYVWQVLKENGPMASDPLCLTYSYLSHVDLVKDLNSGLIGALLVCREGS |
| | LAKEKTQTLHKFILLFAVFDEGKSWHSETKNSLMQDRDAASARAWPKMHTVNGYVNRSLPG |
| | LIGCHRKSVYWHVIGMGTTPEVHSIFLEGHTFLVRNHRQASLEISPITFLTAQTLLMDLGQFLL |
| | FCHISSHQHDGMEAYVKVDSCPEEPQLRMKNNEEAEDYDDDLTDSEMDVVRFDDDNSPSFIQ |
| | IRSVAKKHPKTWVHYIAAEEEDWDYAPLVLAPDDRSYKSQYLNNGPQRIGRKYKKVRFMAY |
| | TDETFKTREAIQHESGILGPLLYGEVGDTLLIIFKNQASRPYNIYPHGITDVRPLYSRRLPKGVK |
| | HLKDFPILPGEIFKYKWTVTVEDGPTKSDPRCLTRYYSSFVNMERDLASGLIGPLLICYKESVD |
| | QRGNQIMSDKRNVILFSVFDENRSWYLTENIQRFLPNPAGVQLEDPEFQASNIMHSINGYVFD |
| | SLQLSVCLHEVAYWYILSIGAQTDFLSVFFSGYTFKHKMVYEDTLTLFPFSGETVFMSMENPG |
| | LWILGCHNSDFRNRGMTALLKVSSCDKNTGDYYEDSYEDISAYLLSKNNAIEPRSFSQNSRHP |
| | STRQKQFNATTIPENDIEKTDPWFAHRTPMPKIQNVSSSDLLMLLRQSPTPHGLSLSDLQEAKY |
| | ETFSDDPSPGAIDSNNSLSEMTHFRPQLHHSGDMVFTPESGLQLRLNEKLGTTAATELKKLDF |
| | KVSSTSNNLISTIPSDNLAAGTDNTSSLGPPSMPVHYDSQLDTTLFGKKSSPLTESGGPLSLSEE |
| | NNDSKLLESGLMNSQESSWGKNVSSTESGRLFKGKRAHGPALLTKDNALFKVSISLLKTNKT |
| | SNNSATNRKTHIDGPSLLIENSPSVWQNILESDTEFKKVTPLIHDRMLMDKNATALRLNHMSN |
| | KTTSSKNMEMVQQKKEGPIPPDAQNPDMSFFKMLFLPESARWIQRTHGKNSLNSGQGPSPKQ |
| | LVSLGPEKSVEGQNFLSEKNKVVVGKGEFTKDVGLKEMVFPSSRNLFLTNLDNLHENNTHNQ |
| | EKKIQEEIEKKETLIQENVVLPQIHTVTGTKNFMKNLFLLSTRQNVEGSYDGAYAPVLQDFRS |
| | LNDSTNRTKKHTAHFSKKGEEENLEGLGNQTKQIVEKYACTTRISPNTSQQNFVTQRSKRAL |
| | KQFRLPLEETELEKRIIVDDTSTQWSKNMKHLTPSTLTQIDYNEKEKGAITQSPLSDCLTRSHSI |
| | PQANRSPLPIAKVSSFPSIRPIYLTRVLFQDNSSHLPAASYRKKDSGVQESSHFLQGAKKNNLS |
| | LAILTLEMTGDQREVGSLGTSATNSVTYKKVENTVLPKPDLPKTSGKVELLPKVHIYQKDLFP |
| | TETSNGSPGHLDLVEGSLLQGTEGAIKWNEANRPGKVPFLRVATESSAKTPSKLLDPLAWDN |
| | HYGTQIPKEEWKSQEKSPEKTAFKKKDTILSLNACESNHAIAAINEGQNKPEIEVTWAKQGRT |
| | ERLCSQNPPVLKRHQREITRTTLQSDQEEIDYDDTISVEMKKEDFDIYDEDENQSPRSFQKKTR |
| | HYFIAAVERLWDYGMSSSPHVLRNRAQSGSVPQFKKVVFQEFTDGSFTQPLYRGELNEHLGL |
| | LGPYIRAEVEDNIMVTFRNQASRPYSFYSSLISYEEDQRQGAEPRKNFVKPNETKTYFWKVQH |
| | HMAPTKDEFDCKAWAYFSDVDLEKDVHSGLIGPLLVCHTNTLNPAHGRQVTVQEFALFFTIF |
| | DETKSWYFTENMERNCRAPCNIQMEDPTFKENYRFHAINGYIMDTLPGLVMAQDQRIRWYL |
| | LSMGSNENIHSIHFSGHVFTVRKKEEYKMALYNLYPGVFETVEMLPSKAGIWRVECLIGEHLH |
| | AGMSTLFLVYSNKCQTPLGMASGHIRDFQITASGQYGQWAPKLARLHYSGSINAWSTKEPFS |
| | WIKVDLLAPMIIHGIKTQGARQKFSSLYISQFIIMYSLDGKKWQTYRGNSTGTLMVFFGNVDS |
| | SGIKHNIFNPPIIARYIRLHPTHYSIRSTLRMELMGCDLNSCSMPLGMESKAISDAQITASSYFTN |
| | MFATWSPSKARLHLQGRSNAWRPQVNNPKEWLQVDFQKTMKVTGVTTQGVKSLLTSMYV |
| | KEFLISSSQDGHQWTLFFQNGKVKVFQGNQDSFTPVVNSLDPPLLTRYLRIHPQSWVHQIALR |
| | MEVLGCEAQDLYGKLTRAETGGSEPATSGSETPGTSESATPESGPGSEPATSGSETPGSPAGSP |
| | TSTEEGTSTEPSEGSAPGSEPATSGSETPGSEPATSGSETPGSEPATSGSETPGTSTEPSEGSAPG |
| | TSESATPESGPGSEPATSGSETPGTSTEPSEGSAP |
| AE144- | GSEPATSGSETPGTSESATPESGPGSEPATSGSETPGSPAGSPTSTEEGTSTEPSEGSAPGSEPAT |
| FXIa-FVIII | SGSETPGSEPATSGSETPGSEPATSGSETPGTSTEPSEGSAPGTSESATPESGPGSEPATSGSETP |
| BDD9- | GTSTEPSEGSAPGKLTRAETGATRRYYLGAVELSWDYMQSDLGELPVDARFPPRVPKSFPFNT |
| AE864 | SVVYKKTLFVEFTDHLFNIAKPRPPWMGLLGPTIQAEVYDTVVITLKNMASHPVSLHAVGVS |
| | YWKASEGAEYDDQTSQREKEDDKVFPGGSHTYVWQVLKENGPMASDPLCLTYSYLSHVDL |
| | VKDLNSGLIGALLVCREGSLAKEKTQTLHKFILLFAVFDEGKSWHSETKNSLMQDRDAASAR |
| | AWPKMHTVNGYVNRSLPGLIGCHRKSVYWHVIGMGTTPEVHSIFLEGHTFLVRNHRQASLEI |
| | SPITFLTAQTLLMDLGQFLLFCHISSHQHDGMEAYVKVDSCPEEPQLRMKNNEEAEDYDDDL |
| | TDSEMDVVRFDDDNSPSFIQIRSVAKKHPKTWVHYIAAEEEDWDYAPLVLAPDDRSYKSQYL |
| | NNGPQRIGRKYKKVRFMAYTDETFKTREAIQHESGILGPLLYGEVGDTLLIIFKNQASRPYNIY |
| | PHGITDVRPLYSRRLPKGVKHLKDFPILPGEIFKYKWTVTVEDGPTKSDPRCLTRYYSSFVNM |
| | ERDLASGLIGPLLICYKESVDQRGNQIMSDKRNVILFSVFDENRSWYLTENIQRFLPNPAGVQL |
| | EDPEFQASNIMHSINGYVFDSLQLSVCLHEVAYWYILSIGAQTDFLSVFFSGYTFKHKMVYED |
| | TLTLFPFSGETVFMSMENPGLWILGCHNSDFRNRGMTALLKVSSCDKNTGDYYEDSYEDISA |
| | YLLSKNNAIEPRSFSQNPPVLKRHQREITRTTLQSDQEEIDYDDTISVEMKKEDFDIYDEDENQ |
| | SPRSFQKKTRHYFIAAVERLWDYGMSSSPHVLRNRAQSGSVPQFKKVVFQEFTDGSFTQPLY |
| | RGELNEHLGLLGPYIRAEVEDNIMVTFRNQASRPYSFYSSLISYEEDQRQGAEPRKNFVKPNE |
| | TKTYFWKVQHHMAPTKDEFDCKAWAYFSDVDLEKDVHSGLIGPLLVCHTNTLNPAHGRQV |
| | TVQEFALFFTIFDETKSWYFTENMERNCRAPCNIQMEDPTFKENYRFHAINGYIMDTLPGLVM |
| | AQDQRIRWYLLSMGSNENIHSIHFSGHVFTVRKKEEYKMALYNLYPGVFETVEMLPSKAGIW |
| | RVECLIGEHLHAGMSTLFLVYSNKCQTPLGMASGHIRDFQITASGQYGQWAPKLARLHYSGS |
| | INAWSTKEPFSWIKVDLLAPMIIHGIKTQGARQKFSSLYISQFIIMYSLDGKKWQTYRGNSTGT |
| | LMVFFGNVDSSGIKHNIFNPPIIARYIRLHPTHYSIRSTLRMELMGCDLNSCSMPLGMESKAISD |
| | AQITASSYFTNMFATWSPSKARLHLQGRSNAWRPQVNNPKEWLQVDFQKTMKVTGVTTQG |
| | VKSLLTSMYVKEFLISSSQDGHQWTLFFQNGKVKVFQGNQDSFTPVVNSLDPPLLTRYLRIHP |
| | QSWVHQIALRMEVLGCEAQDLYGGSPAGSPTSTEEGTSESATPESGPGTSTEPSEGSAPGSPA |
| | GSPTSTEEGTSTEPSEGSAPGTSTEPSEGSAPGTSESATPESGPGSEPATSGSETPGSEPATSGSE |
| | TPGSPAGSPTSTEEGTSESATPESGPGTSTEPSEGSAPGTSTEPSEGSAPGSPAGSPTSTEEGTST |
| | EPSEGSAPGTSTEPSEGSAPGTSESATPESGPGTSTEPSEGSAPGTSESATPESGPGSEPATSGSE |
| | TPGTSTEPSEGSAPGTSTEPSEGSAPGTSESATPESGPGTSESATPESGPGSPAGSPTSTEEGTSES |
| | ATPESGPGSEPATSGSETPGTSESATPESGPGTSTEPSEGSAPGTSTEPSEGSAPGTSTEPSEGSA |
| | PGTSTEPSEGSAPGTSTEPSEGSAPGTSTEPSEGSAPGSPAGSPTSTEEGTSTEPSEGSAPGTSES |
| | ATPESGPGSEPATSGSETPGTSESATPESGPGSEPATSGSETPGTSESATPESGPGTSTEPSEGSA |
| | PGTSESATPESGPGSPAGSPTSTEEGSPAGSPTSTEEGSPAGSPTSTEEGTSESATPESGPGTSTEP |
| | SEGSAPGTSESATPESGPGSEPATSGSETPGTSESATPESGPGSEPATSGSETPGTSESATPESGP |
| | GTSTEPSEGSAPGSPAGSPTSTEEGTSESATPESGPGSEPATSGSETPGTSESATPESGPGSPAGS |
| | PTSTEEGSPAGSPTSTEEGTSTEPSEGSAPGTSESATPESGPGTSESATPESGPGTSESATPESGP |
| | GSEPATSGSETPGSEPATSGSETPGSPAGSPTSTEEGTSTEPSEGSAPGTSTEPSEGSAPGSEPAT |
| | SGSETPGTSESATPESGPGTSTEPSEGSAP |
| AE48- | MAEPAGSPTSTEEGTPGSGTASSSPGSSTPSGATGSPGASPGTSSTGSPGKLTRAETGATRRYY |
| FXIa-FVIII | LGAVELSWDYMQSDLGELPVDARFPPRVPKSFPFNTSVVYKKTLFVEFTDHLFNIAKPRPPW |
| BDD9- | MGLLGPTIQAEVYDTVVITLKNMASHPVSLHAVGVSYWKASEGAEYDDQTSQREKEDDKVF |
| AE864 | PGGSHTYVWQVLKENGPMASDPLCLTYSYLSHVDLVKDLNSGLIGALLVCREGSLAKEKTQ |
| | TLHKFILLFAVFDEGKSWHSETKNSLMQDRDAASARAWPKMHTVNGYVNRSLPGLIGCHRK |
| | SVYWHVIGMGTTPEVHSIFLEGHTFLVRNHRQASLEISPITFLTAQTLLMDLGQFLLFCHISSH |
| | QHDGMEAYVKVDSCPEEPQLRMKNNEEAEDYDDDLTDSEMDVVRFDDDNSPSFIQIRSVAK |
| | KHPKTWVHYIAAEEEDWDYAPLVLAPDDRSYKSQYLNNGPQRIGRKYKKVRFMAYTDETF |
| | KTREAIQHESGILGPLLYGEVGDTLLIIFKNQASRPYNIYPHGITDVRPLYSRRLPKGVKHLKDF |
| | PILPGEIFKYKWTVTVEDGPTKSDPRCLTRYYSSFVNMERDLASGLIGPLLICYKESVDQRGNQ |
| | IMSDKRNVILFSVFDENRSWYLTENIQRFLPNPAGVQLEDPEFQASNIMHSINGYVFDSLQLSV |
| | CLHEVAYWYILSIGAQTDFLSVFFSGYTFKHKMVYEDTLTLFPFSGETVFMSMENPGLWILGC |
| | HNSDFRNRGMTALLKVSSCDKNTGDYYEDSYEDISAYLLSKNNAIEPRSFSQNPPVLKRHQRE |
| | ITRTTLQSDQEEIDYDDTISVEMKKEDFDIYDEDENQSPRSFQKKTRHYFIAAVERLWDYGMS |
| | SSPHVLRNRAQSGSVPQFKKVVFQEFTDGSFTQPLYRGELNEHLGLLGPYIRAEVEDNIMVTF |
| | RNQASRPYSFYSSLISYEEDQRQGAEPRKNFVKPNETKTYFWKVQHHMAPTKDEFDCKAWA |
| | YFSDVDLEKDVHSGLIGPLLVCITINTLNPAHGRQVTVQEFALFFTIFDETKSWYFTENMERNC |
| | RAPCNIQMEDPTFKENYRFHAINGYIMDTLPGLVMAQDQRIRWYLLSMGSNENIHSIHFSGHV |
| | FTVRKKEEYKMALYNLYPGVFETVEMLPSKAGIWRVECLIGEHLHAGMSTLFLVYSNKCQTP |
| | LGMASGHIRDFQITASGQYGQWAPKLARLHYSGSINAWSTKEPFSWIKVDLLAPMIIHGIKTQ |
| | GARQKFSSLYISQFIIMYSLDGKKWQTYRGNSTGTLMVFFGNVDSSGIKHNIFNPPIIARYIRLH |
| | PTHYSIRSTLRMELMGCDLNSCSMPLGMESKAISDAQITASSYFTNMFATWSPSKARLHLQGR |
| | SNAWRPQVNNPKEWLQVDFQKTMKVTGVTTQGVKSLLTSMYVKEFLISSSQDGHQWTLFFQ |
| | NGKVKVFQGNQDSFTPVVNSLDPPLLTRYLRIHPQSWVHQIALRMEVLGCEAQDLYGGSPAG |
| | SPTSTEEGTSESATPESGPGTSTEPSEGSAPGSPAGSPTSTEEGTSTEPSEGSAPGTSTEPSEGSAP |
| | GTSESATPESGPGSEPATSGSETPGSEPATSGSETPGSPAGSPTSTEEGTSESATPESGPGTSTEPS |
| | EGSAPGTSTEPSEGSAPGSPAGSPTSTEEGTSTEPSEGSAPGTSTEPSEGSAPGTSESATPESGPG |
| | TSTEPSEGSAPGTSESATPESGPGSEPATSGSETPGTSTEPSEGSAPGTSTEPSEGSAPGTSESATP |
| | ESGPGTSESATPESGPGSPAGSPTSTEEGTSESATPESGPGSEPATSGSETPGTSESATPESGPGT |
| | STEPSEGSAPGTSTEPSEGSAPGTSTEPSEGSAPGTSTEPSEGSAPGTSTEPSEGSAPGTSTEPSEG |
| | SAPGSPAGSPTSTEEGTSTEPSEGSAPGTSESATPESGPGSEPATSGSETPGTSESATPESGPGSE |
| | PATSGSETPGTSESATPESGPGTSTEPSEGSAPGTSESATPESGPGSPAGSPTSTEEGSPAGSPTS |
| | TEEGSPAGSPTSTEEGTSESATPESGPGTSTEPSEGSAPGTSESATPESGPGSEPATSGSETPGTS |
| | ESATPESGPGSEPATSGSETPGTSESATPESGPGTSTEPSEGSAPGSPAGSPTSTEEGTSESATPES |
| | GPGSEPATSGSETPGTSESATPESGPGSPAGSPTSTEEGSPAGSPTSTEEGTSTEPSEGSAPGTSE |
| | SATPESGPGTSESATPESGPGTSESATPESGPGSEPATSGSETPGSEPATSGSETPGSPAGSPTST |
| | EEGTSTEPSEGSAPGTSTEPSEGSAPGSEPATSGSETPGTSESATPESGPGTSTEPSEGSAP |
| FVIII | ATRRYYLGAVELSWDYMQSDLGELPVDARFPPRVPKSFPFNTSVVYKKTLFVEFTDHLFNIA |
| BDD9- | KPRPPWMGLLGPTIQAEVYDTVVITLKNMASHPVSLHAVGVSYWKASEGAEYDDQTSQREK |
| FXIa- | EDDKVFPGGSHTYVWQVLKENGPMASDPLCLTYSYLSHVDLVKDLNSGLIGALLVCREGSL |
| AG288_2 | AKEKTQTLHKFILLFAVFDEGKSWHSETKNSLMQDRDAASARAWPKMHTVNGYVNRSLPGL |
| | IGCHRKSVYWHVIGMGTTPEVHSIFLEGHTFLVRNHRQASLEISPITFLTAQTLLMDLGQFLLF |
| | CHISSHQHDGMEAYVKVDSCPEEPQLRMKNNEEAEDYDDDLTDSEMDVVRFDDDNSPSFIQI |
| | RSVAKKHPKTWVHYIAAEEEDWDYAPLVLAPDDRSYKSQYLNNGPQRIGRKYKKVRFMAY |
| | TDETFKTREAIQHESGILGPLLYGEVGDTLLIIFKNQASRPYNIYPHGITDVRPLYSRRLPKGVK |
| | HLKDFPILPGEIFKYKWTVTVEDGPTKSDPRCLTRYYSSFVNMERDLASGLIGPLLICYKESVD |
| | QRGNQIMSDKRNVILFSVFDENRSWYLTENIQRFLPNPAGVQLEDPEFQASNIMHSINGYVFD |
| | SLQLSVCLHEVAYWYILSIGAQTDFLSVFFSGYTFKHKMVYEDTLTLFPFSGETVFMSMENPG |
| | LWILGCHNSDFRNRGMTALLKVSSCDKNTGDYYEDSYEDISAYLLSKNNAIEPRSFSQNPPVL |
| | KRHQREITRTTLQSDQEEIDYDDTISVEMKKEDFDIYDEDENQSPRSFQKKTRHYFIAAVERL |
| | WDYGMSSSPHVLRNRAQSGSVPQFKKVVFQEFTDGSFTQPLYRGELNEHLGLLGPYIRAEVE |
| | DNIMVTFRNQASRPYSFYSSLISYEEDQRQGAEPRKNFVKPNETKTYFWKVQHHMAPTKDEF |
| | DCKAWAYFSDVDLEKDVHSGLIGPLLVCHTNTLNPAHGRQVTVQEFALFFTIFDETKSWYFT |
| | ENMERNCRAPCNIQMEDPTFKENYRFHAINGYIMDTLPGLVMAQDQRIRWYLLSMGSNENIH |
| | SIHFSGHVFTVRKKEEYKMALYNLYPGVFETVEMLPSKAGIWRVECLIGEHLHAGMSTLFLV |
| | YSNKCQTPLGMASGHIRDFQITASGQYGQWAPKLARLHYSGSINAWSTKEPFSWIKVDLLAP |
| | MIIHGIKTQGARQKFSSLYISQFIIMYSLDGKKWQTYRGNSTGTLMVFFGNVDSSGIKHNIFNP |
| | PIIARYIRLHPTHYSIRSTLRMELMGCDLNSCSMPLGMESKAISDAQITASSYFTNMFATWSPS |
| | KARLHLQGRSNAWRPQVNNPKEWLQVDFQKTMKVTGVTTQGVKSLLTSMYVKEFLISSSQD |
| | GHQWTLFFQNGKVKVFQGNQDSFTPVVNSLDPPLLTRYLRIHPQSWVHQIALRMEVLGCEA |
| | QDLYKLTRAETGPGASPGTSSTGSPGASPGTSSTGSPGTPGSGTASSSPGSSTPSGATGSPGTPG |
| | SGTASSSPGSSTPSGATGSPGTPGSGTASSSPGSSTPSGATGSPGSSTPSGATGSPGSSPSASTGT |
| | GPGSSPSASTGTGPGASPGTSSTGSPGTPGSGTASSSPGSSTPSGATGSPGSSPSASTGTGPGSSP |
| | SASTGTGPGASPGTSSTGSPGASPGTSSTGSPGSSTPSGATGSPGSSPSASTGTGPGASPGTSSTG |
| | SPGSSPSASTGTGPGTPGSGTASSSPGSSTPSGATGS |
| FVIII | ATRRYYLGAVELSWDYMQSDLGELPVDARFPPRVPKSFPFNTSVVYKKTLFVEFTDHLFNIA |
| BDD9- | KPRPPWMGLLGPTIQAEVYDTVVITLKNMASHPVSLHAVGVSYWKASEGAEYDDQTSQREK |
| FXIa- | EDDKVFPGGSHTYVWQVLKENGPMASDPLCLTYSYLSHVDLVKDLNSGLIGALLVCREGSL |
| AG864 | AKEKTQTLHKFILLFAVFDEGKSWHSETKNSLMQDRDAASARAWPKMHTVNGYVNRSLPGL |
| | IGCHRKSVYWHVIGMGTTPEVHSIFLEGHTFLVRNHRQASLEISPITFLTAQTLLMDLGQFLLF |
| | CHISSHQHDGMEAYVKVDSCPEEPQLRMKNNEEAEDYDDDLTDSEMDVVRFDDDNSPSFIQI |
| | RSVAKKHPKTWVHYIAAEEEDWDYAPLVLAPDDRSYKSQYLNNGPQRIGRKYKKVRFMAY |
| | TDETFKTREAIQHESGILGPLLYGEVGDTLLIIFKNQASRPYNIYPHGITDVRPLYSRRLPKGVK |
| | HLKDFPILPGEIFKYKWTVTVEDGPTKSDPRCLTRYYSSFVNMERDLASGLIGPLLICYKESVD |
| | QRGNQIMSDKRNVILFSVFDENRSWYLTENIQRFLPNPAGVQLEDPEFQASNIMHSINGYVFD |
| | SLQLSVCLHEVAYWYILSIGAQTDFLSVFFSGYTFKHKMVYEDTLTLFPFSGETVFMSMENPG |
| | LWILGCHNSDFRNRGMTALLKVSSCDKNTGDYYEDSYEDISAYLLSKNNAIEPRSFSQNPPVL |
| | KRHQREITRTTLQSDQEEIDYDDTISVEMKKEDFDIYDEDENQSPRSFQKKTRHYFIAAVERL |
| | WDYGMSSSPHVLRNRAQSGSVPQFKKVVFQEFTDGSFTQPLYRGELNEHLGLLGPYIRAEVE |
| | DNIMVTFRNQASRPYSFYSSLISYEEDQRQGAEPRKNFVKPNETKTYFWKVQHHMAPTKDEF |
| | DCKAWAYFSDVDLEKDVHSGLIGPLLVCHTNTLNPAHGRQVTVQEFALFFTIFDETKSWYFT |
| | ENMERNCRAPCNIQMEDPTFKENYRFHAINGYIMDTLPGLVMAQDQRIRWYLLSMGSNENIH |
| | SIHFSGHVFTVRKKEEYKMALYNLYPGVFETVEMLPSKAGIWRVECLIGEHLHAGMSTLFLV |
| | YSNKCQTPLGMASGHIRDFQITASGQYGQWAPKLARLHYSGSINAWSTKEPFSWIKVDLLAP |
| | MIIHGIKTQGARQKFSSLYISQFIIMYSLDGKKWQTYRGNSTGTLMVFFGNVDSSGIKHNIFNP |
| | PIIARYIRLHPTHYSIRSTLRMELMGCDLNSCSMPLGMESKAISDAQITASSYFTNMFATWSPS |
| | KARLHLQGRSNAWRPQVNNPKEWLQVDFQKTMKVTGVTTQGVKSLLTSMYVKEFLISSSQD |
| | GHQWTLFFQNGKVKVFQGNQDSFTPVVNSLDPPLLTRYLRIHPQSWVHQIALRMEVLGCEA |
| | QDLYKLTRAETGGASPGTSSTGSPGSSPSASTGTGPGSSPSASTGTGPGTPGSGTASSSPGSSTP |
| | SGATGSPGSSPSASTGTGPGASPGTSSTGSPGTPGSGTASSSPGSSTPSGATGSPGTPGSGTASSS |
| | PGASPGTSSTGSPGASPGTSSTGSPGTPGSGTASSSPGSSTPSGATGSPGASPGTSSTGSPGTPGS |
| | GTASSSPGSSTPSGATGSPGSSPSASTGTGPGSSPSASTGTGPGSSTPSGATGSPGSSTPSGATGS |
| | PGASPGTSSTGSPGASPGTSSTGSPGASPGTSSTGSPGTPGSGTASSSPGASPGTSSTGSPGASPG |
| | TSSTGSPGASPGTSSTGSPGSSPSASTGTGPGTPGSGTASSSPGASPGTSSTGSPGASPGTSSTGS |
| | PGASPGTSSTGSPGSSTPSGATGSPGSSTPSGATGSPGASPGTSSTGSPGTPGSGTASSSPGSSTP |
| | SGATGSPGSSTPSGATGSPGSSTPSGATGSPGSSPSASTGTGPGASPGTSSTGSPGASPGTSSTGS |
| | PGTPGSGTASSSPGASPGTSSTGSPGASPGTSSTGSPGASPGTSSTGSPGASPGTSSTGSPGTPGS |
| | GTASSSPGSSTPSGATGSPGTPGSGTASSSPGSSTPSGATGSPGTPGSGTASSSPGSSTPSGATGS |
| | PGSSTPSGATGSPGSSPSASTGTGPGSSPSASTGTGPGASPGTSSTGSPGTPGSGTASSSPGSSTP |
| | SGATGSPGSSPSASTGTGPGSSPSASTGTGPGASPGTSSTGSPGASPGTSSTGSPGSSTPSGATGS |
| | PGSSPSASTGTGPGASPGTSSTGSPGSSPSASTGTGPGTPGSGTASSSPGSSTPSGATGSPGSSTP |
| | SGATGSPGASPGTSSTGSP |
| FVIII | ATRRYYLGAVELSWDYMQSDLGELPVDARFPPRVPKSFPFNTSVVYKKTLFVEFTDHLFNIA |
| BDD9 (1- | KPRPPWMGLLGPTIQAEVYDTVVITLKNMASHPVSLHAVGVSYWKASEGAEYDDQTSQREK |
| 745) | EDDKVFPGGSHTYVWQVLKENGPMASDPLCLTYSYLSHVDLVKDLNSGLIGALLVCREGSL |
| AG288_2- | AKEKTQTLHKFILLFAVFDEGKSWHSETKNSLMQDRDAASARAWPKMHTVNGYVNRSLPGL |
| (1640- | IGCHRKSVYWHVIGMGTTPEVHSIFLEGHTFLVRNHRQASLEISPITFLTAQTLLMDLGQFLLF |
| Y2332)- | CHISSHQHDGMEAYVKVDSCPEEPQLRMKNNEEAEDYDDDLTDSEMDVVRFDDDNSPSFIQI |
| FXIa- | RSVAKKHPKTWVHYIAAEEEDWDYAPLVLAPDDRSYKSQYLNNGPQRIGRKYKKVRFMAY |
| AG864 | TDETFKTREAIQHESGILGPLLYGEVGDTLLIIFKNQASRPYNIYPHGITDVRPLYSRRLPKGVK |
| | HLKDFPILPGEIFKYKWTVTVEDGPTKSDPRCLTRYYSSFVNMERDLASGLIGPLLICYKESVD |
| | QRGNQIMSDKRNVILFSVFDENRSWYLTENIQRFLPNPAGVQLEDPEFQASNIMHSINGYVFD |
| | SLQLSVCLHEVAYWYILSIGAQTDFLSVFFSGYTFKHKMVYEDTLTLFPFSGETVFMSMENPG |
| | LWILGCHNSDFRNRGMTALLKVSSCDKNTGDYYEDSYEDISAYLLSKNNAIEPRSFSQNGPG |
| | ASPGTSSTGSPGASPGTSSTGSPGTPGSGTASSSPGSSTPSGATGSPGTPGSGTASSSPGSSTPSG |
| | ATGSPGTPGSGTASSSPGSSTPSGATGSPGSSTPSGATGSPGSSPSASTGTGPGSSPSASTGTGPG |
| | ASPGTSSTGSPGTPGSGTASSSPGSSTPSGATGSPGSSPSASTGTGPGSSPSASTGTGPGASPGTS |
| | STGSPGASPGTSSTGSPGSSTPSGATGSPGSSPSASTGTGPGASPGTSSTGSPGSSPSASTGTGPG |
| | TPGSGTASSSPGSSTPSGATGSPPVLKRHQREITRTTLQSDQEEIDYDDTISVEMKKEDFDIYDE |
| | DENQSPRSFQKKTRHYFIAAVERLWDYGMSSSPHVLRNRAQSGSVPQFKKVVFQEFTDGSFT |
| | QPLYRGELNEHLGLLGPYIRAEVEDNIMVTFRNQASRPYSFYSSLISYEEDQRQGAEPRKNFV |
| | KPNETKTYFWKVQHHMAPTKDEFDCKAWAYFSDVDLEKDVHSGLIGPLLVCHTNTLNPAH |
| | GRQVTVQEFALFFTIFDETKSWYFTENMERNCRAPCNIQMEDPTFKENYRFHAINGYIMDTLP |
| | GLVMAQDQRIRWYLLSMGSNENIHSIHFSGHVFTVRKKEEYKMALYNLYPGVFETVEMLPS |
| | KAGIWRVECLIGEHLHAGMSTLFLVYSNKCQTPLGMASGHIRDFQITASGQYGQWAPKLARL |
| | HYSGSINAWSTKEPFSWIKVDLLAPMIIHGIKTQGARQKFSSLYISQFIIMYSLDGKKWQTYRG |
| | NSTGTLMVFFGNVDSSGIKHNIFNPPIIARYIRLHPTHYSIRSTLRMELMGCDLNSCSMPLGME |
| | SKAISDAQITASSYFTNMFATWSPSKARLHLQGRSNAWRPQVNNPKEWLQVDFQKTMKVTG |
| | VTTQGVKSLLTSMYVKEFLISSSQDGHQWTLFFQNGKVKVFQGNQDSFTPVVNSLDPPLLTR |
| | YLRIHPQSWVHQIALRMEVLGCEAQDLYKLTRAETGGASPGTSSTGSPGSSPSASTGTGPGSS |
| | PSASTGTGPGTPGSGTASSSPGSSTPSGATGSPGSSPSASTGTGPGASPGTSSTGSPGTPGSGTAS |
| | SSPGSSTPSGATGSPGTPGSGTASSSPGASPGTSSTGSPGASPGTSSTGSPGTPGSGTASSSPGSS |
| | TPSGATGSPGASPGTSSTGSPGTPGSGTASSSPGSSTPSGATGSPGSSPSASTGTGPGSSPSASTG |
| | TGPGSSTPSGATGSPGSSTPSGATGSPGASPGTSSTGSPGASPGTSSTGSPGASPGTSSTGSPGTP |
| | GSGTASSSPGASPGTSSTGSPGASPGTSSTGSPGASPGTSSTGSPGSSPSASTGTGPGTPGSGTAS |
| | SSPGASPGTSSTGSPGASPGTSSTGSPGASPGTSSTGSPGSSTPSGATGSPGSSTPSGATGSPGAS |
| | PGTSSTGSPGTPGSGTASSSPGSSTPSGATGSPGSSTPSGATGSPGSSTPSGATGSPGSSPSASTG |
| | TGPGASPGTSSTGSPGASPGTSSTGSPGTPGSGTASSSPGASPGTSSTGSPGASPGTSSTGSPGAS |
| | PGTSSTGSPGASPGTSSTGSPGTPGSGTASSSPGSSTPSGATGSPGTPGSGTASSSPGSSTPSGAT |
| | GSPGTPGSGTASSSPGSSTPSGATGSPGSSTPSGATGSPGSSPSASTGTGPGSSPSASTGTGPGAS |
| | PGTSSTGSPGTPGSGTASSSPGSSTPSGATGSPGSSPSASTGTGPGSSPSASTGTGPGASPGTSST |
| | GSPGASPGTSSTGSPGSSTPSGATGSPGSSPSASTGTGPGASPGTSSTGSPGSSPSASTGTGPGTP |
| | GSGTASSSPGSSTPSGATGSPGSSTPSGATGSPGASPGTSSTGSP |
| FVIII | ATRRYYLGAVELSWDYMQSDLGELPVDARFPPRVPKSFPFNTSVVYKKTLFVEFTDHLFNIA |
| BDD9 (1- | KPRPPWMGLLGPTIQAEVYDTVVITLKNMASHPVSLHAVGVSYWKASEGAEYDDQTSQREK |
| 743) | EDDKVFPGGSHTYVWQVLKENGPMASDPLCLTYSYLSHVDLVKDLNSGLIGALLVCREGSL |
| AG288_2- | AKEKTQTLHKFILLFAVFDEGKSWHSETKNSLMQDRDAASARAWPKMHTVNGYVNRSLPGL |
| (1638- | IGCHRKSVYWHVIGMGTTPEVHSIFLEGHTFLVRNHRQASLEISPITFLTAQTLLMDLGQFLLF |
| Y2332)- | CHISSHQHDGMEAYVKVDSCPEEPQLRMKNNEEAEDYDDDLTDSEMDVVRFDDDNSPSFIQI |
| FXIa- | RSVAKKHPKTWVHYIAAEEEDWDYAPLVLAPDDRSYKSQYLNNGPQRIGRKYKKVRFMAY |
| AG864 | TDETFKTREAIQHESGILGPLLYGEVGDTLLIIFKNQASRPYNIYPHGITDVRPLYSRRLPKGVK |
| | HLKDFPILPGEIFKYKWTVTVEDGPTKSDPRCLTRYYSSFVNMERDLASGLIGPLLICYKESVD |
| | QRGNQIMSDKRNVILFSVFDENRSWYLTENIQRFLPNPAGVQLEDPEFQASNIMHSINGYVFD |
| | SLQLSVCLHEVAYWYILSIGAQTDFLSVFFSGYTFKHKMVYEDTLTLFPFSGETVFMSMENPG |
| | LWILGCHNSDFRNRGMTALLKVSSCDKNTGDYYEDSYEDISAYLLSKNNAIEPRSFSGPGASP |
| | GTSSTGSPGASPGTSSTGSPGTPGSGTASSSPGSSTPSGATGSPGTPGSGTASSSPGSSTPSGATG |
| | SPGTPGSGTASSSPGSSTPSGATGSPGSSTPSGATGSPGSSPSASTGTGPGSSPSASTGTGPGASP |
| | GTSSTGSPGTPGSGTASSSPGSSTPSGATGSPGSSPSASTGTGPGSSPSASTGTGPGASPGTSSTG |
| | SPGASPGTSSTGSPGSSTPSGATGSPGSSPSASTGTGPGASPGTSSTGSPGSSPSASTGTGPGTPG |
| | SGTASSSPGSSTPSGATGSQNPPVLKRHQREITRTTLQSDQEEIDYDDTISVEMKKEDFDIYDE |
| | DENQSPRSFQKKTRHYFIAAVERLWDYGMSSSPHVLRNRAQSGSVPQFKKVVFQEFTDGSFT |
| | QPLYRGELNEHLGLLGPYIRAEVEDNIMVTFRNQASRPYSFYSSLISYEEDQRQGAEPRKNFV |
| | KPNETKTYFWKVQHHMAPTKDEFDCKAWAYFSDVDLEKDVHSGLIGPLLVCHTNTLNPAH |
| | GRQVTVQEFALFFTIFDETKSWYFTENMERNCRAPCNIQMEDPTFKENYRFHAINGYIMDTLP |
| | GLVMAQDQRIRWYLLSMGSNENIHSIHFSGHVFTVRKKEEYKMALYNLYPGVFETVEMLPS |
| | KAGIWRVECLIGEHLHAGMSTLFLVYSNKCQTPLGMASGHIRDFQITASGQYGQWAPKLARL |
| | HYSGSINAWSTKEPFSWIKVDLLAPMIIHGIKTQGARQKFSSLYISQFIIMYSLDGKKWQTYRG |
| | NSTGTLMVFFGNVDSSGIKHNIFNPPIIARYIRLHPTHYSIRSTLRMELMGCDLNSCSMPLGME |
| | SKAISDAQITASSYFTNMFATWSPSKARLHLQGRSNAWRPQVNNPKEWLQVDFQKTMKVTG |
| | VTTQGVKSLLTSMYVKEFLISSSQDGHQWTLFFQNGKVKVFQGNQDSFTPVVNSLDPPLLTR |
| | YLRIHPQSWVHQIALRMEVLGCEAQDLYKLTRAETGGASPGTSSTGSPGSSPSASTGTGPGSS |
| | PSASTGTGPGTPGSGTASSSPGSSTPSGATGSPGSSPSASTGTGPGASPGTSSTGSPGTPGSGTAS |
| | SSPGSSTPSGATGSPGTPGSGTASSSPGASPGTSSTGSPGASPGTSSTGSPGTPGSGTASSSPGSS |
| | TPSGATGSPGASPGTSSTGSPGTPGSGTASSSPGSSTPSGATGSPGSSPSASTGTGPGSSPSASTG |
| | TGPGSSTPSGATGSPGSSTPSGATGSPGASPGTSSTGSPGASPGTSSTGSPGASPGTSSTGSPGTP |
| | GSGTASSSPGASPGTSSTGSPGASPGTSSTGSPGASPGTSSTGSPGSSPSASTGTGPGTPGSGTAS |
| | SSPGASPGTSSTGSPGASPGTSSTGSPGASPGTSSTGSPGSSTPSGATGSPGSSTPSGATGSPGAS |
| | PGTSSTGSPGTPGSGTASSSPGSSTPSGATGSPGSSTPSGATGSPGSSTPSGATGSPGSSPSASTG |
| | TGPGASPGTSSTGSPGASPGTSSTGSPGTPGSGTASSSPGASPGTSSTGSPGASPGTSSTGSPGAS |
| | PGTSSTGSPGASPGTSSTGSPGTPGSGTASSSPGSSTPSGATGSPGTPGSGTASSSPGSSTPSGAT |
| | GSPGTPGSGTASSSPGSSTPSGATGSPGSSTPSGATGSPGSSPSASTGTGPGSSPSASTGTGPGAS |
| | PGTSSTGSPGTPGSGTASSSPGSSTPSGATGSPGSSPSASTGTGPGSSPSASTGTGPGASPGTSST |
| | GSPGASPGTSSTGSPGSSTPSGATGSPGSSPSASTGTGPGASPGTSSTGSPGSSPSASTGTGPGTP |
| | GSGTASSSPGSSTPSGATGSPGSSTPSGATGSPGASPGTSSTGSP |
| BDD10 (1- | ATRRYYLGAVELSWDYMQSDLGELPVDARFPPRVPKSFPFNTSVVYKKTLFVEFTDHLFNIA |
| 745) | KPRPPWMGLLGPTIQAEVYDTVVITLKNMASHPVSLHAVGVSYWKASEGAEYDDQTSQREK |
| AG288_2- | EDDKVFPGGSHTYVWQVLKENGPMASDPLCLTYSYLSHVDLVKDLNSGLIGALLVCREGSL |
| (1640- | AKEKTQTLHKFILLFAVFDEGKSWHSETKNSLMQDRDAASARAWPKMHTVNGYVNRSLPGL |
| Y2332)- | IGCHRKSVYWHVIGMGTTPEVHSIFLEGHTFLVRNHRQASLEISPITFLTAQTLLMDLGQFLLF |
| FXIa- | CHISSHQHDGMEAYVKVDSCPEEPQLRMKNNEEAEDYDDDLTDSEMDVVRFDDDNSPSFIQI |
| AG864 | RSVAKKHPKTWVHYIAAEEEDWDYAPLVLAPDDRSYKSQYLNNGPQRIGRKYKKVRFMAY |
| | TDETFKTREAIQHESGILGPLLYGEVGDTLLIIFKNQASRPYNIYPHGITDVRPLYSRRLPKGVK |
| | HLKDFPILPGEIFKYKWTVTVEDGPTKSDPRCLTRYYSSFVNMERDLASGLIGPLLICYKESVD |
| | QRGNQIMSDKRNVILFSVFDENRSWYLTENIQRFLPNPAGVQLEDPEFQASNIMHSINGYVFD |
| | SLQLSVCLHEVAYWYILSIGAQTDFLSVFFSGYTFKHKMVYEDTLTLFPFSGETVFMSMENPG |
| | LWILGCHNSDFRNRGMTALLKVSSCDKNTGDYYEDSYEDISAYLLSKNNAIEPRSFSQNGPG |
| | ASPGTSSTGSPGASPGTSSTGSPGTPGSGTASSSPGSSTPSGATGSPGTPGSGTASSSPGSSTPSG |
| | ATGSPGTPGSGTASSSPGSSTPSGATGSPGSSTPSGATGSPGSSPSASTGTGPGSSPSASTGTGPG |
| | ASPGTSSTGSPGTPGSGTASSSPGSSTPSGATGSPGSSPSASTGTGPGSSPSASTGTGPGASPGTS |
| | STGSPGASPGTSSTGSPGSSTPSGATGSPGSSPSASTGTGPGASPGTSSTGSPGSSPSASTGTGPG |
| | TPGSGTASSSPGSSTPSGATGSPPVLKRHQAEITRTTLQSDQEEIDYDDTISVEMKKEDFDIYDE |
| | DENQSPRSFQKKTRHYFIAAVERLWDYGMSSSPHVLRNRAQSGSVPQFKKVVFQEFTDGSFT |
| | QPLYRGELNEHLGLLGPYIRAEVEDNIMVTFRNQASRPYSFYSSLISYEEDQRQGAEPRKNFV |
| | KPNETKTYFWKVQHHMAPTKDEFDCKAWAYFSDVDLEKDVHSGLIGPLLVCHTNTLNPAH |
| | GRQVTVQEFALFFTIFDETKSWYFTENMERNCRAPCNIQMEDPTFKENYRFHAINGYIMDTLP |
| | GLVMAQDQRIRWYLLSMGSNENIHSIHFSGHVFTVRKKEEYKMALYNLYPGVFETVEMLPS |
| | KAGIWRVECLIGEHLHAGMSTLFLVYSNKCQTPLGMASGHIRDFQITASGQYGQWAPKLARL |
| | HYSGSINAWSTKEPFSWIKVDLLAPMIIHGIKTQGARQKFSSLYISQFIIMYSLDGKKWQTYRG |
| | NSTGTLMVFFGNVDSSGIKHNIFNPPIIARYIRLHPTHYSIRSTLRMELMGCDLNSCSMPLGME |
| | SKAISDAQITASSYFTNMFATWSPSKARLHLQGRSNAWRPQVNNPKEWLQVDFQKTMKVTG |
| | VTTQGVKSLLTSMYVKEFLISSSQDGHQWTLFFQNGKVKVFQGNQDSFTPVVNSLDPPLLTR |
| | YLRIHPQSWVHQIALRMEVLGCEAQDLYKLTRAETGGASPGTSSTGSPGSSPSASTGTGPGSS |
| | PSASTGTGPGTPGSGTASSSPGSSTPSGATGSPGSSPSASTGTGPGASPGTSSTGSPGTPGSGTAS |
| | SSPGSSTPSGATGSPGTPGSGTASSSPGASPGTSSTGSPGASPGTSSTGSPGTPGSGTASSSPGSS |
| | TPSGATGSPGASPGTSSTGSPGTPGSGTASSSPGSSTPSGATGSPGSSPSASTGTGPGSSPSASTG |
| | TGPGSSTPSGATGSPGSSTPSGATGSPGASPGTSSTGSPGASPGTSSTGSPGASPGTSSTGSPGTP |
| | GSGTASSSPGASPGTSSTGSPGASPGTSSTGSPGASPGTSSTGSPGSSPSASTGTGPGTPGSGTAS |
| | SSPGASPGTSSTGSPGASPGTSSTGSPGASPGTSSTGSPGSSTPSGATGSPGSSTPSGATGSPGAS |
| | PGTSSTGSPGTPGSGTASSSPGSSTPSGATGSPGSSTPSGATGSPGSSTPSGATGSPGSSPSASTG |
| | TGPGASPGTSSTGSPGASPGTSSTGSPGTPGSGTASSSPGASPGTSSTGSPGASPGTSSTGSPGAS |
| | PGTSSTGSPGASPGTSSTGSPGTPGSGTASSSPGSSTPSGATGSPGTPGSGTASSSPGSSTPSGAT |
| | GSPGTPGSGTASSSPGSSTPSGATGSPGSSTPSGATGSPGSSPSASTGTGPGSSPSASTGTGPGAS |
| | PGTSSTGSPGTPGSGTASSSPGSSTPSGATGSPGSSPSASTGTGPGSSPSASTGTGPGASPGTSST |
| | GSPGASPGTSSTGSPGSSTPSGATGSPGSSPSASTGTGPGASPGTSSTGSPGSSPSASTGTGPGTP |
| | GSGTASSSPGSSTPSGATGSPGSSTPSGATGSPGASPGTSSTGSP |
| FVIII | ATRRYYLGAVELSWDYMQSDLGELPVDARFPPRVPKSFPFNTSVVYKKTLFVEFTDHLFNIA |
| BDD10- | KPRPPWMGLLGPTIQAEVYDTVVITLKNMASHPVSLHAVGVSYWKASEGAEYDDQTSQREK |
| FXIa- | EDDKVFPGGSHTYVWQVLKENGPMASDPLCLTYSYLSHVDLVKDLNSGLIGALLVCREGSL |
| AG288_2 | AKEKTQTLHKFILLFAVFDEGKSWHSETKNSLMQDRDAASARAWPKMHTVNGYVNRSLPGL |
| | IGCHRKSVYWHVIGMGTTPEVHSIFLEGHTFLVRNHRQASLEISPITFLTAQTLLMDLGQFLLF |
| | CHISSHQHDGMEAYVKVDSCPEEPQLRMKNNEEAEDYDDDLTDSEMDVVRFDDDNSPSFIQI |
| | RSVAKKHPKTWVHYIAAEEEDWDYAPLVLAPDDRSYKSQYLNNGPQRIGRKYKKVRFMAY |
| | TDETFKTREAIQHESGILGPLLYGEVGDTLLIIFKNQASRPYNIYPHGITDVRPLYSRRLPKGVK |
| | HLKDFPILPGEIFKYKWTVTVEDGPTKSDPRCLTRYYSSFVNMERDLASGLIGPLLICYKESVD |
| | QRGNQIMSDKRNVILFSVFDENRSWYLTENIQRFLPNPAGVQLEDPEFQASNIMHSINGYVFD |
| | SLQLSVCLHEVAYWYILSIGAQTDFLSVFFSGYTFKHKMVYEDTLTLFPFSGETVFMSMENPG |
| | LWILGCHNSDFRNRGMTALLKVSSCDKNTGDYYEDSYEDISAYLLSKNNAIEPRSFSQNPPVL |
| | KRHQAEITRTTLQSDQEEIDYDDTISVEMKKEDFDIYDEDENQSPRSFQKKTRHYFIAAVERL |
| | WDYGMSSSPHVLRNRAQSGSVPQFKKVVFQEFTDGSFTQPLYRGELNEHLGLLGPYIRAEVE |
| | DNIMVTFRNQASRPYSFYSSLISYEEDQRQGAEPRKNFVKPNETKTYFWKVQHHMAPTKDEF |
| | DCKAWAYFSDVDLEKDVHSGLIGPLLVCHTNTLNPAHGRQVTVQEFALFFTIFDETKSWYFT |
| | ENMERNCRAPCNIQMEDPTFKENYRFHAINGYIMDTLPGLVMAQDQRIRWYLLSMGSNENIH |
| | SIHFSGHVFTVRKKEEYKMALYNLYPGVFETVEMLPSKAGIWRVECLIGEHLHAGMSTLFLV |
| | YSNKCQTPLGMASGHIRDFQITASGQYGQWAPKLARLHYSGSINAWSTKEPFSWIKVDLLAP |
| | MIIHGIKTQGARQKFSSLYISQFIIMYSLDGKKWQTYRGNSTGTLMVFFGNVDSSGIKHNIFNP |
| | PIIARYIRLHPTHYSIRSTLRMELMGCDLNSCSMPLGMESKAISDAQITASSYFTNMFATWSPS |
| | KARLHLQGRSNAWRPQVNNPKEWLQVDFQKTMKVTGVTTQGVKSLLTSMYVKEFLISSSQD |
| | GHQWTLFFQNGKVKVFQGNQDSFTPVVNSLDPPLLTRYLRIHPQSWVHQIALRMEVLGCEA |
| | QDLYKLTRAETGAGSPGAETAPGASPGTSSTGSPGASPGTSSTGSPGTPGSGTASSSPGSSTPSG |
| | ATGSPGTPGSGTASSSPGSSTPSGATGSPGTPGSGTASSSPGSSTPSGATGSPGSSTPSGATGSPG |
| | SSPSASTGTGPGSSPSASTGTGPGASPGTSSTGSPGTPGSGTASSSPGSSTPSGATGSPGSSPSAS |
| | TGTGPGSSPSASTGTGPGASPGTSSTGSPGASPGTSSTGSPGSSTPSGATGSPGSSPSASTGTGPG |
| | ASPGTSSTGSPGSSPSASTGTGPGTPGSGTASSSPGSSTPSGATGSGAETAEQKLISEEDLSPATG |
| FVIII | ATRRYYLGAVELSWDYMQSDLGELPVDARFPPRVPKSFPFNTSVVYKKTLFVEFTDHLFNIA |
| BDD10- | KPRPPWMGLLGPTIQAEVYDTVVITLKNMASHPVSLHAVGVSYWKASEGAEYDDQTSQREK |
| FXIa- | EDDKVFPGGSHTYVWQVLKENGPMASDPLCLTYSYLSHVDLVKDLNSGLIGALLVCREGSL |
| AG864 | AKEKTQTLHKFILLFAVFDEGKSWHSETKNSLMQDRDAASARAWPKMHTVNGYVNRSLPGL |
| | IGCHRKSVYWHVIGMGTTPEVHSIFLEGHTFLVRNHRQASLEISPITFLTAQTLLMDLGQFLLF |
| | CHISSHQHDGMEAYVKVDSCPEEPQLRMKNNEEAEDYDDDLTDSEMDVVRFDDDNSPSFIQI |
| | RSVAKKHPKTWVHYIAAEEEDWDYAPLVLAPDDRSYKSQYLNNGPQRIGRKYKKVRFMAY |
| | TDETFKTREAIQHESGILGPLLYGEVGDTLLIIFKNQASRPYNIYPHGITDVRPLYSRRLPKGVK |
| | HLKDFPILPGEIFKYKWTVTVEDGPTKSDPRCLTRYYSSFVNMERDLASGLIGPLLICYKESVD |
| | QRGNQIMSDKRNVILFSVFDENRSWYLTENIQRFLPNPAGVQLEDPEFQASNIMHSINGYVFD |
| | SLQLSVCLHEVAYWYILSIGAQTDFLSVFFSGYTFKHKMVYEDTLTLFPFSGETVFMSMENPG |
| | LWILGCHNSDFRNRGMTALLKVSSCDKNTGDYYEDSYEDISAYLLSKNNAIEPRSFSQNPPVL |
| | KRHQAEITRTTLQSDQEEIDYDDTISVEMKKEDFDIYDEDENQSPRSFQKKTRHYFIAAVERL |
| | WDYGMSSSPHVLRNRAQSGSVPQFKKVVFQEFTDGSFTQPLYRGELNEHLGLLGPYIRAEVE |
| | DNIMVTFRNQASRPYSFYSSLISYEEDQRQGAEPRKNFVKPNETKTYFWKVQHHMAPTKDEF |
| | DCKAWAYFSDVDLEKDVHSGLIGPLLVCHTNTLNPAHGRQVTVQEFALFFTIFDETKSWYFT |
| | ENMERNCRAPCNIQMEDPTFKENYRFHAINGYIMDTLPGLVMAQDQRIRWYLLSMGSNENIH |
| | SIHFSGHVFTVRKKEEYKMALYNLYPGVFETVEMLPSKAGIWRVECLIGEHLHAGMSTLFLV |
| | YSNKCQTPLGMASGHIRDFQITASGQYGQWAPKLARLHYSGSINAWSTKEPFSWIKVDLLAP |
| | MIIHGIKTQGARQKFSSLYISQFIIMYSLDGKKWQTYRGNSTGTLMVFFGNVDSSGIKHNIFNP |
| | PIIARYIRLHPTHYSIRSTLRMELMGCDLNSCSMPLGMESKAISDAQITASSYFTNMFATWSPS |
| | KARLHLQGRSNAWRPQVNNPKEWLQVDFQKTMKVTGVTTQGVKSLLTSMYVKEFLISSSQD |
| | GHQWTLFFQNGKVKVFQGNQDSFTPVVNSLDPPLLTRYLRIHPQSWVHQIALRMEVLGCEA |
| | QDLYKLTRAETGGASPGTSSTGSPGSSPSASTGTGPGSSPSASTGTGPGTPGSGTASSSPGSSTP |
| | SGATGSPGSSPSASTGTGPGASPGTSSTGSPGTPGSGTASSSPGSSTPSGATGSPGTPGSGTASSS |
| | PGASPGTSSTGSPGASPGTSSTGSPGTPGSGTASSSPGSSTPSGATGSPGASPGTSSTGSPGTPGS |
| | GTASSSPGSSTPSGATGSPGSSPSASTGTGPGSSPSASTGTGPGSSTPSGATGSPGSSTPSGATGS |
| | PGASPGTSSTGSPGASPGTSSTGSPGASPGTSSTGSPGTPGSGTASSSPGASPGTSSTGSPGASPG |
| | TSSTGSPGASPGTSSTGSPGSSPSASTGTGPGTPGSGTASSSPGASPGTSSTGSPGASPGTSSTGS |
| | PGASPGTSSTGSPGSSTPSGATGSPGSSTPSGATGSPGASPGTSSTGSPGTPGSGTASSSPGSSTP |
| | SGATGSPGSSTPSGATGSPGSSTPSGATGSPGSSPSASTGTGPGASPGTSSTGSPGASPGTSSTGS |
| | PGTPGSGTASSSPGASPGTSSTGSPGASPGTSSTGSPGASPGTSSTGSPGASPGTSSTGSPGTPGS |
| | GTASSSPGSSTPSGATGSPGTPGSGTASSSPGSSTPSGATGSPGTPGSGTASSSPGSSTPSGATGS |
| | PGSSTPSGATGSPGSSPSASTGTGPGSSPSASTGTGPGASPGTSSTGSPGTPGSGTASSSPGSSTP |
| | SGATGSPGSSPSASTGTGPGSSPSASTGTGPGASPGTSSTGSPGASPGTSSTGSPGSSTPSGATGS |
| | PGSSPSASTGTGPGASPGTSSTGSPGSSPSASTGTGPGTPGSGTASSSPGSSTPSGATGSPGSSTP |
| | SGATGSPGASPGTSSTGSP |
| FVIII | ATRRYYLGAVELSWDYMQSDLGELPVDARFPPRVPKSFPFNTSVVYKKTLFVEFTDHLFNIA |
| BDD10- | KPRPPWMGLLGPTIQAEVYDTVVITLKNMASHPVSLHAVGVSYWKASEGAEYDDQTSQREK |
| FXIa- | EDDKVFPGGSHTYVWQVLKENGPMASDPLCLTYSYLSHVDLVKDLNSGLIGALLVCREGSL |
| AE864 | AKEKTQTLHKFILLFAVFDEGKSWHSETKNSLMQDRDAASARAWPKMHTVNGYVNRSLPGL |
| | IGCHRKSVYWHVIGMGTTPEVHSIFLEGHTFLVRNHRQASLEISPITFLTAQTLLMDLGQFLLF |
| | CHISSHQHDGMEAYVKVDSCPEEPQLRMKNNEEAEDYDDDLTDSEMDVVRFDDDNSPSFIQI |
| | RSVAKKHPKTWVHYIAAEEEDWDYAPLVLAPDDRSYKSQYLNNGPQRIGRKYKKVRFMAY |
| | TDETFKTREAIQHESGILGPLLYGEVGDTLLIIFKNQASRPYNIYPHGITDVRPLYSRRLPKGVK |
| | HLKDFPILPGEIFKYKWTVTVEDGPTKSDPRCLTRYYSSFVNMERDLASGLIGPLLICYKESVD |
| | QRGNQIMSDKRNVILFSVFDENRSWYLTENIQRFLPNPAGVQLEDPEFQASNIMHSINGYVFD |
| | SLQLSVCLHEVAYWYILSIGAQTDFLSVFFSGYTFKHKMVYEDTLTLFPFSGETVFMSMENPG |
| | LWILGCHNSDFRNRGMTALLKVSSCDKNTGDYYEDSYEDISAYLLSKNNAIEPRSFSQNPPVL |
| | KRHQAEITRTTLQSDQEEIDYDDTISVEMKKEDFDIYDEDENQSPRSFQKKTRHYFIAAVERL |
| | WDYGMSSSPHVLRNRAQSGSVPQFKKVVFQEFTDGSFTQPLYRGELNEHLGLLGPYIRAEVE |
| | DNIMVTFRNQASRPYSFYSSLISYEEDQRQGAEPRKNFVKPNETKTYFWKVQHHMAPTKDEF |
| | DCKAWAYFSDVDLEKDVHSGLIGPLLVCHTNTLNPAHGRQVTVQEFALFFTIFDETKSWYFT |
| | ENMERNCRAPCNIQMEDPTFKENYRFHAINGYIMDTLPGLVMAQDQRIRWYLLSMGSNENIH |
| | SIHFSGHVFTVRKKEEYKMALYNLYPGVFETVEMLPSKAGIWRVECLIGEHLHAGMSTLFLV |
| | YSNKCQTPLGMASGHIRDFQITASGQYGQWAPKLARLHYSGSINAWSTKEPFSWIKVDLLAP |
| | MIIHGIKTQGARQKFSSLYISQFIIMYSLDGKKWQTYRGNSTGTLMVFFGNVDSSGIKHNIFNP |
| | PIIARYIRLHPTHYSIRSTLRMELMGCDLNSCSMPLGMESKAISDAQITASSYFTNMFATWSPS |
| | KARLHLQGRSNAWRPQVNNPKEWLQVDFQKTMKVTGVTTQGVKSLLTSMYVKEFLISSSQD |
| | GHQWTLFFQNGKVKVFQGNQDSFTPVVNSLDPPLLTRYLRIHPQSWVHQIALRMEVLGCEA |
| | QDLYKLTRAETGGSPAGSPTSTEEGTSESATPESGPGTSTEPSEGSAPGSPAGSPTSTEEGTSTE |
| | PSEGSAPGTSTEPSEGSAPGTSESATPESGPGSEPATSGSETPGSEPATSGSETPGSPAGSPTSTE |
| | EGTSESATPESGPGTSTEPSEGSAPGTSTEPSEGSAPGSPAGSPTSTEEGTSTEPSEGSAPGTSTE |
| | PSEGSAPGTSESATPESGPGTSTEPSEGSAPGTSESATPESGPGSEPATSGSETPGTSTEPSEGSA |
| | PGTSTEPSEGSAPGTSESATPESGPGTSESATPESGPGSPAGSPTSTEEGTSESATPESGPGSEPA |
| | TSGSETPGTSESATPESGPGTSTEPSEGSAPGTSTEPSEGSAPGTSTEPSEGSAPGTSTEPSEGSAP |
| | GTSTEPSEGSAPGTSTEPSEGSAPGSPAGSPTSTEEGTSTEPSEGSAPGTSESATPESGPGSEPAT |
| | SGSETPGTSESATPESGPGSEPATSGSETPGTSESATPESGPGTSTEPSEGSAPGTSESATPESGP |
| | GSPAGSPTSTEEGSPAGSPTSTEEGSPAGSPTSTEEGTSESATPESGPGTSTEPSEGSAPGTSESA |
| | TPESGPGSEPATSGSETPGTSESATPESGPGSEPATSGSETPGTSESATPESGPGTSTEPSEGSAP |
| | GSPAGSPTSTEEGTSESATPESGPGSEPATSGSETPGTSESATPESGPGSPAGSPTSTEEGSPAGS |
| | PTSTEEGTSTEPSEGSAPGTSESATPESGPGTSESATPESGPGTSESATPESGPGSEPATSGSETP |
| | GSEPATSGSETPGSPAGSPTSTEEGTSTEPSEGSAPGTSTEPSEGSAPGSEPATSGSETPGTSESA |
| | TPESGPGTSTEPSEGSAP |

Sequence name reflects N-to C-terminus configuration of the FVIII variant and XTEN components: signal peptide (SP); linker (L); cleavage sequence (CS) may be denoted by protease name active on the sequence, and XTEN components by family name and length, with insertion points for components denoted by FVIII amino acid and numbered positions adjacent to the inserted sequence or A1 being the N-terminus and Y2332 being the C-terminus of the FVIII.

The application's sequence listing, which the Patent Office published only in electronic form, follows.

SEQUENCE LISTING (1701 sequences)

SEQ ID NO: 1 - protein, 2351 aa, Homo sapiens
MQIELSTCFFLCLLRFCFSATRRYYLGAVELSWDYMQSDLGELPVDARFPPRVPKSFPFNTSVVYKKTLFVEFTDHLFNIAKPRPPWMGLLGPTIQAEVYDTVVITLKNMASHPVSLHAVGVSYWKASEGAEYDDQTSQREKEDDKVFPGGSHTYVWQVLKENGPMASDPLCLTYSYLSHVDLVKDLNSGLIGALLVCREGSLAKEKTQTLHKFILLFAVFDEGKSWHSETKNSLMQDRDAASARAWPKMHTVNGYVNRSLPGLIGCHRKSVYWHVIGMGTTPEVHSIFLEGHTFLVRNHRQASLEISPITFLTAQTLLMDLGQFLLFCHISSHQHDGMEAYVKVDSCPEEPQLRMKNNEEAEDYDDDLTDSEMDVVRFDDDNSPSFIQIRSVAKKHPKTWVHYIAAEEEDWDYAPLVLAPDDRSYKSQYLNNGPQRIGRKYKKVRFMAYTDETFKTREAIQHESGILGPLLYGEVGDTLLIIFKNQASRPYNIYPHGITDVRPLYSRRLPKGVKHLKDFPILPGEIFKYKWTVTVEDGPTKSDPRCLTRYYSSFVNMERDLASGLIGPLLICYKESVDQRGNQIMSDKRNVILFSVFDENRSWYLTENIQRFLPNPAGVQLEDPEFQASNIMHSINGYVFDSLQLSVCLHEVAYWYILSIGAQTDFLSVFFSGYTFKHKMVYEDTLTLFPFSGETVFMSMENPGLWILGCHNSDFRNRGMTALLKVSSCDKNTGDYYEDSYEDISAYLLSKNNAIEPRSFSQNSRHPSTRQKQFNATTIPENDIEKTDPWFAHRTPMPKIQNVSSSDLLMLLRQSPTPHGLSLSDLQEAKYETFSDDPSPGAIDSNNSLSEMTHFRPQLHHSGDMVFTPESGLQLRLNEKLGTTAATELKKLDFKVSSTSNNLISTIPSDNLAAGTDNTSSLGPPSMPVHYDSQLDTTLFGKKSSPLTESGGPLSLSEENNDSKLLESGLMNSQESSWGKNVSSTESGRLFKGKRAHGPALLTKDNALFKVSISLLKTNKTSNNSATNRKTHIDGPSLLIENSPSVWQNILESDTEFKKVTPLIHDRMLMDKNATALRLNHMSNKTTSSKNMEMVQQKKEGPIPPDAQNPDMSFFKMLFLPESARWIQRTHGKNSLNSGQGPSPKQLVSLGPEKSVEGQNFLSEKNKVVVGKGEFTKDVGLKEMVFPSSRNLFLTNLDNLHENNTHNQEKKIQEEIEKKETLIQENVVLPQIHTVTGTKNFMKNLFLLSTRQNVEGSYDGAYAPVLQDFRSLNDSTNRTKKHTAHFSKKGEEENLEGLGNQTKQIVEKYACTTRISPNTSQQNFVTQRSKRALKQFRLPLEETELEKRIIVDDTSTQWSKNMKHLTPSTLTQIDYNEKEKGAITQSPLSDCLTRSHSIPQANRSPLPIAKVSSFPSIRPIYLTRVLFQDNSSHLPAASYRKKDSGVQESSHFLQGAKKNNLSLAILTLEMTGDQREVGSLGTSATNSVTYKKVENTVLPKPDLPKTSGKVELLPKVHIYQKDLFPTETSNGSPGHLDLVEGSLLQGTEGAIKWNEANRPGKVPFLRVATESSAKTPSKLLDPLAWDNHYGTQIPKEEWKSQEKSPEKTAFKKKDTILSLNACESNHAIAAINEGQNKPEIEVTWAKQGRTERLCSQNPPVLKRHQREITRTTLQSDQEEIDYDDTISVEMKKEDFDIYDEDENQSPRSFQKKTRHYFIAAVERLWDYGMSSSPHVLRNRAQSGSVPQFKKVVFQEFTDGSFTQPLYRGELNEHLGLLGPYIRAEVEDNIMVTFRNQASRPYSFYSSLISYEEDQRQGAEPRKNFVKPNETKTYFWKVQHHMAPTKDEFDCKAWAYFSDVDLEKDVHSGLIGPLLVCHTNTLNPAHGRQVTVQEFALFFTIFDETKSWYFTENMERNCRAPCNIQMEDPTFKENYRFHAINGYIMDTLPGLVMAQDQRIRWYLLSMGSNENIHSIHFSGHVFTVRKKEEYKMALYNLYPGVFETVEMLPSKAGIWRVECLIGEHLHAGMSTLFLVYSNKCQTPLGMASGHIRDFQITASGQYGQWAPKLARLHYSGSINAWSTKEPFSWIKVDLLAPMIIHGIKTQGARQKFSSLYISQFIIMYSLDGKKWQTYRGNSTGTLMVFFGNVDSSGIKHNIFNPPIIARYIRLHPTHYSIRSTLRMELMGCDLNSCSMPLGMESKAISDAQITASSYFTNMFATWSPSKARLHLQGRSNAWRPQVNNPKEWLQVDFQKTMKVTGVTTQGVKSLLTSMYVKEFLISSSQDGHQWTLFFQNGKVKVFQGNQDSFTPVVNSLDPPLLTRYLRIHPQSWVHQIALRMEVLGCEAQDLY

SEQ ID NO: 2 - protein, 2332 aa, Homo sapiens
ATRRYYLGAVELSWDYMQSDLGELPVDARFPPRVPKSFPFNTSVVYKKTLFVEFTDHLFNIAKPRPPWMGLLGPTIQAEVYDTVVITLKNMASHPVSLHAVGVSYWKASEGAEYDDQTSQREKEDDKVFPGGSHTYVWQVLKENGPMASDPLCLTYSYLSHVDLVKDLNSGLIGALLVCREGSLAKEKTQTLHKFILLFAVFDEGKSWHSETKNSLMQDRDAASARAWPKMHTVNGYVNRSLPGLIGCHRKSVYWHVIGMGTTPEVHSIFLEGHTFLVRNHRQASLEISPITFLTAQTLLMDLGQFLLFCHISSHQHDGMEAYVKVDSCPEEPQLRMKNNEEAEDYDDDLTDSEMDVVRFDDDNSPSFIQIRSVAKKHPKTWVHYIAAEEEDWDYAPLVLAPDDRSYKSQYLNNGPQRIGRKYKKVRFMAYTDETFKTREAIQHESGILGPLLYGEVGDTLLIIFKNQASRPYNIYPHGITDVRPLYSRRLPKGVKHLKDFPILPGEIFKYKWTVTVEDGPTKSDPRCLTRYYSSFVNMERDLASGLIGPLLICYKESVDQRGNQIMSDKRNVILFSVFDENRSWYLTENIQRFLPNPAGVQLEDPEFQASNIMHSINGYVFDSLQLSVCLHEVAYWYILSIGAQTDFLSVFFSGYTFKHKMVYEDTLTLFPFSGETVFMSMENPGLWILGCHNSDFRNRGMTALLKVSSCDKNTGDYYEDSYEDISAYLLSKNNAIEPRSFSQNSRHPSTRQKQFNATTIPENDIEKTDPWFAHRTPMPKIQNVSSSDLLMLLRQSPTPHGLSLSDLQEAKYETFSDDPSPGAIDSNNSLSEMTHFRPQLHHSGDMVFTPESGLQLRLNEKLGTTAATELKKLDFKVSSTSNNLISTIPSDNLAAGTDNTSSLGPPSMPVHYDSQLDTTLFGKKSSPLTESGGPLSLSEENNDSKLLESGLMNSQESSWGKNVSSTESGRLFKGKRAHGPALLTKDNALFKVSISLLKTNKTSNNSATNRKTHIDGPSLLIENSPSVWQNILESDTEFKKVTPLIHDRMLMDKNATALRLNHMSNKTTSSKNMEMVQQKKEGPIPPDAQNPDMSFFKMLFLPESARWIQRTHGKNSLNSGQGPSPKQLVSLGPEKSVEGQNFLSEKNKVVVGKGEFTKDVGLKEMVFPSSRNLFLTNLDNLHENNTHNQEKKIQEEIEKKETLIQENVVLPQIHTVTGTKNFMKNLFLLSTRQNVEGSYDGAYAPVLQDFRSLNDSTNRTKKHTAHFSKKGEEENLEGLGNQTKQIVEKYACTTRISPNTSQQNFVTQRSKRALKQFRLPLEETELEKRIIVDDTSTQWSKNMKHLTPSTLTQIDYNEKEKGAITQSPLSDCLTRSHSIPQANRSPLPIAKVSSFPSIRPIYLTRVLFQDNSSHLPAASYRKKDSGVQESSHFLQGAKKNNLSLAILTLEMTGDQREVGSLGTSATNSVTYKKVENTVLPKPDLPKTSGKVELLPKVHIYQKDLFPTETSNGSPGHLDLVEGSLLQGTEGAIKWNEANRPGKVPFLRVATESSAKTPSKLLDPLAWDNHYGTQIPKEEWKSQEKSPEKTAFKKKDTILSLNACESNHAIAAINEGQNKPEIEVTWAKQGRTERLCSQNPPVLKRHQREITRTTLQSDQEEIDYDDTISVEMKKEDFDIYDEDENQSPRSFQKKTRHYFIAAVERLWDYGMSSSPHVLRNRAQSGSVPQFKKVVFQEFTDGSFTQPLYRGELNEHLGLLGPYIRAEVEDNIMVTFRNQASRPYSFYSSLISYEEDQRQGAEPRKNFVKPNETKTYFWKVQHHMAPTKDEFDCKAWAYFSDVDLEKDVHSGLIGPLLVCHTNTLNPAHGRQVTVQEFALFFTIFDETKSWYFTENMERNCRAPCNIQMEDPTFKENYRFHAINGYIMDTLPGLVMAQDQRIRWYLLSMGSNENIHSIHFSGHVFTVRKKEEYKMALYNLYPGVFETVEMLPSKAGIWRVECLIGEHLHAGMSTLFLVYSNKCQTPLGMASGHIRDFQITASGQYGQWAPKLARLHYSGSINAWSTKEPFSWIKVDLLAPMIIHGIKTQGARQKFSSLYISQFIIMYSLDGKKWQTYRGNSTGTLMVFFGNVDSSGIKHNIFNPPIIARYIRLHPTHYSIRSTLRMELMGCDLNSCSMPLGMESKAISDAQITASSYFTNMFATWSPSKARLHLQGRSNAWRPQVNNPKEWLQVDFQKTMKVTGVTTQGVKSLLTSMYVKEFLISSSQDGHQWTLFFQNGKVKVFQGNQDSFTPVVNSLDPPLLTRYLRIHPQSWVHQIALRMEVLGCEAQDLY

SEQ ID NO: 3 - protein, 2343 aa, Canis sp.
MQVELYTCCFLCLLPFSLSATRKYYLGAVELSWDYMQSDLLSALHADTSFSSRVPGSLPLTTSVTYRKTVFVEFTDDLFNIAKPRPPWMGLLGPTIQAEVYDTVVIVLKNMASHPVSLHAVGVSYWKASEGAEYEDQTSQKEKEDDNVIPGESHTYVWQVLKENGPMASDPPCLTYSYFSHVDLVKDLNSGLIGALLVCKEGSLAKERTQTLQEFVLLFAVFDEGKSWHSETNASLTQAEAQHELHTINGYVNRSLPGLTVCHKRSVYWHVIGMGTTPEVHSIFLEGHTFLVRNHRQASLEISPITFLTAQTFLMDLGQFLLFCHIPSHQHDGMEAYVKVDSCPEEPQLRMKNNEDKDYDDGLYDSDMDVVSFDDDSSSPFIQIRSVAKKHPKTWVHYIAAEEEDWDYAPSGPTPNDRSHKNLYLNNGPQRIGKKYKKVRFVAYTDETFKTREAIQYESGILGPLLYGEVGDTLLIIFKNQASRPYNIYPHGINYVTPLHTGRLPKGVKHLKDMPILPGEIFKYKWTVTVEDGPTKSDPRCLTRYYSSFINLERDLASGLIGPLLICYKESVDQRGNQMMSDKRNVILFSVFDENRSWYLTENMQRFLPNADVVQPHDPEFQLSNIMHSINGYVFDNLQLSVCLHEVAYWYILSVGAQTDFLSVFFSGYTFKHKMVYEDTLTLFPFSGETVFMSMENPGLWVLGCHNSDFRNRGMTALLKVSSCNRNIDDYYEDTYEDIPTPLLNENNVIKPRSFSQNSRHPSTKEKQLKATTTPENDIEKIDLQSGERTQLIKAQSVSSSDLLMLLGQNPTPRGLFLSDLREATDRADDHSRGAIERNKGPPEVASLRPELRHSEDREFTPEPELQLRLNENLGTNTTVELKKLDLKISSSSDSLMTSPTIPSDKLAAATEKTGSLGPPNMSVHFNSHLGTIVFGNNSSHLIQSGVPLELSEEDNDSKLLEAPLMNIQESSLRENVLSMESNRLFKEERIRGPASLIKDNALFKVNISSVKTNRAPVNLTTNRKTRVAIPTLLIENSTSVWQDIMLERNTEFKEVTSLIHNETFMDRNTTALGLNHVSNKTTLSKNVEMAHQKKEDPVPLRAENPDLSSSKIPFLPDWIKTHGKNSLSSEQRPSPKQLTSLGSEKSVKDQNFLSEEKVVVGEDEFTKDTELQEIFPNNKSIFFANLANVQENDTYNQEKKSPEEIERKEKLTQENVALPQAHTMIGTKNFLKNLFLLSTKQNVAGLEEQPYTPILQDTRSLNDSPHSEGIHMANFSKIREEANLEGLGNQTNQMVERFPSTTRMSSNASQHVITQRGKRSLKQPRLSQGEIKFERKVIANDTSTQWSKNMNYLAQGTLTQIEYNEKEKRAITQSPLSDCSMRNHVTIQMNDSALPVAKESASPSVRHTDLTKIPSQHNSSHLPASACNYTFRERTSGVQEGSHFLQEAKRNNLSLAFVTLGITEGQGKFSSLGKSATNQPMYKKLENTVLLQPGLSETSDKVELLSQVHVDQEDSFPTKTSNDSPGHLDLMGKIFLQKTQGPVKMNKTNSPGKVPFLKWATESSEKIPSKLLGVLAWDNHYDTQIPSEEWKSQKKSQTNTAFKRKDTILPLGPCENNDSTAAINEGQDKPQREAMWAKQGEPGRLCSQNPPVSKHHQREITVTTLQPEEDKFEYDDTFSIEMKREDFDIYGDYENQGLRSFQKKTRHYFIAAVERLWDYGMSRSPHILRNRAQSGDVQQFKKVVFQEFTDGSFTQPLYRGELNEHLGLLGPYIRAEVEDNIVVTFKNQASRPYSFYSSLISYDEDEGQGAEPRRKFVNPNETKIYFWKVQHHMAPTKDEFDCKAWAYFSDVDLEKDVHSGLIGPLLICRSNTLNPAHGRQVTVQEFALVFTIFDETKSWYFTENLERNCRAPCNVQKEDPTLKENFRFHAINGYVKDTLPGLVMAQDQKVRWYLLSMGSNENIHSIHFSGHVFTVRKKEEYKMAVYNLYPGVFETVEMLPSQVGIWRIECLIGEHLQAGMSTLFLVYSKKCQTPLGMASGHIRDFQITASGQYGQWAPKLARLHYSGSINAWSTKDPFSWIKVDLLAPMIIHGIMTQGARQKFSSLYVSQFIIMYSLDGNKWHSYRGNSTGTLMVFFGNVDSSGIKHNIFNPPIIAQYIRLHPTHYSIRSTLRMELLGCDFNSCSMPLGMESKAISDAQITASSYLSSMLATWSPSQARLHLQGRTNAWRPQANNPKEWLQVDFRKTMKVTGITTQGVKSLLISMYVKEFLISSSQDGHNWTLFLQNGKVKVFQGNRDSSTPVRNRLEPPLVARYVRLHPQSWAHHIALRLEVLGCDTQQPA

SEQ ID NO: 4 - protein, 2332 aa, Sus sp.; identical to SEQ ID NO: 2

SEQ ID NO: 5 - protein, 2300 aa, Mus sp.
AIRRYYLGAVELSWNYIQSDLLSVLHTDSRFLPRMSTSFPFNTSIMYKKTVFVEYKDQLFNIAKPRPPWMGLLGPTIWTEVHDTVVITLKNMASHPVSLHAVGVSYWKASEGDEYEDQTSQMEKEDDKVFPGESHTYVWQVLKENGPMASDPPCLTYSYMSHVDLVKDLNSGLIGALLVCKEGSLSKERTQMLYQFVLLFAVFDEGKSWHSETNDSYTQSMDSASARDWPKMHTVNGYVNRSLPGLIGCHRKSVYWHVIGMGTTPEIHSIFLEGHTFFVRNHRQASLEISPITFLTAQTLLIDLGQFLLFCHISSHKHDGMEAYVKVDSCPEESQWQKKNNNEEMEDYDDDLYSEMDMFTLDYDSSPFIQIRSVAKKYPKTWIHYISAEEEDWDYAPSVPTSDNGSYKSQYLSNGPHRIGRKYKKVRFIAYTDETFKTRETIQHESGLLGPLLYGEVGDTLLIIFKNQASRPYNIYPHGITDVSPLHARRLPRGIKHVKDLPIHPGEIFKYKWTVTVEDGPTKSDPRCLTRYYSSFINPERDLASGLIGPLLICYKESVDQRGNQMMSDKRNVILFSIFDENQSWYITENMQRFLPNAAKTQPQDPGFQASNIMHSINGYVFDSLELTVCLHEVAYWHILSVGAQTDFLSIFFSGYTFKHKMVYEDTLTLFPFSGETVFMSMENPGLWVLGCHNSDFRKRGMTALLKVSSCDKSTSDYYEEIYEDIPTQLVNENNVIDPRSFFQNTNHPNTRKKKFKDSTIPKNDMEKIEPQFEEIAEMLKVQSVSVSDMLMLLGQSHPTPHGLFLSDGQEAIYEAIHDDHSPNAIDSNEGPSKVTQLRPESHHSEKIVFTPQPGLQLRSNKSLETTIEVKWKKLGLQVSSLPSNLMTTTILSDNLKATFEKTDSSGFPDMPVHSSSKLSTTAFGKKAYSLVGSHVPLNASEENSDSNILDSTLMYSQESLPRDNILSIENDRLLREKRFHGIALLTKDNTLFKDNVSLMKTNKTYNHSTTNEKLHTESPTSIENSTTDLQDAILKVNSEIQEVTALIHDGTLLGKNSTYLRLNHMLNRTTSTKNKDIFHRKDEDPIPQDEENTIMPFSKMLFLSESSNWFKKTNGNNSLNSEQEHSPKQLVYLMFKKYVKNQSFLSEKNKVTVEQDGFTKNIGLKDMAFPHNMSIFLTTLSNVHENGRHNQEKNIQEEIEKEALIEEKVVLPQVHEATGSKNFLKDILILGTRQNISLYEVHVPVLQNITSINNSTNTVQIHMEHFFKRRKDKETNSEGLVNKTREMVKNYPSQKNITTQRSKRALGQFRLSTQWLKTINCSTQCIIKQIDHSKEMKKFITKSSLSDSSVIKSTTQTNSSDSHIVKTSAFPPIDLKRSPFQNKFSHVQASSYIYDFKTKSSRIQESNNFLKETKINNPSLAILPWNMFIDQGKFTSPGKSNTNSVTYKKRENIIFLKPTLPEESGKIELLPQVSIQEEEILPTETSHGSPGHLNLMKEVFLQKIQGPTKWNKAKRHGESIKGKTESSKNTRSKLLNHHAWDYHYAAQIPKDMWKSKEKSPEIISIKQEDTILSLRPHGNSHSIGANEKQNWPQRETTWVKQGQTQRTCSQIPPVLKRHQRELSAFQSEQEATDYDDAITIETIEDFDIYSEDIKQGPRSFQQKTRHYFIAAVERLWDYGMSTSHVLRNRYQSDNVPQFKKVVFQEFTDGSFSQPLYRGELNEHLGLLGPYIRAEVEDNIMVTFKNQASRPYSFYSSLISYKEDQRGEEPRRNFVKPNETKIYFWKVQHHMAPTEDEFDCKAWAYFSDVDLERDMHSGLIGPLLICHANTLNPAHGRQVSVQEFALLFTIFDETKSWYFTENVKRNCKTPCNFQMEDPTLKENYRFHAINGYVMDTLPGLVMAQDQRIRWYLLSMGNNENIQSIHFSGHVFTVRKKEEYKMAVYNLYPGVFETLEMIPSRAGIWRVECLIGEHLQAGMSTLFLVYSKQCQIPLGMASGSIRDFQITASGHYGQWAPNLARLHYSGSINAWSTKEPFSWIKVDLLAPMIVHGIKTQGARQKFSSLYISQFIIMYSLDGKKWLSYQGNSTGTLMVFFGNVDSSGIKHNSFNPPIIARYIRLHPTHSSIRSTLRMELMGCDLNSCSIPLGMESKVISDTQITASSYFTNMFATWSPSQARLHLQGRTNAWRPQVNDPKQWLQVDLQKTMKVTGIITQGVKSLFTSMFVKEFLISSSQDGHHWTQILYNGKVKVFQGNQDSSTPMMNSLDPPLLTRYLRIHPQIWEHQIALRLEILGCEAQQQY

SEQ ID NO: 6 - protein, 1457 aa, synthetic construct
  REGION 1..1457: note = Description of Artificial Sequence: Synthetic polypeptide
MQIELSTCFFLCLLRFCFSATRRYYLGAVELSWDYMQSDLGELPVDARFPPRVPKSFPFNTSVVYKKTLFVEFTVHLFNIAKPRPPWMGLLGPTIQAEVYDTVVITLKNMASHPVSLHAVGVSYWKASEGAEYDDQTSQREKEDDKVFPGGSHTYVWQVLKENGPMASDPLCLTYSYLSHVDLVKDLNSGLIGALLVCREGSLAKEKTQTLHKFILLFAVFDEGKSWHSETKNSLMQDRDAASARAWPKMHTVNGYVNRSLPGLIGCHRKSVYWHVIGMGTTPEVHSIFLEGHTFLVRNHRQASLEISPITFLTAQTLLMDLGQFLLFCHISSHQHDGMEAYVKVDSCPEEPQLRMKNNEEAEDYDDDLTDSEMDVVRFDDDNSPSFIQIRSVAKKHPKTWVHYIAAEEEDWDYAPLVLAPDDRSYKSQYLNNGPQRIGRKYKKVRFMAYTDETFKTREAIQHESGILGPLLYGEVGDTLLIIFKNQASRPYNIYPHGITDVRPLYSRRLPKGVKHLKDFPILPGEIFKYKWTVTVEDGPTKSDPRCLTRYYSSFVNMERDLASGLIGPLLICYKESVDQRGNQIMSDKRNVILFSVFDENRSWYLTENIQRFLPNPAGVQLEDPEFQASNIMHSINGYVFDSLQLSVCLHEVAYWYILSIGAQTDFLSVFFSGYTFKHKMVYEDTLTLFPFSGETVFMSMENPGLWILGCHNSDFRNRGMTALLKVSSCDKNTGDYYEDSYEDISAYLLSKNNAIEPRSFSQNPPVLKRHQREITRTTLQSDQEEIDYDDTISVEMKKEDFDIYDEDENQSPRSFQKKTRHYFIAAVERLWDYGMSSSPHVLRNRAQSGSVPQFKKVVFQEFTDGSFTQPLYRGELNEHLGLLGPYIRAEVEDNIMVTFRNQASRPYSFYSSLISYEEDQRQGAEPRKNFVKPNETKTYFWKVQHHMAPTKDEFDCKAWAYFSDVDLEKDVHSGLIGPLLVCHTNTLNPAHGRQVTVQEFALFFTIFDETKSWYFTENMERNCRAPCNIQMEDPTFKENYRFHAINGYIMDTLPGLVMAQDQRIRWYLLSMGSNENIHSIHFSGHVFTVRKKEEYKMALYNLYPGVFETVEMLPSKAGIWRVECLIGEHLHAGMSTLFLVYSNKCQTPLGMASGHIRDFQITASGQYGQWAPKLARLHYSGSINAWSTKEPFSWIKVDLLAPMIIHGIKTQGARQKFSSLYISQFIIMYSLDGKKWQTYRGNSTGTLMVFFGNVDSSGIKHNIFNPPIIARYIRLHPTHYSIRSTLRMELMGCDLNSCSMPLGMESKAISDAQITASSYFTNMFATWSPSKARLHLQGRSNAWRPQVNNPKEWLQVDFQKTMKVTGVTTQGVKSLLTSMYVKEFLISSSQDGHQWTLFFQNGKVKVFQGNQDSFTPVVNSLDPPLLTRYLRIHPQSWVHQIALRMEVLGCEAQDLY

SEQ ID NO: 7 - protein, 1438 aa, synthetic construct
  REGION 1..1438: note = Description of Artificial Sequence: Synthetic polypeptide
ATRRYYLGAVELSWDYMQSDLGELPVDARFPPRVPKSFPFNTSVVYKKTLFVEFTVHLFNIAKPRPPWMGLLGPTIQAEVYDTVVITLKNMASHPVSLHAVGVSYWKASEGAEYDDQTSQREKEDDKVFPGGSHTYVWQVLKENGPMASDPLCLTYSYLSHVDLVKDLNSGLIGALLVCREGSLAKEKTQTLHKFILLFAVFDEGKSWHSETKNSLMQDRDAASARAWPKMHTVNGYVNRSLPGLIGCHRKSVYWHVIGMGTTPEVHSIFLEGHTFLVRNHRQASLEISPITFLTAQTLLMDLGQFLLFCHISSHQHDGMEAYVKVDSCPEEPQLRMKNNEEAEDYDDDLTDSEMDVVRFDDDNSPSFIQIRSVAKKHPKTWVHYIAAEEEDWDYAPLVLAPDDRSYKSQYLNNGPQRIGRKYKKVRFMAYTDETFKTREAIQHESGILGPLLYGEVGDTLLIIFKNQASRPYNIYPHGITDVRPLYSRRLPKGVKHLKDFPILPGEIFKYKWTVTVEDGPTKSDPRCLTRYYSSFVNMERDLASGLIGPLLICYKESVDQRGNQIMSDKRNVILFSVFDENRSWYLTENIQRFLPNPAGVQLEDPEFQASNIMHSINGYVFDSLQLSVCLHEVAYWYILSIGAQTDFLSVFFSGYTFKHKMVYEDTLTLFPFSGETVFMSMENPGLWILGCHNSDFRNRGMTALLKVSSCDKNTGDYYEDSYEDISAYLLSKNNAIEPRSFSQNPPVLKRHQREITRTTLQSDQEEIDYDDTISVEMKKEDFDIYDEDENQSPRSFQKKTRHYFIAAVERLWDYGMSSSPHVLRNRAQSGSVPQFKKVVFQEFTDGSFTQPLYRGELNEHLGLLGPYIRAEVEDNIMVTFRNQASRPYSFYSSLISYEEDQRQGAEPRKNFVKPNETKTYFWKVQHHMAPTKDEFDCKAWAYFSDVDLEKDVHSGLIGPLLVCHTNTLNPAHGRQVTVQEFALFFTIFDETKSWYFTENMERNCRAPCNIQMEDPTFKENYRFHAINGYIMDTLPGLVMAQDQRIRWYLLSMGSNENIHSIHFSGHVFTVRKKEEYKMALYNLYPGVFETVEMLPSKAGIWRVECLIGEHLHAGMSTLFLVYSNKCQTPLGMASGHIRDFQITASGQYGQWAPKLARLHYSGSINAWSTKEPFSWIKVDLLAPMIIHGIKTQGARQKFSSLYISQFIIMYSLDGKKWQTYRGNSTGTLMVFFGNVDSSGIKHNIFNPPIIARYIRLHPTHYSIRSTLRMELMGCDLNSCSMPLGMESKAISDAQITASSYFTNMFATWSPSKARLHLQGRSNAWRPQVNNPKEWLQVDFQKTMKVTGVTTQGVKSLLTSMYVKEFLISSSQDGHQWTLFFQNGKVKVFQGNQDSFTPVVNSLDPPLLTRYLRIHPQSWVHQIALRMEVLGCEAQDLY

SEQ ID NO: 8 - protein, 1438 aa, synthetic construct
  REGION 1..1438: note = Description of Artificial Sequence: Synthetic polypeptide
ATRRYYLGAVELSWDYMQSDLGELPVDARFPPRVPKSFPFNTSVVYKKTLFVEFTVHLFNIAKPRPPWMGLLGPTIQAEVYDTVVITLKNMASHPVSLHAVGVSYWKASEGAEYDDQTSQREKEDDKVFPGGSHTYVWQVLKENGPMASDPLCLTYSYLSHVDLVKDLNSGLIGALLVCREGSLAKEKTQTLHKFILLFAVFDEGKSWHSETKNSLMQDRDAASARAWPKMHTVNGYVNRSLPGLIGCHRKSVYWHVIGMGTTPEVHSIFLEGHTFLVRNHRQASLEISPITFLTAQTLLMDLGQFLLFCHISSHQHDGMEAYVKVDSCPEEPQLRMKNNEEAEDYDDDLTDSEMDVVRFDDDNSPSFIQIRSVAKKHPKTWVHYIAAEEEDWDYAPLVLAPDDRSYKSQYLNNGPQRIGRKYKKVRFMAYTDETFKTREAIQHESGILGPLLYGEVGDTLLIIFKNQASRPYNIYPHGITDVRPLYSRRLPKGVKHLKDFPILPGEIFKYKWTVTVEDGPTKSDPRCLTRYYSSFVNMERDLASGLIGPLLICYKESVDQRGNQIMSDKRNVILFSVFDENRSWYLTENIQRFLPNPAGVQLEDPEFQASNIMHSINGYVFDSLQLSVCLHEVAYWYILSIGAQTDFLSVFFSGYTFKHKMVYEDTLTLFPFSGETVFMSMENPGLWILGCHNSDFRNRGMTALLKVSSCDKNTGDYYEDSYEDISAYLLSKNNAIEPRSFSQNPPVLKRHQGEITRTTLQSDQEEIDYDDTISVEMKKEDFDIYDEDENQSPRSFQKKTRHYFIAAVERLWDYGMSSSPHVLRNRAQSGSVPQFKKVVFQEFTDGSFTQPLYRGELNEHLGLLGPYIRAEVEDNIMVTFRNQASRPYSFYSSLISYEEDQRQGAEPRKNFVKPNETKTYFWKVQHHMAPTKDEFDCKAWAYFSDVDLEKDVHSGLIGPLLVCHTNTLNPAHGRQVTVQEFALFFTIFDETKSWYFTENMERNCRAPCNIQMEDPTFKENYRFHAINGYIMDTLPGLVMAQDQRIRWYLLSMGSNENIHSIHFSGHVFTVRKKEEYKMALYNLYPGVFETVEMLPSKAGIWRVECLIGEHLHAGMSTLFLVYSNKCQTPLGMASGHIRDFQITASGQYGQWAPKLARLHYSGSINAWSTKEPFSWIKVDLLAPMIIHGIKTQGARQKFSSLYISQFIIMYSLDGKKWQTYRGNSTGTLMVFFGNVDSSGIKHNIFNPPIIARYIRLHPTHYSIRSTLRMELMGCDLNSCSMPLGMESKAISDAQITASSYFTNMFATWSPSKARLHLQGRSNAWRPQVNNPKEWLQVDFQKTMKVTGVTTQGVKSLLTSMYVKEFLISSSQDGHQWTLFFQNGKVKVFQGNQDSFTPVVNSLDPPLLTRYLRIHPQSWVHQIALRMEVLGCEAQDLY

SEQ ID NO: 9 - protein, 1391 aa, synthetic construct
  REGION 1..1391: note = Description of Artificial Sequence: Synthetic polypeptide
ATRRYYLGAVELSWDYMQSDLGELPVDARFPPRVPKSFPFNTSVVYKKTLFVEFTVHLFNIAKPRPPWMGLLGPTIQAEVYDTVVITLKNMASHPVSLHAVGVSYWKASEGAEYDDQTSQREKEDDKVFPGGSHTYVWQVLKENGPMASDPLCLTYSYLSHVDLVKDLNSGLIGALLVCREGSLAKEKTQTLHKFILLFAVFDEGKSWHSETKNSLMQDRDAASARAWPKMHTVNGYVNRSLPGLIGCHRKSVYWHVIGMGTTPEVHSIFLEGHTFLVRNHRQASLEISPITFLTAQTLLMDLGQFLLFCHISSHQHDGMEAYVKVDSCPEEPQLRMKNNEEAEDYDDDLTDSEMDVVRFDDDNSPSFIQIRSVAKKHPKTWVHYIAAEEEDWDYAPLVLAPDDRSYKSQYLNNGPQRIGRKYKKVRFMAYTDETFKTREAIQHESGILGPLLYGEVGDTLLIIFKNQASRPYNIYPHGITDVRPLYSRRLPKGVKHLKDFPILPGEIFKYKWTVTVEDGPTKSDPRCLTRYYSSFVNMERDLASGLIGPLLICYKESVDQRGNQIMSDKRNVILFSVFDENRSWYLTENIQRFLPNPAGVQLEDPEFQASNIMHSINGYVFDSLQLSVCLHEVAYWYILSIGAQTDFLSVFFSGYTFKHKMVYEDTLTLFPFSGETVFMSMENPGLWILGCHNSDFRNRGMTALLKVSSCDKNTGDYYEDSYEDISAYLLSKNNAIEPRSFSQQSPRSFQKKTRHYFIAAVERLWDYGMSSSPHVLRNRAQSGSVPQFKKVVFQEFTDGSFTQPLYRGELNEHLGLLGPYIRAEVEDNIMVTFRNQASRPYSFYSSLISYEEDQRQGAEPRKNFVKPNETKTYFWKVQHHMAPTKDEFDCKAWAYFSDVDLEKDVHSGLIGPLLVCHTNTLNPAHGRQVTVQEFALFFTIFDETKSWYFTENMERNCRAPCNIQMEDPTFKENYRFHAINGYIMDTLPGLVMAQDQRIRWYLLSMGSNENIHSIHFSGHVFTVRKKEEYKMALYNLYPGVFETVEMLPSKAGIWRVECLIGEHLHAGMSTLFLVYSNKCQTPLGMASGHIRDFQITASGQYGQWAPKLARLHYSGSINAWSTKEPFSWIKVDLLAPMIIHGIKTQGARQKFSSLYISQFIIMYSLDGKKWQTYRGNSTGTLMVFFGNVDSSGIKHNIFNPPIIARYIRLHPTHYSIRSTLRMELMGCDLNSCSMPLGMESKAISDAQITASSYFTNMFATWSPSKARLHLQGRSNAWRPQVNNPKEWLQVDFQKTMKVTGVTTQGVKSLLTSMYVKEFLISSSQDGHQWTLFFQNGKVKVFQGNQDSFTPVVNSLDPPLLTRYLRIHPQSWVHQIALRMEVLGCEAQDLY

SEQ ID NO: 10 - protein, 1360 aa, synthetic construct
  REGION 1..1360: note = Description of Artificial Sequence: Synthetic polypeptide
ATRRYYLGAVELSWDYMQSDLGELPVDARFPPRVPKSFPFNTSVVYKKTLFVEFTVHLFNIAKPRPPWMGLLGPTIQAEVYDTVVITLKNMASHPVSLHAVGVSYWKASEGAEYDDQTSQREKEDDKVFPGGSHTYVWQVLKENGPMASDPLCLTYSYLSHVDLVKDLNSGLIGALLVCREGSLAKEKTQTLHKFILLFAVFDEGKSWHSETKNSLMQDRDAASARAWPKMHTVNGYVNRSLPGLIGCHRKSVYWHVIGMGTTPEVHSIFLEGHTFLVRNHRQASLEISPITFLTAQTLLMDLGQFLLFCHISSHQHDGMEAYVKVDSCPEEPQLRMKNNEEAEDYDDDLTDSEMDVVRFDDDNSPSFIQIRSVAKKHPKTWVHYIAAEEEDWDYAPLVLAPDDRSYKSQYLNNGPQRIGRKYKKVRFMAYTDETFKTREAIQHESGILGPLLYGEVGDTLLIIFKNQASRPYNIYPHGITDVRPLYSRRLPKGVKHLKDFPILPGEIFKYKWTVTVEDGPTKSDPRCLTRYYSSFVNMERDLASGLIGPLLICYKESVDQRGNQIMSDKRNVILFSVFDENRSWYLTENIQRFLPNPAGVQLEDPEFQASNIMHSINGYVFDSLQLSVCLHEVAYWYILSIGAQTDFLSVFFSGYTFKHKMVYEDTLTLFPFSGETVFMSMENPGLWILGCHNSDFRNRGMTALLKVSSCDKQSPRSFQKKTRHYFIAAVERLWDYGMSSSPHVLRNRAQSGSVPQFKKVVFQEFTDGSFTQPLYRGELNEHLGLLGPYIRAEVEDNIMVTFRNQASRPYSFYSSLISYEEDQRQGAEPRKNFVKPNETKTYFWKVQHHMAPTKDEFDCKAWAYFSDVDLEKDVHSGLIGPLLVCHTNTLNPAHGRQVTVQEFALFFTIFDETKSWYFTENMERNCRAPCNIQMEDPTFKENYRFHAINGYIMDTLPGLVMAQDQRIRWYLLSMGSNENIHSIHFSGHVFTVRKKEEYKMALYNLYPGVFETVEMLPSKAGIWRVECLIGEHLHAGMSTLFLVYSNKCQTPLGMASGHIRDFQITASGQYGQWAPKLARLHYSGSINAWSTKEPFSWIKVDLLAPMIIHGIKTQGARQKFSSLYISQFIIMYSLDGKKWQTYRGNSTGTLMVFFGNVDSSGIKHNIFNPPIIARYIRLHPTHYSIRSTLRMELMGCDLNSCSMPLGMESKAISDAQITASSYFTNMFATWSPSKARLHLQGRSNAWRPQVNNPKEWLQVDFQKTMKVTGVTTQGVKSLLTSMYVKEFLISSSQDGHQWTLFFQNGKVKVFQGNQDSFTPVVNSLDPPLLTRYLRIHPQSWVHQIALRMEVLGCEAQDLY

SEQ ID NO: 11 - protein, 1436 aa, synthetic construct
  REGION 1..1436: note = Description of Artificial Sequence: Synthetic polypeptide
ATRRYYLGAVELSWDYMQSDLGELPVDARFPPRVPKSFPFNTSVVYKKTLFVEFTDHLFNIAKPRPPWMGLLGPTIQAEVYDTVVITLKNMASHPVSLHAVGVSYWKASEGAEYDDQTSQREKEDDKVFPGGSHTYVWQVLKENGPMASDPLCLTYSYLSHVDLVKDLNSGLIGALLVCREGSLAKEKTQTLHKFILLFAVFDEGKSWHSETKNSLMQDRDAASARAWPKMHTVNGYVNRSLPGLIGCHRKSVYWHVIGMGTTPEVHSIFLEGHTFLVRNHRQASLEISPITFLTAQTLLMDLGQFLLFCHISSHQHDGMEAYVKVDSCPEEPQLRMKNNEEAEDYDDDLTDSEMDVVRFDDDNSPSFIQIRSVAKKHPKTWVHYIAAEEEDWDYAPLVLAPDDRSYKSQYLNNGPQRIGRKYKKVRFMAYTDETFKTREAIQHESGILGPLLYGEVGDTLLIIFKNQASRPYNIYPHGITDVRPLYSRRLPKGVKHLKDFPILPGEIFKYKWTVTVEDGPTKSDPRCLTRYYSSFVNMERDLASGLIGPLLICYKESVDQRGNQIMSDKRNVILFSVFDENRSWYLTENIQRFLPNPAGVQLEDPEFQASNIMHSINGYVFDSLQLSVCLHEVAYWYILSIGAQTDFLSVFFSGYTFKHKMVYEDTLTLFPFSGETVFMSMENPGLWILGCHNSDFRNRGMTALLKVSSCDKNTGDYYEDSYEDISAYLLSKNNAIEPRSFSQNSRHPSTRQKQFNATTIPENDIEKTDTISVEMKKEDFDIYDEDENQSPRSFQKKTRHYFIAAVERLWDYGMSSSPHVLRNRAQSGSVPQFKKVVFQEFTDGSFTQPLYRGELNEHLGLLGPYIRAEVEDNIMVTFRNQASRPYSFYSSLISYEEDQRQGAEPRKNFVKPNETKTYFWKVQHHMAPTKDEFDCKAWAYFSDVDLEKDVHSGLIGPLLVCHTNTLNPAHGRQVTVQEFALFFTIFDETKSWYFTENMERNCRAPCNIQMEDPTFKENYRFHAINGYIMDTLPGLVMAQDQRIRWYLLSMGSNENIHSIHFSGHVFTVRKKEEYKMALYNLYPGVFETVEMLPSKAGIWRVECLIGEHLHAGMSTLFLVYSNKCQTPLGMASGHIRDFQITASGQYGQWAPKLARLHYSGSINAWSTKEPFSWIKVDLLAPMIIHGIKTQGARQKFSSLYISQFIIMYSLDGKKWQTYRGNSTGTLMVFFGNVDSSGIKHNIFNPPIIARYIRLHPTHYSIRSTLRMELMGCDLNSCSMPLGMESKAISDAQITASSYFTNMFATWSPSKARLHLQGRSNAWRPQVNNPKEWLQVDFQKTMKVTGVTTQGVKSLLTSMYVKEFLISSSQDGHQWTLFFQNGKVKVFQGNQDSFTPVVNSLDPPLLTRYLRIHPQSWVHQIALRMEVLGCEAQDLY

SEQ ID NO: 12 - protein, 1390 aa, synthetic construct
  REGION 1..1390: note = Description of Artificial Sequence: Synthetic polypeptide
ATRRYYLGAVELSWDYMQSDLGELPVDARFPPRVPKSFPFNTSVVYKKTLFVEFTVHLFNIAKPRPPWMGLLGPTIQAEVYDTVVITLKNMASHPVSLHAVGVSYWKASEGAEYDDQTSQREKEDDKVFPGGSHTYVWQVLKENGPMASDPLCLTYSYLSHVDLVKDLNSGLIGALLVCREGSLAKEKTQTLHKFILLFAVFDEGKSWHSETKNSLMQDRDAASARAWPKMHTVNGYVNRSLPGLIGCHRKSVYWHVIGMGTTPEVHSIFLEGHTFLVRNHRQASLEISPITFLTAQTLLMDLGQFLLFCHISSHQHDGMEAYVKVDSCPEEPQLRMKNNEEAEDYDDDLTDSEMDVVRFDDDNSPSFIQIRSVAKKHPKTWVHYIAAEEEDWDYAPLVLAPDDRSYKSQYLNNGPQRIGRKYKKVRFMAYTDETFKTREAIQHESGILGPLLYGEVGDTLLIIFKNQASRPYNIYPHGITDVRPLYSRRLPKGVKHLKDFPILPGEIFKYKWTVTVEDGPTKSDPRCLTRYYSSFVNMERDLASGLIGPLLICYKESVDQRGNQIMSDKRNVILFSVFDENRSWYLTENIQRFLPNPAGVQLEDPEFQASNIMHSINGYVFDSLQLSVCLHEVAYWYILSIGAQTDFLSVFFSGYTFKHKMVYEDTLTLFPFSGETVFMSMENPGLWILGCHNSDFRNRGMTALLKVSSCDKNTGDYYEDSYEDISAYLLSKNNAIEPRSFSQSPRSFQKKTRHYFIAAVERLWDYGMSSSPHVLRNRAQSGSVPQFKKVVFQEFTDGSFTQPLYRGELNEHLGLLGPYIRAEVEDNIMVTFRNQASRPYSFYSSLISYEEDQRQGAEPRKNFVKPNETKTYFWKVQHHMAPTKDEFDCKAWAYFSDVDLEKDVHSGLIGPLLVCHTNTLNPAHGRQVTVQEFALFFTIFDETKSWYFTENMERNCRAPCNIQMEDPTFKENYRFHAINGYIMDTLPGLVMAQDQRIRWYLLSMGSNENIHSIHFSGHVFTVRKKEEYKMALYNLYPGVFETVEMLPSKAGIWRVECLIGEHLHAGMSTLFLVYSNKCQTPLGMASGHIRDFQITASGQYGQWAPKLARLHYSGSINAWSTKEPFSWIKVDLLAPMIIHGIKTQGARQKFSSLYISQFIIMYSLDGKKWQTYRGNSTGTLMVFFGNVDSSGIKHNIFNPPIIARYIRLHPTHYSIRSTLRMELMGCDLNSCSMPLGMESKAISDAQITASSYFTNMFATWSPSKARLHLQGRSNAWRPQVNNPKEWLQVDFQKTMKVTGVTTQGVKSLLTSMYVKEFLISSSQDGHQWTLFFQNGKVKVFQGNQDSFTPVVNSLDPPLLTRYLRIHPQSWVHQIALRMEVLGCEAQDLY

SEQ ID NO: 13 - protein, 1457 aa, synthetic construct
  REGION 1..1457: note = Description of Artificial Sequence: Synthetic polypeptide
MQIELSTCFFLCLLRFCFSATRRYYLGAVELSWDYMQSDLGELPVDARFPPRVPKSFPFNTSVVYKKTLFVEFTDHLFNIAKPRPPWMGLLGPTIQAEVYDTVVITLKNMASHPVSLHAVGVSYWKASEGAEYDDQTSQREKEDDKVFPGGSHTYVWQVLKENGPMASDPLCLTYSYLSHVDLVKDLNSGLIGALLVCREGSLAKEKTQTLHKFILLFAVFDEGKSWHSETKNSLMQDRDAASARAWPKMHTVNGYVNRSLPGLIGCHRKSVYWHVIGMGTTPEVHSIFLEGHTFLVRNHRQASLEISPITFLTAQTLLMDLGQFLLFCHISSHQHDGMEAYVKVDSCPEEPQLRMKNNEEAEDYDDDLTDSEMDVVRFDDDNSPSFIQIRSVAKKHPKTWVHYIAAEEEDWDYAPLVLAPDDRSYKSQYLNNGPQRIGRKYKKVRFMAYTDETFKTREAIQHESGILGPLLYGEVGDTLLIIFKNQASRPYNIYPHGITDVRPLYSRRLPKGVKHLKDFPILPGEIFKYKWTVTVEDGPTKSDPRCLTRYYSSFVNMERDLASGLIGPLLICYKESVDQRGNQIMSDKRNVILFSVFDENRSWYLTENIQRFLPNPAGVQLEDPEFQASNIMHSINGYVFDSLQLSVCLHEVAYWYILSIGAQTDFLSVFFSGYTFKHKMVYEDTLTLFPFSGETVFMSMENPGLWILGCHNSDFRNRGMTALLKVSSCDKNTGDYYEDSYEDISAYLLSKNNAIEPRSFSQNPPVLKRHQREITRTTLQSDQEEIDYDDTISVEMKKEDFDIYDEDENQSPRSFQKKTRHYFIAAVERLWDYGMSSSPHVLRNRAQSGSVPQFKKVVFQEFTDGSFTQPLYRGELNEHLGLLGPYIRAEVEDNIMVTFRNQASRPYSFYSSLISYEEDQRQGAEPRKNFVKPNETKTYFWKVQHHMAPTKDEFDCKAWAYFSDVDLEKDVHSGLIGPLLVCHTNTLNPAHGRQVTVQEFALFFTIFDETKSWYFTENMERNCRAPCNIQMEDPTFKENYRFHAINGYIMDTLPGLVMAQDQRIRWYLLSMGSNENIHSIHFSGHVFTVRKKEEYKMALYNLYPGVFETVEMLPSKAGIWRVECLIGEHLHAGMSTLFLVYSNKCQTPLGMASGHIRDFQITASGQYGQWAPKLARLHYSGSINAWSTKEPFSWIKVDLLAPMIIHGIKTQGARQKFSSLYISQFIIMYSLDGKKWQTYRGNSTGTLMVFFGNVDSSGIKHNIFNPPIIARYIRLHPTHYSIRSTLRMELMGCDLNSCSMPLGMESKAISDAQITASSYFTNMFATWSPSKARLHLQGRSNAWRPQVNNPKEWLQVDFQKTMKVTGVTTQGVKSLLTSMYVKEFLISSSQDGHQWTLFFQNGKVKVFQGNQDSFTPVVNSLDPPLLTRYLRIHPQSWVHQIALRMEVLGCEAQDLY

SEQ ID NO: 14 - protein, 1438 aa, synthetic construct
  REGION 1..1438: note = Description of Artificial Sequence: Synthetic polypeptide
ATRRYYLGAVELSWDYMQSDLGELPVDARFPPRVPKSFPFNTSVVYKKTLFVEFTDHLFNIAKPRPPWMGLLGPTIQAEVYDTVVITLKNMASHPVSLHAVGVSYWKASEGAEYDDQTSQREKEDDKVFPGGSHTYVWQVLKENGPMASDPLCLTYSYLSHVDLVKDLNSGLIGALLVCREGSLAKEKTQTLHKFILLFAVFDEGKSWHSETKNSLMQDRDAASARAWPKMHTVNGYVNRSLPGLIGCHRKSVYWHVIGMGTTPEVHSIFLEGHTFLVRNHRQASLEISPITFLTAQTLLMDLGQFLLFCHISSHQHDGMEAYVKVDSCPEEPQLRMKNNEEAEDYDDDLTDSEMDVVRFDDDNSPSFIQIRSVAKKHPKTWVHYIAAEEEDWDYAPLVLAPDDRSYKSQYLNNGPQRIGRKYKKVRFMAYTDETFKTREAIQHESGILGPLLYGEVGDTLLIIFKNQASRPYNIYPHGITDVRPLYSRRLPKGVKHLKDFPILPGEIFKYKWTVTVEDGPTKSDPRCLTRYYSSFVNMERDLASGLIGPLLICYKESVDQRGNQIMSDKRNVILFSVFDENRSWYLTENIQRFLPNPAGVQLEDPEFQASNIMHSINGYVFDSLQLSVCLHEVAYWYILSIGAQTDFLSVFFSGYTFKHKMVYEDTLTLFPFSGETVFMSMENPGLWILGCHNSDFRNRGMTALLKVSSCDKNTGDYYEDSYEDISAYLLSKNNAIEPRSFSQNPPVLKRHQREITRTTLQSDQEEIDYDDTISVEMKKEDFDIYDEDENQSPRSFQKKTRHYFIAAVERLWDYGMSSSPHVLRNRAQSGSVPQFKKVVFQEFTDGSFTQPLYRGELNEHLGLLGPYIRAEVEDNIMVTFRNQASRPYSFYSSLISYEEDQRQGAEPRKNFVKPNETKTYFWKVQHHMAPTKDEFDCKAWAYFSDVDLEKDVHSGLIGPLLVCHTNTLNPAHGRQVTVQEFALFFTIFDETKSWYFTENMERNCRAPCNIQMEDPTFKENYRFHAINGYIMDTLPGLVMAQDQRIRWYLLSMGSNENIHSIHFSGHVFTVRKKEEYKMALYNLYPGVFETVEMLPSKAGIWRVECLIGEHLHAGMSTLFLVYSNKCQTPLGMASGHIRDFQITASGQYGQWAPKLARLHYSGSINAWSTKEPFSWIKVDLLAPMIIHGIKTQGARQKFSSLYISQFIIMYSLDGKKWQTYRGNSTGTLMVFFGNVDSSGIKHNIFNPPIIARYIRLHPTHYSIRSTLRMELMGCDLNSCSMPLGMESKAISDAQITASSYFTNMFATWSPSKARLHLQGRSNAWRPQVNNPKEWLQVDFQKTMKVTGVTTQGVKSLLTSMYVKEFLISSSQDGHQWTLFFQNGKVKVFQGNQDSFTPVVNSLDPPLLTRYLRIHPQSWVHQIALRMEVLGCEAQDLY

SEQ ID NO: 15 - protein, 1438 aa, synthetic construct
  REGION 1..1438: note = Description of Artificial Sequence: Synthetic polypeptide
ATRRYYLGAVELSWDYMQSDLGELPVDARFPPRVPKSFPFNTSVVYKKTLFVEFTDHLFNIAKPRPPWMGLLGPTIQAEVYDTVVITLKNMASHPVSLHAVGVSYWKASEGAEYDDQTSQREKEDDKVFPGGSHTYVWQVLKENGPMASDPLCLTYSYLSHVDLVKDLNSGLIGALLVCREGSLAKEKTQTLHKFILLFAVFDEGKSWHSETKNSLMQDRDAASARAWPKMHTVNGYVNRSLPGLIGCHRKSVYWHVIGMGTTPEVHSIFLEGHTFLVRNHRQASLEISPITFLTAQTLLMDLGQFLLFCHISSHQHDGMEAYVKVDSCPEEPQLRMKNNEEAEDYDDDLTDSEMDVVRFDDDNSPSFIQIRSVAKKHPKTWVHYIAAEEEDWDYAPLVLAPDDRSYKSQYLNNGPQRIGRKYKKVRFMAYTDETFKTREAIQHESGILGPLLYGEVGDTLLIIFKNQASRPYNIYPHGITDVRPLYSRRLPKGVKHLKDFPILPGEIFKYKWTVTVEDGPTKSDPRCLTRYYSSFVNMERDLASGLIGPLLICYKESVDQRGNQIMSDKRNVILFSVFDENRSWYLTENIQRFLPNPAGVQLEDPEFQASNIMHSINGYVFDSLQLSVCLHEVAYWYILSIGAQTDFLSVFFSGYTFKHKMVYEDTLTLFPFSGETVFMSMENPGLWILGCHNSDFRNRGMTALLKVSSCDKNTGDYYEDSYEDISAYLLSKNNAIEPRSFSQNPPVLKRHQAEITRTTLQSDQEEIDYDDTISVEMKKEDFDIYDEDENQSPRSFQKKTRHYFIAAVERLWDYGMSSSPHVLRNRAQSGSVPQFKKVVFQEFTDGSFTQPLYRGELNEHLGLLGPYIRAEVEDNIMVTFRNQASRPYSFYSSLISYEEDQRQGAEPRKNFVKPNETKTYFWKVQHHMAPTKDEFDCKAWAYFSDVDLEKDVHSGLIGPLLVCHTNTLNPAHGRQVTVQEFALFFTIFDETKSWYFTENMERNCRAPCNIQMEDPTFKENYRFHAINGYIMDTLPGLVMAQDQRIRWYLLSMGSNENIHSIHFSGHVFTVRKKEEYKMALYNLYPGVFETVEMLPSKAGIWRVECLIGEHLHAGMSTLFLVYSNKCQTPLGMASGHIRDFQITASGQYGQWAPKLARLHYSGSINAWSTKEPFSWIKVDLLAPMIIHGIKTQGARQKFSSLYISQFIIMYSLDGKKWQTYRGNSTGTLMVFFGNVDSSGIKHNIFNPPIIARYIRLHPTHYSIRSTLRMELMGCDLNSCSMPLGMESKAISDAQITASSYFTNMFATWSPSKARLHLQGRSNAWRPQVNNPKEWLQVDFQKTMKVTGVTTQGVKSLLTSMYVKEFLISSSQDGHQWTLFFQNGKVKVFQGNQDSFTPVVNSLDPPLLTRYLRIHPQSWVHQIALRMEVLGCEAQDLY

SEQ ID NO: 16 - protein, 1441 aa, synthetic construct
  REGION 1..1441: note = Description of Artificial Sequence: Synthetic polypeptide
ATRATRRYYLGAVELSWDYMQSDLGELPVDARFPPRVPKSFPFNTSVVYKKTLFVEFTDHLFNIAKPRPPWMGLLGPTIQAEVYDTVVITLKNMASHPVSLHAVGVSYWKASEGAEYDDQTSQREKEDDKVFPGGSHTYVWQVLKENGPMASDPLCLTYSYLSHVDLVKDLNSGLIGALLVCREGSLAKEKTQTLHKFILLFAVFDEGKSWHSETKNSLMQDRDAASARAWPKMHTVNGYVNRSLPGLIGCHRKSVYWHVIGMGTTPEVHSIFLEGHTFLVRNHRQASLEISPITFLTAQTLLMDLGQFLLFCHISSHQHDGMEAYVKVDSCPEEPQLRMKNNEEAEDYDDDLTDSEMDVVRFDDDNSPSFIQIRSVAKKHPKTWVHYIAAEEEDWDYAPLVLAPDDRSYKSQYLNNGPQRIGRKYKKVRFMAYTDETFKTREAIQHESGILGPLLYGEVGDTLLIIFKNQASRPYNIYPHGITDVRPLYSRRLPKGVKHLKDFPILPGEIFKYKWTVTVEDGPTKSDPRCLTRYYSSFVNMERDLASGLIGPLLICYKESVDQRGNQIMSDKRNVILFSVFDENRSWYLTENIQRFLPNPAGVQLEDPEFQASNIMHSINGYVFDSLQLSVCLHEVAYWYILSIGAQTDFLSVFFSGYTFKHKMVYEDTLTLFPFSGETVFMSMENPGLWILGCHNSDFRNRGMTALLKVSSCDKNTGDYYEDSYEDISAYLLSKNNAIEPRSFSQNPPVLKRHQAEITRTTLQSDQEEIDYDDTISVEMKKEDFDIYDEDENQSPRSFQKKTRHYFIAAVERLWDYGMSSSPHVLRNRAQSGSVPQFKKVVFQEFTDGSFTQPLYRGELNEHLGLLGPYIRAEVEDNIMVTFRNQASRPYSFYSSLISYEEDQRQGAEPRKNFVKPNETKTYFWKVQHHMAPTKDEFDCKAWAYFSDVDLEKDVHSGLIGPLLVCHTNTLNPAHGRQVTVQEFALFFTIFDETKSWYFTENMERNCRAPCNIQMEDPTFKENYRFHAINGYIMDTLPGLVMAQDQRIRWYLLSMGSNENIHSIHFSGHVFTVRKKEEYKMALYNLYPGVFETVEMLPSKAGIWRVECLIGEHLHAGMSTLFLVYSNKCQTPLGMASGHIRDFQITASGQYGQWAPKLARLHYSGSINAWSTKEPFSWIKVDLLAPMIIHGIKTQGARQKFSSLYISQFIIMYSLDGKKWQTYRGNSTGTLMVFFGNVDSSGIKHNIFNPPIIARYIRLHPTHYSIRSTLRMELMGCDLNSCSMPLGMESKAISDAQITASSYFTNMFATWSPSKARLHLQGRSNAWRPQVNNPKEWLQVDFQKTMKVTGVTTQGVKSLLTSMYVKEFLISSSQDGHQWTLFFQNGKVKVFQGNQDSFTPVVNSLDPPLLTRYLRIHPQSWVHQIALRMEVLGCEAQDLY

SEQ ID NO: 17 - protein, 1438 aa, synthetic construct
  REGION 1..1438: note = Description of Artificial Sequence: Synthetic polypeptide
ATRRYYLGAVELSWDYMQSDLGELPVDARFPPRVPKSFPFNTSVVYKKTLFVEFTDHLFNIAKPRPPWMGLLGPTIQAEVYDTVVITLKNMASHPVSLHAVGVSYWKASEGAEYDDQTSQREKEDDKVFPGGSHTYVWQVLKENGPMASDPLCLTYSYLSHVDLVKDLNSGLIGALLVCREGSLAKEKTQTLHKFILLFAVFDEGKSWHSETKNSLMQDRDAASARAWPKMHTVNGYVNRSLPGLIGCHRKSVYWHVIGMGTTPEVHSIFLEGHTFLVRNHRQASLEISPITFLTAQTLLMDLGQFLLFCHISSHQHDGMEAYVKVDSCPEEPQLRMKNNEEAEDYDDDLTDSEMDVVRFDDDNSPSFIQIRSVAKKHPKTWVHYIAAEEEDWDYAPLVLAPDDRSYKSQYLNNGPQRIGRKYKKVRFMAYTDETFKTREAIQHESGILGPLLYGEVGDTLLIIFKNQASRPYNIYPHGITDVRPLYSRRLPKGVKHLKDFPILPGEIFKYKWTVTVEDGPTKSDPRCLTRYYSSFVNMERDLASGLIGPLLICYKESVDQRGNQIMSDKRNVILFSVFDENRSWYLTENIQRFLPNPAGVQLEDPEFQASNIMHSINGYVFDSLQLSVCLHEVAYWYILSIGAQTDFLSVFFSGYTFKHKMVYEDTLTLFPFSGETVFMSMENPGLWILGCHNSDFRNRGMTALLKVSSCDKNTGDYYEDSYEDISAYLLSKNNAIEPRSFSQNPPVLKRHQAEITRTTLQSDQEEIDYDDTISVEMKKEDFDIFDEDENQSPRSFQKKTRHYFIAAVERLWDYGMSSSPHVLRNRAQSGSVPQFKKVVFQEFTDGSFTQPLYRGELNEHLGLLGPYIRAEVEDNIMVTFRNQASRPYSFYSSLISYEEDQRQGAEPRKNFVKPNETKTYFWKVQHHMAPTKDEFDCKAWAYFSDVDLEKDVHSGLIGPLLVCHTNTLNPAHGRQVTVQEFALFFTIFDETKSWYFTENMERNCRAPCNIQMEDPTFKENYRFHAINGYIMDTLPGLVMAQDQRIRWYLLSMGSNENIHSIHFSGHVFTVRKKEEYKMALYNLYPGVFETVEMLPSKAGIWRVECLIGEHLHAGMSTLFLVYSNKCQTPLGMASGHIRDFQITASGQYGQWAPKLARLHYSGSINAWSTKEPFSWIKVDLLAPMIIHGIKTQGARQKFSSLYISQFIIMYSLDGKKWQTYRGNSTGTLMVFFGNVDSSGIKHNIFNPPIIARYIRLHPTHYSIRSTLRMELMGCDLNSCSMPLGMESKAISDAQITASSYFTNMFATWSPSKARLHLQGRSNAWRPQVNNPKEWLQVDFQKTMKVTGVTTQGVKSLLTSMYVKEFLISSSQDGHQWTLFFQNGKVKVFQGNQDSFTPVVNSLDPPLLTRYLRIHPQSWVHQIALRMEVLGCEAQDLY

SEQ ID NO: 18 - protein, 1438 aa, synthetic construct
  REGION 1..1438: note = Description of Artificial Sequence: Synthetic polypeptide
ATRRYYLGAVELSWDYMQSDLGELPVDARFPPRVPKSFPFNTSVVYKKTLFVEFTDHLFNIAKPRPPWMGLLGPTIQAEVYDTVVITLKNMASHPVSLHAVGVSYWKASEGAEYDDQTSQREKEDDKVFPGGSHTYVWQVLKENGPMASDPLCLTYSYLSHVDLVKDLNSGLIGALLVCREGSLAKEKTQTLHKFILLFAVFDEGKSWHSETKNSLMQDRDAASARAWPKMHTVNGYVNRSLPGLIGCHRKSVYWHVIGMGTTPEVHSIFLEGHTFLVRNHRQASLEISPITFLTAQTLLMDLGQFLLFCHISSHQHDGMEAYVKVDSCPEEPQLRMKNNEEAEDYDDDLTDSEMDVVRFDDDNSPSFIQIRSVAKKHPKTWVHYIAAEEEDWDYAPLVLAPDDRSYKSQYLNNGPQRIGRKYKKVRFMAYTDETFKTREAIQHESGILGPLLYGEVGDTLLIIFKNQASRPYNIYPHGITDVRPLYSRRLPKGVKHLKDFPILPGEIFKYKWTVTVEDGPTKSDPRCLTRYYSSFVNMERDLASGLIGPLLICYKESVDQRGNQIMSDKRNVILFSVFDENRSWYLTENIQRFLPNPAGVQLEDPEFQASNIMHSINGYVFDSLQLSVCLHEVAYWYILSIGAQTDFLSVFFSGYTFKHKMVYEDTLTLFPFSGETVFMSMENPGLWILGCHNSDFRNRGMTALLKVSSCDKNTGDYYEDSYEDISAYLLSKNNAIEPRSFSQNPPVLKRHQREITRTTLQSDQEEIDYDDTISVEMKKEDFDIFDEDENQSPRSFQKKTRHYFIAAVERLWDYGMSSSPHVLRNRAQSGSVPQFKKVVFQEFTDGSFTQPLYRGELNEHLGLLGPYIRAEVEDNIMVTFRNQASRPYSFYSSLISYEEDQRQGAEPRKNFVKPNETKTYFWKVQHHMAPTKDEFDCKAWAYFSDVDLEKDVHSGLIGPLLVCHTNTLNPAHGRQVTVQEFALFFTIFDETKSWYFTENMERNCRAPCNIQMEDPTFKENYRFHAINGYIMDTLPGLVMAQDQRIRWYLLSMGSNENIHSIHFSGHVFTVRKKEEYKMALYNLYPGVFETVEMLPSKAGIWRVECLIGEHLHAGMSTLFLVYSNKCQTPLGMASGHIRDFQITASGQYGQWAPKLARLHYSGSINAWSTKEPFSWIKVDLLAPMIIHGIKTQGARQKFSSLYISQFIIMYSLDGKKWQTYRGNSTGTLMVFFGNVDSSGIKHNIFNPPIIARYIRLHPTHYSIRSTLRMELMGCDLNSCSMPLGMESKAISDAQITASSYFTNMFATWSPSKARLHLQGRSNAWRPQVNNPKEWLQVDFQKTMKVTGVTTQGVKSLLTSMYVKEFLISSSQDGHQWTLFFQNGKVKVFQGNQDSFTPVVNSLDPPLLTRYLRIHPQSWVHQIALRMEVLGCEAQDLY

SEQ ID NO: 19 - protein, 12 aa, synthetic construct
  REGION 1..12: note = Description of Artificial Sequence: Synthetic peptide
GESPGGSSGSES

SEQ ID NO: 20 - protein, 12 aa, synthetic construct
  REGION 1..12: note = Description of Artificial Sequence: Synthetic peptide
GSEGSSGPGESS

SEQ ID NO: 21 - protein, 12 aa, synthetic construct
  REGION 1..12: note = Description of Artificial Sequence: Synthetic peptide
GSSESGSSEGGP

SEQ ID NO: 22 - protein, 12 aa, synthetic construct
  REGION 1..12: note = Description of Artificial Sequence: Synthetic peptide
GSGGEPSESGSS

SEQ ID NO: 23 - protein, 12 aa, synthetic construct
  REGION 1..12: note = Description of Artificial Sequence: Synthetic peptide
GSPAGSPTSTEE

SEQ ID NO: 24 - protein, 12 aa, synthetic construct
  REGION 1..12: note = Description of Artificial Sequence: Synthetic peptide
GSEPATSGSETP

SEQ ID NO: 25 - protein, 12 aa, synthetic construct
  REGION 1..12: note = Description of Artificial Sequence: Synthetic peptide
GTSESATPESGP

SEQ ID NO: 26 - protein, 12 aa, synthetic construct
  REGION 1..12: note = Description of Artificial Sequence: Synthetic peptide
GTSTEPSEGSAP

SEQ ID NO: 27 - protein, 12 aa, synthetic construct
  REGION 1..12: note = Description of Artificial Sequence: Synthetic peptide
GSTSESPSGTAP

SEQ ID NO: 28 - protein, 12 aa, synthetic construct
  REGION 1..12: note = Description of Artificial Sequence: Synthetic peptide
GTSTPESGSASP

SEQ ID NO: 29 - protein, 12 aa, synthetic construct
  REGION 1..12: note = Description of Artificial Sequence: Synthetic peptide
GTSPSGESSTAP

SEQ ID NO: 30 - protein, 12 aa, synthetic construct
  REGION 1..12: note = Description of Artificial Sequence: Synthetic peptide
GSTSSTAESPGP

SEQ ID NO: 31 - protein, 12 aa, synthetic construct
  REGION 1..12: note = Description of Artificial Sequence: Synthetic peptide
GTPGSGTASSSP

SEQ ID NO: 32 - protein, 12 aa, synthetic construct
  REGION 1..12: note = Description of Artificial Sequence: Synthetic peptide
GSSTPSGATGSP

SEQ ID NO: 33 - protein, 12 aa, synthetic construct
  REGION 1..12: note = Description of Artificial Sequence: Synthetic peptide
GSSPSASTGTGP

SEQ ID NO: 34 - protein, 12 aa, synthetic construct
  REGION 1..12: note = Description of Artificial Sequence: Synthetic peptide
GASPGTSSTGSP

SEQ ID NO: 35 - protein, 12 aa, synthetic construct
  REGION 1..12: note = Description of Artificial Sequence: Synthetic peptide
GEPAGSPTSTSE

SEQ ID NO: 36 - protein, 12 aa, synthetic construct
  REGION 1..12: note = Description of Artificial Sequence: Synthetic peptide
GTGEPSSTPASE

SEQ ID NO: 37 - protein, 12 aa, synthetic construct
  REGION 1..12: note = Description of Artificial Sequence: Synthetic peptide
GSGPSTESAPTE

SEQ ID NO: 38 - protein, 12 aa, synthetic construct
  REGION 1..12: note = Description of Artificial Sequence: Synthetic peptide
GSETPSGPSETA

SEQ ID NO: 39 - protein, 12 aa, synthetic construct
  REGION 1..12: note = Description of Artificial Sequence: Synthetic peptide
GPSETSTSEPGA

SEQ ID NO: 40 - protein, 12 aa, synthetic construct
  REGION 1..12: note = Description of Artificial Sequence: Synthetic peptide
GSPSEPTEGTSA

SEQ ID NO: 41 - protein, 12 aa, synthetic construct
  REGION 1..12: note = Description of Artificial Sequence: Synthetic peptide
GSGASEPTSTEP

SEQ ID NO: 42 - protein, 12 aa, synthetic construct
  REGION 1..12: note = Description of Artificial Sequence: Synthetic peptide
GSEPATSGTEPS

SEQ ID NO: 43 - protein, 12 aa, synthetic construct
  REGION 1..12: note = Description of Artificial Sequence: Synthetic peptide
GTSEPSTSEPGA

SEQ ID NO: 44 - protein, 12 aa, synthetic construct
  REGION 1..12: note = Description of Artificial Sequence: Synthetic peptide
GTSTEPSEPGSA

SEQ ID NO: 45 - protein, 12 aa, synthetic construct
  REGION 1..12: note = Description of Artificial Sequence: Synthetic peptide
GSTAGSETSTEA

SEQ ID NO: 46 - protein, 12 aa, synthetic construct
  REGION 1..12: note = Description of Artificial Sequence: Synthetic peptide
GSETATSGSETA

SEQ ID NO: 47 - protein, 12 aa, synthetic construct
  REGION 1..12: note = Description of Artificial Sequence: Synthetic peptide
GTSESATSESGA

SEQ ID NO: 48 - protein, 12 aa, synthetic construct
  REGION 1..12: note = Description of Artificial Sequence: Synthetic peptide
GTSTEASEGSAS

SEQ ID NO: 49 - protein, 42 aa, synthetic construct
  REGION 1..42: note = Description of Artificial Sequence: Synthetic polypeptide
GAPGSPAGSPTSTEEGTSESATPESGPGSEPATSGSETPASS

SEQ ID NO: 50 - protein, 42 aa, synthetic construct
  REGION 1..42: note = Description of Artificial Sequence: Synthetic polypeptide
TEPSEGSAPGSPAGSPTSTEEGTSESATPESGPGSEPATSGS

SEQ ID NO: 51 - protein, 42 aa, synthetic construct
  REGION 1..42: note = Description of Artificial Sequence: Synthetic polypeptide
PAGSPTSTEEGTSTEPSEGSAPGTSESATPESGPGSEPATSG

SEQ ID NO: 52 - protein, 42 aa, synthetic construct
  REGION 1..42: note = Description of Artificial Sequence: Synthetic polypeptide
SEPATSGSETPGTSESATPESGPGTSTEPSEGSAPGSPAGSP

SEQ ID NO: 53 - protein, 42 aa, synthetic construct
  REGION 1..42: note = Description of Artificial Sequence: Synthetic polypeptide
GAPSPSASTGTGPGTPGSGTASSSPGSSTPSGATGSPGPSGP

SEQ ID NO: 54 - protein, 42 aa, synthetic construct
  REGION 1..42: note = Description of Artificial Sequence: Synthetic polypeptide
GPGTPGSGTASSSPGSSTPSGATGSPGSSPSASTGTGPGASP

SEQ ID NO: 55 - protein, 42 aa, synthetic construct
  REGION 1..42: note = Description of Artificial Sequence: Synthetic polypeptide
SPSASTGTGPGASPGTSSTGSPGTPGSGTASSSPGSSTPSGA

SEQ ID NO: 56 - protein, 42 aa, synthetic construct
  REGION 1..42: note = Description of Artificial Sequence: Synthetic polypeptide
SASTGTGPGASPGTSSTGSPGTPGSGTASSSPGSSTPSGATG

SEQ ID NO: 57 - protein, 48 aa, synthetic construct
  REGION 1..48: note = Description of Artificial Sequence: Synthetic polypeptide
MAEPAGSPTSTEEGTPGSGTASSSPGSSTPSGATGSPGASPGTSSTGS

SEQ ID NO: 58 - protein, 48 aa, synthetic construct
  REGION 1..48: note = Description of Artificial Sequence: Synthetic polypeptide
MAEPAGSPTSTEEGASPGTSSTGSPGSSTPSGATGSPGSSTPSGATGS

SEQ ID NO: 59 - protein, 144 aa, synthetic construct
  REGION 1..144: note = Description of Artificial Sequence: Synthetic polypeptide
GSEPATSGSETPGTSESATPESGPGSEPATSGSETPGSPAGSPTSTEEGTSTEPSEGSAPGSEPATSGSETPGSEPATSGSETPGSEPATSGSETPGTSTEPSEGSAPGTSESATPESGPGSEPATSGSETPGTSTEPSEGSAP

SEQ ID NO: 60 - protein, 144 aa, synthetic construct
  REGION 1..144: note = Description of Artificial Sequence: Synthetic polypeptide
SPAGSPTSTEEGTSESATPESGPGTSTEPSEGSAPGSPAGSPTSTEEGTSTEPSEGSAPGTSTEPSEGSAPGTSESATPESGPGSEPATSGSETPGSEPATSGSETPGSPAGSPTSTEEGTSESATPESGPGTSTEPSEGSAPG

SEQ ID NO: 61 - protein, 144 aa, synthetic construct
  REGION 1..144: note = Description of Artificial Sequence: Synthetic polypeptide
TSTEPSEGSAPGSPAGSPTSTEEGTSTEPSEGSAPGTSTEPSEGSAPGTSESATPESGPGTSTEPSEGSAPGTSESATPESGPGSEPATSGSETPGTSTEPSEGSAPGTSTEPSEGSAPGTSESATPESGPGTSESATPESGPG

SEQ ID NO: 62 - protein, 144 aa, synthetic construct; identical to SEQ ID NO: 61
  REGION 1..144: note = Description of Artificial Sequence: Synthetic polypeptide

SEQ ID NO: 63 - protein, 144 aa, synthetic construct
  REGION 1..144: note = Description of Artificial Sequence: Synthetic polypeptide
SPAGSPTSTEEGTSESATPESGPGSEPATSGSETPGTSESATPESGPGTSTEPSEGSAPGTSTEPSEGSAPGTSTEPSEGSAPGTSTEPSEGSAPGTSTEPSEGSAPGTSTEPSEGSAPGSPAGSPTSTEEGTSTEPSEGSAPG

SEQ ID NO: 64 - protein, 144 aa, synthetic construct; identical to SEQ ID NO: 63
  REGION 1..144: note = Description of Artificial Sequence: Synthetic polypeptide

SEQ ID NO: 65 - protein, 144 aa, synthetic construct
  REGION 1..144: note = Description of Artificial Sequence: Synthetic polypeptide
TSESATPESGPGSEPATSGSETPGTSESATPESGPGSEPATSGSETPGTSESATPESGPGTSTEPSEGSAPGTSESATPESGPGSPAGSPTSTEEGSPAGSPTSTEEGSPAGSPTSTEEGTSESATPESGPGTSTEPSEGSAPG

SEQ ID NO: 66 - protein, 144 aa, synthetic construct; identical to SEQ ID NO: 65
  REGION 1..144: note = Description of Artificial Sequence: Synthetic polypeptide

SEQ ID NO: 67 - protein, 144 aa, synthetic construct
  REGION 1..144: note = Description of Artificial Sequence: Synthetic polypeptide
TSESATPESGPGSEPATSGSETPGTSESATPESGPGSEPATSGSETPGTSESATPESGPGTSTEPSEGSAPGSPAGSPTSTEEGTSESATPESGPGSEPATSGSETPGTSESATPESGPGSPAGSPTSTEEGSPAGSPTSTEEG

SEQ ID NO: 68 - protein, 144 aa, synthetic construct
  REGION 1..144: note = Description of Artificial Sequence: Synthetic polypeptide
TSTEPSEGSAPGTSESATPESGPGTSESATPESGPGTSESATPESGPGSEPATSGSETPGSEPATSGSETPGSPAGSPTSTEEGTSTEPSEGSAPGTSTEPSEGSAPGSEPATSGSETPGTSESATPESGPGTSTEPSEGSAPG

SEQ ID NO: 69 - protein, 144 aa, synthetic construct
  REGION 1..144: note = Description of Artificial Sequence: Synthetic polypeptide
GTSTPESGSASPGTSPSGESSTAPGTSPSGESSTAPGSTSSTAESPGPGSTSESPSGTAPGSTSSTAESPGPGTSPSGESSTAPGTSTPESGSASPGSTSSTAESPGPGTSPSGESSTAPGTSPSGESSTAPGTSPSGESSTAP

SEQ ID NO: 70 - protein, 144 aa, synthetic construct
  REGION 1..144: note = Description of Artificial Sequence: Synthetic polypeptide
SGTASSSPGSSTPSGATGSPGTPGSGTASSSPGSSTPSGATGSPGSSTPSGATGSPGSSPSASTGTGPGSSPSASTGTGPGASPGTSSTGSPGTPGSGTASSSPGSSTPSGATGSPGSSPSASTGTGPGSSPSASTGTGPGASP

SEQ ID NO: 71 - protein, 144 aa, synthetic construct
  REGION 1..144: note = Description of Artificial Sequence: Synthetic polypeptide
PGSSPSASTGTGPGSSPSASTGTGPGTPGSGTASSSPGSSTPSGATGSPGSSPSASTGTGPGASPGTSSTGSPGTPGSGTASSSPGSSTPSGATGSPGTPGSGTASSSPGASPGTSSTGSPGASPGTSSTGSPGTPGSGTASSS

SEQ ID NO: 72 - protein, 144 aa, synthetic construct
  REGION 1..144: note = Description of Artificial Sequence: Synthetic polypeptide
GASPGTSSTGSPGSSPSASTGTGPGSSPSASTGTGPGTPGSGTASSSPGSSTPSGATGSPGSSPSASTGTGPGASPGTSSTGSPGTPGSGTASSSPGSSTPSGATGSPGTPGSGTASSSPGASPGTSSTGSPGASPGTSSTGSP

SEQ ID NO: 73 - protein, 144 aa, synthetic construct
  REGION 1..144: note = Description of Artificial Sequence: Synthetic polypeptide
GTPGSGTASSSPGSSTPSGATGSPGASPGTSSTGSPGTPGSGTASSSPGSSTPSGATGSPGSSPSASTGTGPGSSPSASTGTGPGSSTPSGATGSPGSSTPSGATGSPGASPGTSSTGSPGASPGTSSTGSPGASPGTSSTGSP

SEQ ID NO: 74 - protein, 144 aa, synthetic construct
  REGION 1..144: note = Description of Artificial Sequence: Synthetic polypeptide
GTPGSGTASSSPGASPGTSSTGSPGASPGTSSTGSPGASPGTSSTGSPGSSPSASTGTGPGTPGSGTASSSPGASPGTSSTGSPGASPGTSSTGSPGASPGTSSTGSPGSSTPSGATGSPGSSTPSGATGSPGASPGTSSTGSP

SEQ ID NO: 75 - protein, 144 aa, synthetic construct
  REGION 1..144: note = Description of Artificial Sequence: Synthetic polypeptide
GSSPSASTGTGPGSSPSASTGTGPGASPGTSSTGSPGASPGTSSTGSPGSSTPSGATGSPGSSPSASTGTGPGASPGTSSTGSPGSSPSASTGTGPGTPGSGTASSSPGSSTPSGATGSPGSSTPSGATGSPGASPGTSSTGSP

SEQ ID NO: 76 - protein, 144 aa, synthetic construct
  REGION 1..144: note = Description of Artificial Sequence: Synthetic polypeptide
GTPGSGTASSSPGSSTPSGATGSPGSSTPSGATGSPGSSPSASTGTGPGSSPSASTGTGPGASPGTSSTGSPGTPGSGTASSSPGSSTPSGATGSPGSSPSASTGTGPGSSPSASTGTGPGASPGTSSTGSPGASPGTSSTGSP

SEQ ID NO: 77 - protein, 144 aa, synthetic construct
  REGION 1..144: note = Description of Artificial Sequence: Synthetic polypeptide
GTPGSGTASSSPGSSTPSGATGSPGSSPSASTGTGPGSSPSASTGTGPGASPGTSSTGSPGASPGTSSTGSPGSSTPSGATGSPGSSPSASTGTGPGASPGTSSTGSPGSSPSASTGTGPGTPGSGTASSSPGSSTPSGATGSP

SEQ ID NO: 78 - protein, 288 aa, synthetic construct
  REGION 1..288: note = Description of Artificial Sequence: Synthetic polypeptide
GTSESATPESGPGSEPATSGSETPGTSESATPESGPGSEPATSGSETPGTSESATPESGPGTSTEPSEGSAPGSPAGSPTSTEEGTSESATPESGPGSEPATSGSETPGTSESATPESGPGSPAGSPTSTEEGSPAGSPTSTEEGTSTEPSEGSAPGTSESATPESGPGTSESATPESGPGTSESATPESGPGSEPATSGSETPGSEPATSGSETPGSPAGSPTSTEEGTSTEPSEGSAPGTSTEPSEGSAPGSEPATSGSETPGTSESATPESGPGTSTEPSEGSAP

SEQ ID NO: 79 - protein, 288 aa, synthetic construct
  REGION 1..288: note = Description of Artificial Sequence: Synthetic polypeptide
GSPAGSPTSTEEGTSESATPESGPGSEPATSGSETPGTSESATPESGPGTSTEPSEGSAPGTSTEPSEGSAPGTSTEPSEGSAPGTSTEPSEGSAPGTSTEPSEGSAPGTSTEPSEGSAPGSPAGSPTSTEEGTSTEPSEGSAPGTSESATPESGPGSEPATSGSETPGTSESATPESGPGSEPATSGSETPGTSESATPESGPGTSTEPSEGSAPGTSESATPESGPGSPAGSPTSTEEGSPAGSPTSTEEGSPAGSPTSTEEGTSESATPESGPGTSTEPSEGSAP

SEQ ID NO: 80 - protein, 288 aa, synthetic construct
  REGION 1..288: note = Description of Artificial Sequence: Synthetic polypeptide
PGASPGTSSTGSPGASPGTSSTGSPGTPGSGTASSSPGSSTPSGATGSPGTPGSGTASSSPGSSTPSGATGSPGTPGSGTASSSPGSSTPSGATGSPGSSTPSGATGSPGSSPSASTGTGPGSSPSASTGTGPGASPGTSSTGSPGTPGSGTASSSPGSSTPSGATGSPGSSPSASTGTGPGSSPSASTGTGPGASPGTSSTGSPGASPGTSSTGSPGSSTPSGATGSPGSSPSASTGTGPGASPGTSSTGSPGSSPSASTGTGPGTPGSGTASSSPGSSTPSGATGS

SEQ ID NO: 81 - protein, 288 aa, synthetic construct
  REGION 1..288: note = Description of Artificial Sequence: Synthetic polypeptide
GSSPSASTGTGPGSSPSASTGTGPGTPGSGTASSSPGSSTPSGATGSPGSSPSASTGTGPGASPGTSSTGSPGTPGSGTASSSPGSSTPSGATGSPGTPGSGTASSSPGASPGTSSTGSPGASPGTSSTGSPGTPGSGTASSSPGSSTPSGATGSPGASPGTSSTGSPGTPGSGTASSSPGSSTPSGATGSPGSSPSASTGTGPGSSPSASTGTGPGSSTPSGATGSPGSSTPSGATGSPGASPGTSSTGSPGASPGTSSTGSPGASPGTSSTGSPGTPGSGTASSSP

SEQ ID NO: 82 - protein, 504 aa, synthetic construct
  REGION 1..504: note = Description of Artificial Sequence: Synthetic polypeptide
  VAR_SEQ 63: note = Any amino acid
  VAR_SEQ 207: note = Any amino acid
GASPGTSSTGSPGSSPSASTGTGPGSSPSASTGTGPGTPGSGTASSSPGSSTPSGATGSPGSXPSASTGTGPGASPGTSSTGSPGTPGSGTASSSPGSSTPSGATGSPGTPGSGTASSSPGASPGTSSTGSPGASPGTSSTGSPGTPGSGTASSSPGSSTPSGATGSPGASPGTSSTGSPGTPGSGTASSSPGSSTPSGATGSPGSXPSASTGTGPGSSPSASTGTGPGSSTPSGATGSPGSSTPSGATGSPGASPGTSSTGSPGASPGTSSTGSPGASPGTSSTGSPGTPGSGTASSSPGASPGTSSTGSPGASPGTSSTGSPGASPGTSSTGSPGSSPSASTGTGPGTPGSGTASSSPGASPGTSSTGSPGASPGTSSTGSPGASPGTSSTGSPGSSTPSGATGSPGSSTPSGATGSPGASPGTSSTGSPGTPGSGTASSSPGSSTPSGATGSPGSSTPSGATGSPGSSTPSGATGSPGSSPSASTGTGPGASPGTSSTGSP

SEQ ID NO: 83 - protein, 540 aa, synthetic construct
  REGION 1..540: note = Description of Artificial Sequence: Synthetic polypeptide
GSTSSTAESPGPGSTSSTAESPGPGSTSESPSGTAPGSTSSTAESPGPGSTSSTAESPGPGTSTPESGSASPGSTSESPSGTAPGTSPSGESSTAPGSTSESPSGTAPGSTSESPSGTAPGTSPSGESSTAPGSTSESPSGTAPGSTSESPSGTAPGTSPSGESSTAPGSTSESPSGTAPGSTSESPSGTAPGSTSESPSGTAPGTSTPESGSASPGSTSESPSGTAPGTSTPESGSASPGSTSSTAESPGPGSTSSTAESPGPGTSTPESGSASPGTSTPESGSASPGSTSESPSGTAPGTSTPESGSASPGTSTPESGSASPGSTSESPSGTAPGSTSESPSGTAPGSTSESPSGTAPGSTSSTAESPGPGTSTPESGSASPGTSTPESGSASPGSTSESPSGTAPGSTSESPSGTAPGTSTPESGSASPGSTSESPSGTAPGSTSESPSGTAPGTSTPESGSASPGTSPSGESSTAPGSTSSTAESPGPGTSPSGESSTAPGSTSSTAESPGPGTSTPESGSASPGSTSESPSGTAP

SEQ ID NO: 84 - protein, 576 aa, synthetic construct
  REGION 1..576: note = Description of Artificial Sequence: Synthetic polypeptide
GSSESGSSEGGPGSGGEPSESGSSGSSESGSSEGGPGSSESGSSEGGPGSSESGSSEGGPGSSESGSSEGGPGSSESGSSEGGPGESPGGSSGSESGSEGSSGPGESSGSSESGSSEGGPGSSESGSSEGGPGSSESGSSEGGPGSGGEPSESGSSGESPGGSSGSESGESPGGSSGSESGSGGEPSESGSSGSSESGSSEGGPGSGGEPSESGSSGSGGEPSESGSSGSEGSSGPGESSGESPGGSSGSESGSGGEPSESGSSGSGGEPSESGSSGSGGEPSESGSSGSSESGSSEGGPGESPGGSSGSESGESPGGSSGSESGESPGGSSGSESGESPGGSSGSESGESPGGSSGSESGSSESGSSEGGPGSGGEPSESGSSGSEGSSGPGESSGSSESGSSEGGPGSGGEPSESGSSGSSESGSSEGGPGSGGEPSESGSSGESPGGSSGSESGESPGGSSGSESGSSESGSSEGGPGSGGEPSESGSSGSSESGSSEGGPGSGGEPSESGSSGSGGEPSESGSSGESPGGSSGSESGSEGSSGPGESSGSSESGSSEGGPGSEGSSGPGESS

SEQ ID NO: 85 - protein, 576 aa, synthetic construct
  REGION 1..576: note = Description of Artificial Sequence: Synthetic polypeptide
GSPAGSPTSTEEGTSESATPESGPGTSTEPSEGSAPGSPAGSPTSTEEGTSTEPSEGSAPGTSTEPSEGSAPGTSESATPESGPGSEPATSGSETPGSEPATSGSETPGSPAGSPTSTEEGTSESATPESGPGTSTEPSEGSAPGTSTEPSEGSAPGSPAGSPTSTEEGTSTEPSEGSAPGTSTEPSEGSAPGTSESATPESGPGTSTEPSEGSAPGTSESATPESGPGSEPATSGSETPGTSTEPSEGSAPGTSTEPSEGSAPGTSESATPESGPGTSESATPESGPGSPAGSPTSTEEGTSESATPESGPGSEPATSGSETPGTSESATPESGPGTSTEPSEGSAPGTSTEPSEGSAPGTSTEPSEGSAPGTSTEPSEGSAPGTSTEPSEGSAPGTSTEPSEGSAPGSPAGSPTSTEEGTSTEPSEGSAPGTSESATPESGPGSEPATSGSETPGTSESATPESGPGSEPATSGSETPGTSESATPESGPGTSTEPSEGSAPGTSESATPESGPGSPAGSPTSTEEGSPAGSPTSTEEGSPAGSPTSTEEGTSESATPESGPGTSTEPSEGSAP

SEQ ID NO: 86 - protein, 576 aa, synthetic construct
  REGION 1..576: note = Description of Artificial Sequence: Synthetic polypeptide
GSTSSTAESPGPGSTSSTAESPGPGSTSESPSGTAPGSTSSTAESPGPGSTSSTAESPGPGTSTPESGSASPGSTSESPSGTAPGTSPSGESSTAPGSTSESPSGTAPGSTSESPSGTAPGTSPSGESSTAPGSTSESPSGTAPGSTSESPSGTAPGTSPSGESSTAPGSTSESPSGTAPGSTSESPSGTAPGSTSESPSGTAPGTSTPESGSASPGSTSESPSGTAPGTSTPESGSASPGSTSSTAESPGPGSTSSTAESPGPGTSTPESGSASPGTSTPESGSASPGSTSESPSGTAPGTSTPESGSASPGTSTPESGSASPGSTSESPSGTAPGSTSESPSGTAPGSTSESPSGTAPGSTSSTAESPGPGTSTPESGSASPGTSTPESGSASPGSTSESPSGTAPGSTSESPSGTAPGTSTPESGSASPGSTSESPSGTAPGSTSESPSGTAPGTSTPESGSASPGTSPSGESSTAPGSTSSTAESPGPGTSPSGESSTAPGSTSSTAESPGPGTSTPESGSASPGSTSESPSGTAPGSTSSTAESPGPGTSTPESGSASPGTSTPESGSASP

SEQ ID NO: 87 - protein, 576 aa, synthetic construct
  REGION 1..576: note = Description of Artificial Sequence: Synthetic polypeptide
PGTPGSGTASSSPGSSTPSGATGSPGSSPSASTGTGPGSSPSASTGTGPGSSTPSGATGSPGSSTPSGATGSPGASPGTSSTGSPGASPGTSSTGSPGASPGTSSTGSPGTPGSGTASSSPGASPGTSSTGSPGASPGTSSTGSPGASPGTSSTGSPGSSPSASTGTGPGTPGSGTASSSPGASPGTSSTGSPGASPGTSSTGSPGASPGTSSTGSPGSSTPSGATGSPGSSTPSGATGSPGASPGTSSTGSPGTPGSGTASSSPGSSTPSGATGSPGSSTPSGATGSPGSSTPSGATGSPGSSPSASTGTGPGASPGTSSTGSPGASPGTSSTGSPGTPGSGTASSSPGASPGTSSTGSPGASPGTSSTGSPGASPGTSSTGSPGASPGTSSTGSPGTPGSGTASSSPGSSTPSGATGSPGTPGSGTASSSPGSSTPSGATGSPGTPGSGTASSSPGSSTPSGATGSPGSSTPSGATGSPGSSPSASTGTGPGSSPSASTGTGPGASPGTSSTGSPGTPGSGTASSSPGSSTPSGATGSPGSSPSASTGTGPGSSPSASTGTGPGASPGTSSTGS

SEQ ID NO: 88 - protein, 625 aa, synthetic construct
  REGION 1..625: note = Description of Artificial Sequence: Synthetic polypeptide
MAEPAGSPTSTEEGTPGSGTASSSPGSSTPSGATGSPGASPGTSSTGSPGSPAGSPTSTEEGTSESATPESGPGTSTEPSEGSAPGSPAGSPTSTEEGTSTEPSEGSAPGTSTEPSEGSAPGTSESATPESGPGSEPATSGSETPGSEPATSGSETPGSPAGSPTSTEEGTSESATPESGPGTSTEPSEGSAPGTSTEPSEGSAPGSPAGSPTSTEEGTSTEPSEGSAPGTSTEPSEGSAPGTSESATPESGPGTSTEPSEGSAPGTSESATPESGPGSEPATSGSETPGTSTEPSEGSAPGTSTEPSEGSAPGTSESATPESGPGTSESATPESGPGSPAGSPTSTEEGTSESATPESGPGSEPATSGSETPGTSESATPESGPGTSTEPSEGSAPGTSTEPSEGSAPGTSTEPSEGSAPGTSTEPSEGSAPGTSTEPSEGSAPGTSTEPSEGSAPGSPAGSPTSTEEGTSTEPSEGSAPGTSESATPESGPGSEPATSGSETPGTSESATPESGPGSEPATSGSETPGTSESATPESGPGTSTEPSEGSAPGTSESATPESGPGSPAGSPTSTEEGSPAGSPTSTEEGSPAGSPTSTEEGTSESATPESGPGTSTEPSEGSAP

SEQ ID NO: 89 - protein, 836 aa, synthetic construct
  REGION 1..836: note = Description of Artificial Sequence: Synthetic polypeptide
GSSESGSSEGGPGSSESGSSEGGPGESPGGSSGSESGSGGEPSESGSSGESPGGSSGSESGESPGGSSGSESGSSESGSSEGGPGSSESGSSEGGPGSSESGSSEGGPGESPGGSSGSESGESPGGSSGSESGESPGGSSGSESGSSESGSSEGGPGSSESGSSEGGPGSSESGSSEGGPGSSESGSSEGGPGSSESGSSEGGPGSSESGSSEGGPGSGGEPSESGSSGESPGGSSGSESGESPGGSSGSESGSGGEPSESGSSGSEGSSGPGESSGSSESGSSEGGPGSGGEPSESGSSGSEGSSGPGESSGSSESGSSEGGPGSGGEPSESGSSGESPGGSSGSESGSGGEPSESGSSGSGGEPSESGSSGSSESGSSEGGPGSGGEPSESGSSGSGGEPSESGSSGSEGSSGPGESSGESPGGSSGSESGSEGSSGPGESSGSEGSSGPGESSGSGGEPSESGSSGSSESGSSEGGPGSSESGSSEGGPGESPGGSSGSESGSGGEPSESGSSGSEGSSGPGESSGESPGGSSGSESGSEGSSGPGSSESGSSEGGPGSGGEPSESGSSGSEGSSGPGESSGSEGSSGPGESSGSEGSSGPGESSGSGGEPSESGSSGSGGEPSESGSSGESPGGSSGSESGESPGGSSGSESGSGGEPSESGSSGSEGSSGPGESSGESPGGSSGSESGSSESGSSEGGPGSSESGSSEGGPGSSESGSSEGGPGSGGEPSESGSSGSSESGSSEGGPGESPGGSSGSESGSGGEPSESGSSGSSESGSSEGGPGESPGGSSGSESGSGGEPSESGSSGESPGGSSGSESGSGGEPSESGSS

SEQ ID NO: 90 - protein, 864 aa, synthetic construct
  REGION 1..864: note = Description of Artificial Sequence: Synthetic polypeptide
GSPAGSPTSTEEGTSESATPESGPGTSTEPSEGSAPGSPAGSPTSTEEGTSTEPSEGSAPGTSTEPSEGSAPGTSESATPESGPGSEPATSGSETPGSEPATSGSETPGSPAGSPTSTEEGTSESATPESGPGTSTEPSEGSAPGTSTEPSEGSAPGSPAGSPTSTEEGTSTEPSEGSAPGTSTEPSEGSAPGTSESATPESGPGTSTEPSEGSAPGTSESATPESGPGSEPATSGSETPGTSTEPSEGSAPGTSTEPSEGSAPGTSESATPESGPGTSESATPESGPGSPAGSPTSTEEGTSESATPESGPGSEPATSGSETPGTSESATPESGPGTSTEPSEGSAPGTSTEPSEGSAPGTSTEPSEGSAPGTSTEPSEGSAPGTSTEPSEGSAPGTSTEPSEGSAPGSPAGSPTSTEEGTSTEPSEGSAPGTSESATPESGPGSEPATSGSETPGTSESATPESGPGSEPATSGSETPGTSESATPESGPGTSTEPSEGSAPGTSESATPESGPGSPAGSPTSTEEGSPAGSPTSTEEGSPAGSPTSTEEGTSESATPESGPGTSTEPSEGSAPGTSESATPESGPGSEPATSGSETPGTSESATPESGPGSEPATSGSETPGTSESATPESGPGTSTEPSEGSAPGSPAGSPTSTEEGTSESATPESGPGSEPATSGSETPGTSESATPESGPGSPAGSPTSTEEGSPAGSPTSTEEGTSTEPSEGSAPGTSESATPESGPGTSESATPESGPGTSESATPESGPGSEPATSGSETPGSEPATSGSETPGSPAGSPTSTEEGTSTEPSEGSAPGTSTEPSEGSAPGSEPATSGSETPGTSESATPESGPGTSTEPSEGSAP

SEQ ID NO: 91 - protein, 875 aa, synthetic construct
  REGION 1..875: note = Description of Artificial Sequence: Synthetic polypeptide
  VAR_SEQ 430..432: note = Any amino acid
  VAR_SEQ 443..446: note = Any amino acid
GSTSESPSGTAPGTSPSGESSTAPGSTSESPSGTAPGSTSESPSGTAPGTSTPESGSASPGTSTPESGSASPGSTSESPSGTAPGSTSESPSGTAPGTSPSGESSTAPGSTSESPSGTAPGTSPSGESSTAPGTSPSGESSTAPGSTSSTAESPGPGTSPSGESSTAPGTSPSGESSTAPGSTSSTAESPGPGTSTPESGSASPGTSTPESGSASPGSTSESPSGTAPGSTSESPSGTAPGTSTPESGSASPGSTSSTAESPGPGTSTPESGSASPGSTSESPSGTAPGTSPSGESSTAPGSTSSTAESPGPGTSPSGESSTAPGTSTPESGSASPGSTSSTAESPGPGSTSSTAESPGPGSTSSTAESPGPGSTSSTAESPGPGTSPSGESSTAPGSTSESPSGTAPGSTSESPSGTAPGTSTPESGPXXXGASASGAPSTXXXXSESPSGTAPGSTSESPSGTAPGSTSESPSGTAPGSTSESPSGTAPGSTSESPSGTAPGSTSESPSGTAPGTSTPESGSASPGTSPSGESSTAPGTSPSGESSTAPGSTSSTAESPGPGTSPSGESSTAPGTSTPESGSASPGSTSESPSGTAPGSTSESPSGTAPGTSPSGESSTAPGSTSESPSGTAPGTSTPESGSASPGTSTPESGSASPGSTSESPSGTAPGTSTPESGSASPGSTSSTAESPGPGSTSESPSGTAPGSTSESPSGTAPGTSPSGESSTAPGSTSSTAESPGPGTSPSGESSTAPGTSTPESGSASPGTSPSGESSTAPGTSPSGESSTAPGTSPSGESSTAPGSTSSTAESPGPGSTSSTAESPGPGTSPSGESSTAPGSSPSASTGTGPGSSTPSGATGSPGSSTPSGATGSP

SEQ ID NO: 92 - protein, 864 aa, synthetic construct
  REGION 1..864: note = Description of Artificial Sequence: Synthetic polypeptide
GASPGTSSTGSPGSSPSASTGTGPGSSPSASTGTGPGTPGSGTASSSPGSSTPSGATGSPGSSPSASTGTGPGASPGTSSTGSPGTPGSGTASSSPGSSTPSGATGSPGTPGSGTASSSPGASPGTSSTGSPGASPGTSSTGSPGTPGSGTASSSPGSSTPSGATGSPGASPGTSSTGSPGTPGSGTASSSPGSSTPSGATGSPGSSPSASTGTGPGSSPSASTGTGPGSSTPSGATGSPGSSTPSGATGSPGASPGTSSTGSPGASPGTSSTGSPGASPGTSSTGSPGTPGSGTASSSPGASPGTSSTGSPGASPGTSSTGSPGASPGTSSTGSPGSSPSASTGTGPGTPGSGTASSSPGASPGTSSTGSPGASPGTSSTGSPGASPGTSSTGSPGSSTPSGATGSPGSSTPSGATGSPGASPGTSSTGSPGTPGSGTASSSPGSSTPSGATGSPGSSTPSGATGSPGSSTPSGATGSPGSSPSASTGTGPGASPGTSSTGSPGASPGTSSTGSPGTPGSGTASSSPGASPGTSSTGSPGASPGTSSTGSPGASPGTSSTGSPGASPGTSSTGSPGTPGSGTASSSPGSSTPSGATGSPGTPGSGTASSSPGSSTPSGATGSPGTPGSGTASSSPGSSTPSGATGSPGSSTPSGATGSPGSSPSASTGTGPGSSPSASTGTGPGASPGTSSTGSPGTPGSGTASSSPGSSTPSGATGSPGSSPSASTGTGPGSSPSASTGTGPGASPGTSSTGSPGASPGTSSTGSPGSSTPSGATGSPGSSPSASTGTGPGASPGTSSTGSPGSSPSASTGTGPGTPGSGTASSSPGSSTPSGATGSPGSSTPSGATGSPGASPGTSSTGSP

SEQ ID NO: 93 - protein, 875 aa, synthetic construct
  REGION 1..875: note = Description of Artificial Sequence: Synthetic polypeptide
GTSTEPSEGSAPGSEPATSGSETPGSPAGSPTSTEEGSTSSTAESPGPGTSTPESGSASPGSTSESPSGTAPGSTSESPSGTAPGTSTPESGSASPGTSTPESGSASPGSEPATSGSETPGTSESATPESGPGSPAGSPTSTEEGTSTEPSEGSAPGTSESATPESGPGTSTEPSEGSAPGTSTEPSEGSAPGSPAGSPTSTEEGTSTEPSEGSAPGTSTEPSEGSAPGTSESATPESGPGTSESATPESGPGTSTEPSEGSAPGTSTEPSEGSAPGTSESATPESGPGTSTEPSEGSAPGSEPATSGSETPGSPAGSPTSTEEGSSTPSGATGSPGTPGSGTASSSPGSSTPSGATGSPGTSTEPSEGSAPGTSTEPSEGSAPGSEPATSGSETPGSPAGSPTSTEEGSPAGSPTSTEEGTSTEPSEGSAPGASASGAPSTGGTSESATPESGPGSPAGSPTSTEEGSPAGSPTSTEEGSTSSTAESPGPGSTSESPSGTAPGTSPSGESSTAPGTPGSGTASSSPGSSTPSGATGSPGSSPSASTGTGPGSEPATSGSETPGTSESATPESGPGSEPATSGSETPGSTSSTAESPGPGSTSSTAESPGPGTSPSGESSTAPGSEPATSGSETPGSEPATSGSETPGTSTEPSEGSAPGSTSSTAESPGPGTSTPESGSASPGSTSESPSGTAPGTSTEPSEGSAPGTSTEPSEGSAPGTSTEPSEGSAPGSSTPSGATGSPGSSPSASTGTGPGASPGTSSTGSPGSEPATSGSETPGTSESATPESGPGSPAGSPTSTEEGSSTPSGATGSPGSSPSASTGTGPGASPGTSSTGSPGTSESATPESGPGTSTEPSEGSAPGTSTEPSEGSAP

SEQ ID NO: 94 - protein, 913 aa, synthetic construct
  REGION 1..913: note = Description of Artificial Sequence: Synthetic polypeptide
MAEPAGSPTSTEEGTPGSGTASSSPGSSTPSGATGSPGASPGTSSTGSPGSPAGSPTSTEEGTSESATPESGPGTSTEPSEGSAPGSPAGSPTSTEEGTSTEPSEGSAPGTSTEPSEGSAPGTSESATPESGPGSEPATSGSETPGSEPATSGSETPGSPAGSPTSTEEGTSESATPESGPGTSTEPSEGSAPGTSTEPSEGSAPGSPAGSPTSTEEGTSTEPSEGSAPGTSTEPSEGSAPGTSESATPESGPGTSTEPSEGSAPGTSESATPESGPGSEPATSGSETPGTSTEPSEGSAPGTSTEPSEGSAPGTSESATPESGPGTSESATPESGPGSPAGSPTSTEEGTSESATPESGPGSEPATSGSETPGTSESATPESGPGTSTEPSEGSAPGTSTEPSEGSAPGTSTEPSEGSAPGTSTEPSEGSAPGTSTEPSEGSAPGTSTEPSEGSAPGSPAGSPTSTEEGTSTEPSEGSAPGTSESATPESGPGSEPATSGSETPGTSESATPESGPGSEPATSGSETPGTSESATPESGPGTSTEPSEGSAPGTSESATPESGPGSPAGSPTSTEEGSPAGSPTSTEEGSPAGSPTSTEEGTSESATPESGPGTSTEPSEGSAPGTSESATPESGPGSEPATSGSETPGTSESATPESGPGSEPATSGSETPGTSESATPESGPGTSTEPSEGSAPGSPAGSPTSTEEGTSESATPESGPGSEPATSGSETPGTSESATPESGPGSPAGSPTSTEEGSPAGSPTSTEEGTSTEPSEGSAPGTSESATPESGPGTSESATPESGPGTSESATPESGPGSEPATSGSETPGSEPATSGSETPGSPAGSPTSTEEGTSTEPSEGSAPGTSTEPSEGSAPGSEPATSGSETPGTSESATPESGPGTSTEPSEGSAP

SEQ ID NO: 95 - protein, 924 aa, synthetic construct
  REGION 1..924: note = Description of Artificial Sequence: Synthetic polypeptide
MAEPAGSPTSTEEGASPGTSSTGSPGSSTPSGATGSPGSSTPSGATGSPGTSTEPSEGSAPGSEPATSGSETPGSPAGSPTSTEEGSTSSTAESPGPGTSTPESGSASPGSTSESPSGTAPGSTSESPSGTAPGTSTPESGSASPGTSTPESGSASPGSEPATSGSETPGTSESATPESGPGSPAGSPTSTEEGTSTEPSEGSAPGTSESATPESGPGTSTEPSEGSAPGTSTEPSEGSAPGSPAGSPTSTEEGTSTEPSEGSAPGTSTEPSEGSAPGTSESATPESGPGTSESATPESGPGTSTEPSEGSAPGTSTEPSEGSAPGTSESATPESGPGTSTEPSEGSAPGSEPATSGSETPGSPAGSPTSTEEGSSTPSGATGSPGTPGSGTASSSPGSSTPSGATGSPGTSTEPSEGSAPGTSTEPSEGSAPGSEPATSGSETPGSPAGSPTSTEEGSPAGSPTSTEEGTSTEPSEGSAPGASASGAPSTGGTSESATPESGPGSPAGSPTSTEEGSPAGSPTSTEEGSTSSTAESPGPGSTSESPSGTAPGTSPSGESSTAPGTPGSGTASSSPGSSTPSGATGSPGSSPSASTGTGPGSEPATSGSETPGTSESATPESGPGSEPATSGSETPGSTSSTAESPGPGSTSSTAESPGPGTSPSGESSTAPGSEPATSGSETPGSEPATSGSETPGTSTEPSEGSAPGSTSSTAESPGPGTSTPESGSASPGSTSESPSGTAPGTSTEPSEGSAPGTSTEPSEGSAPGTSTEPSEGSAPGSSTPSGATGSPGSSPSASTGTGPGASPGTSSTGSPGSEPATSGSETPGTSESATPESGPGSPAGSPTSTEEGSSTPSGATGSPGSSPSASTGTGPGASPGTSSTGSPGTSESATPESGPGTSTEPSEGSAPGTSTEPSEGSAP

SEQ ID NO: 96 - protein, 1318 aa, synthetic construct
  REGION 1..1318: note = Description of Artificial Sequence: Synthetic polypeptide
GTSTEPSEGSAPGSEPATSGSETPGSPAGSPTSTEEGSTSSTAESPGPGTSTPESGSASPGSTSESPSGTAPGSTSESPSGTAPGTSTPESGSASPGTSTPESGSASPGSEPATSGSETPGTSESATPESGPGSPAGSPTSTEEGTSTEPSEGSAPGTSESATPESGPGTSTEPSEGSAPGTSTEPSEGSAPGSPAGSPTSTEEGTSTEPSEGSAPGTSTEPSEGSAPGTSESATPESGPGTSESATPESGPGTSTEPSEGSAPGTSTEPSEGSAPGTSESATPESGPGTSTEPSEGSAPGSEPATSGSETPGSPAGSPTSTEEGSSTPSGATGSPGTPGSGTASSSPGSSTPSGATGSPGTSTEPSEGSAPGTSTEPSEGSAPGSEPATSGSETPGSPAGSPTSTEEGSPAGSPTSTEEGTSTEPSEGSAPGPEPTGPAPSGGSEPATSGSETPGTSESATPESGPGSPAGSPTSTEEGTSESATPESGPGSPAGSPTSTEEGSPAGSPTSTEEGTSESATPESGPGSPAGSPTSTEEGSPAGSPTSTEEGSTSSTAESPGPGSTSESPSGTAPGTSPSGESSTAPGSTSESPSGTAPGSTSESPSGTAPGTSPSGESSTAPGTSTEPSEGSAPGTSESATPESGPGTSESATPESGPGSEPATSGSETPGTSESATPESGPGTSESATPESGPGTSTEPSEGSAPGTSESATPESGPGTSTEPSEGSAPGTSPSGESSTAPGTSPSGESSTAPGTSPSGESSTAPGTSTEPSEGSAPGSPAGSPTSTEEGTSTEPSEGSAPGSSPSASTGTGPGSSTPSGATGSPGSSTPSGATGSPGSSTPSGATGSPGSSTPSGATGSPGASPGTSSTGSPGASASGAPSTGGTSPSGESSTAPGSTSSTAESPGPGTSPSGESSTAPGTSESATPESGPGTSTEPSEGSAPGTSTEPSEGSAPGSSPSASTGTGPGSSTPSGATGSPGASPGTSSTGSPGTSTPESGSASPGTSPSGESSTAPGTSPSGESSTAPGTSESATPESGPGSEPATSGSETPGTSTEPSEGSAPGSTSESPSGTAPGSTSESPSGTAPGTSTPESGSASPGSPAGSPTSTEEGTSESATPESGPGTSTEPSEGSAPGSPAGSPTSTEEGTSESATPESGPGSEPATSGSETPGSSTPSGATGSPGASPGTSSTGSPGSSTPSGATGSPGSTSESPSGTAPGTSPSGESSTAPGSTSSTAESPGPGSSTPSGATGSPGASPGTSSTGSPGTPGSGTASSSPGSPAGSPTSTEEGSPAGSPTSTEEGTSTEPSEGSAP

SEQ ID NO: 97 - protein, 864 aa, synthetic construct
  REGION 1..864: note = Description of Artificial Sequence: Synthetic polypeptide
GTSTEPSEPGSAGTSTEPSEPGSAGSEPATSGTEPSGSGASEPTSTEPGSEPATSGTEPSGSEPATSGTEPSGSEPATSGTEPSGSGASEPTSTEPGTSTEPSEPGSAGSEPATSGTEPSGTSTEPSEPGSAGSEPATSGTEPSGSEPATSGTEPSGTSTEPSEPGSAGTSTEPSEPGSAGSEPATSGTEPSGSEPATSGTEPSGTSEPSTSEPGAGSGASEPTSTEPGTSEPSTSEPGAGSEPATSGTEPSGSEPATSGTEPSGTSTEPSEPGSAGTSTEPSEPGSAGSGASEPTSTEPGSEPATSGTEPSGSEPATSGTEPSGSEPATSGTEPSGSEPATSGTEPSGTSTEPSEPGSAGSEPATSGTEPSGSGASEPTSTEPGTSTEPSEPGSAGSEPATSGTEPSGSGASEPTSTEPGTSTEPSEPGSAGSGASEPTSTEPGSEPATSGTEPSGSGASEPTSTEPGSEPATSGTEPSGSGASEPTSTEPGTSTEPSEPGSAGSEPATSGTEPSGSGASEPTSTEPGTSTEPSEPGSAGSEPATSGTEPSGTSTEPSEPGSAGSEPATSGTEPSGTSTEPSEPGSAGTSTEPSEPGSAGTSTEPSEPGSAGTSTEPSEPGSAGTSTEPSEPGSAGTSTEPSEPGSAGTSEPSTSEPGAGSGASEPTSTEPGTSTEPSEPGSAGTSTEPSEPGSAGTSTEPSEPGSAGSEPATSGTEPSGSGASEPTSTEPGSEPATSGTEPSGSEPATSGTEPSGSEPATSGTEPSGSEPATSGTEPSGTSEPSTSEPGAGSEPATSGTEPSGSGASEPTSTEPGTSTEPSEPGSAGSEPATSGTEPSGSGASEPTSTEPGTSTEPSEPGSA

SEQ ID NO: 98 - protein, 864 aa, synthetic construct
  REGION 1..864: note = Description of Artificial Sequence: Synthetic polypeptide
GSETATSGSETAGTSESATSESGAGSTAGSETSTEAGTSESATSESGAGSETATSGSETAGSETATSGSETAGTSTEASEGSASGTSTEASEGSASGTSESATSESGAGSETATSGSETAGTSTEASEGSASGSTAGSETSTEAGTSESATSESGAGTSESATSESGAGSETATSGSETAGTSESATSESGAGTSTEASEGSASGSETATSGSETAGSETATSGSETAGTSTEASEGSASGSTAGSETSTEAGTSESATSESGAGTSTEASEGSASGSETATSGSETAGSTAGSETSTEAGSTAGSETSTEAGSETATSGSETAGTSESATSESGAGTSESATSESGAGSETATSGSETAGTSESATSESGAGTSESATSESGAGSETATSGSETAGSETATSGSETAGTSTEASEGSASGSTAGSETSTEAGSETATSGSETAGTSESATSESGAGSTAGSETSTEAGSTAGSETSTEAGSTAGSETSTEAGTSTEASEGSASGSTAGSETSTEAGSTAGSETSTEAGTSTEASEGSASGSTAGSETSTEAGSETATSGSETAGTSTEASEGSASGTSESATSESGAGSETATSGSETAGTSESATSESGAGTSESATSESGAGSETATSGSETAGTSESATSESGAGSETATSGSETAGTSTEASEGSASGTSTEASEGSASGSTAGSETSTEAGSTAGSETSTEAGSETATSGSETAGTSESATSESGAGTSESATSESGAGSETATSGSETAGSETATSGSETAGSETATSGSETAGTSTEASEGSASGTSESATSESGAGSETATSGSETAGSETATSGSETAGTSESATSESGAGTSESATSESGAGSETATSGSETA

SEQ ID NO: 99 - protein, 948 aa, synthetic construct
  REGION 1..948: note = Description of Artificial Sequence: Synthetic polypeptide
GTSTEPSEGSAPGTSESATPESGPGSEPATSGSETPGTSESATPESGPGTSTEPSEGSAPGSPAGSPTSTEEGTSTEPSEGSAPGSEPATSGSETPGTSESATPESGPGTSESATPESGPGSEPATSGSETPGTSTEPSEGSAPGTSESATPESGPGTSTEPSEGSAPGTSTEPSEGSAPGSEPATSGSETPGTSTEPSEGSAPGSEPATSGSETPGSEPATSGSETPGTSTEPSEGSAPGSEPATSGSETPGSEPATSGSETPGTSTEPSEGSAPGSEPATSGSETPGSPAGSPTSTEEGTSESATPESGPGTSTEPSEGSAPGSEPATSGSETPGTSESATPESGPGSEPATSGSETPGSEPATSGSETPGTSESATPESGPGSPAGSPTSTEEGTSESATPESGPGSPAGSPTSTEEGTSTEPSEGSAPGTSESATPESGPGTSTEPSEGSAPGTSTEPSEGSAPGSPAGSPTSTEEGTSTEPSEGSAPGTSESATPESGPGSPAGSPTSTEEGSPAGSPTSTEEGTSESATPESGPGTSESATPESGPGTSTEPSEGSAPGSPAGSPTSTEEGTSESATPESGPGTSTEPSEGSAPGSEPATSGSETPGSPAGSPTSTEEGTSESATPESGPGTSTEPSEGSAPGSEPATSGSETPGSEPATSGSETPGSEPATSGSETPGSPAGSPTSTEEGTSESATPESGPGSEPATSGSETPGSEPATSGSETPGSPAGSPTSTEEGSPAGSPTSTEEGSPAGSPTSTEEGTSESATPESGPGSEPATSGSETPGTSTEPSEGSAPGTSTEPSEGSAPGSPAGSPTSTEEGSPAGSPTSTEEGSPAGSPTSTEEGTSTEPSEGSAPGTSESATPESGPGTSESATPESGPGTSTEPSEGSAPGTSTEPSEGSAPGTSTEPSEGSAPGTSESATPESGPGTSESATPESGP

SEQ ID NO: 100 - protein, 1024 aa, synthetic construct
  REGION 1..1024: note = Description of Artificial Sequence: Synthetic polypeptide
GSEPATSGSETPGSEPATSGSETPGTSTEPSEGSAPGTSESATPESGPGSPAGSPTSTEEGTSTEPSEGSAPGTSESATPESGPGTSESATPESGPGSEPATSGSETPGSEPATSGSETPGTSESATPESGPGTSESATPESGPGSPAGSPTSTEEGTSTEPSEGSAPGSEPATSGSETPGTSTEPSEGSAPGSPAGSPTSTEEGSPAGSPTSTEEGSPAGSPTSTEEGTSTEPSEGSAPGTSESATPESGPGSEPATSGSETPGTSESATPESGPGTSESATPESGPGSPAGSPTSTEEGTSTEPSEGSAPGSEPATSGSETPGTSTEPSEGSAPGTSESATPESGPGSPAGSPTSTEEGTSTEPSEGSAPGTSTEPSEGSAPGSPAGSPTSTEEGTSTEPSEGSAPGTSESATPESGPGSPAGSPTSTEEGTSESATPESGPGSEPATSGSETPGTSTEPSEGSAPGSEPATSGSETPGTSESATPESGPGTSTEPSEGSAPGTSESATPESGPGTSTEPSEGSAPGTSTEPSEGSAPGSEPATSGSETPGSPAGSPTSTEEGTSESATPESGPGTSTEPSEGSAPGSPAGSPTSTEEGTSTEPSEGSAPGTSESATPESGPGTSTEPSEGSAPGSEPATSGSETPGSEPATSGSETPGTSESATPESGPGTSESATPESGPGTSESATPESGPGTSTEPSEGSAPGTSTEPSEGSAPGSPAGSPTSTEEGSPAGSPTSTEEGTSESATPESGPGSPAGSPTSTEEGSPAGSPTSTEEGTSESATPESGPGSEPATSGSETPGTSTEPSEGSAPGSEPATSGSETPGSPAGSPTSTEEGTSESATPESGPGTSESATPESGPGSEPATSGSETPGTSTEPSEGSAPGTSTEPSEGSAPGSPAGSPTSTEEGTSTEPSEGSAPGTSTEPSEGSAPGSEPATSGSETPGSPAGSPTSTEEGTSESATPESGPGTSTEPSEGSAPGSPAGSPTSTEEGTSESATPESGPGTSESATPESGPGTST

SEQ ID NO: 101 - protein, 1024 aa, synthetic construct
  REGION 1..1024: note = Description of Artificial Sequence: Synthetic polypeptide
GSEPATSGSETPGSEPATSGSETPGTSTEPSEGSAPGSEPATSGSETPGTSESATPESGPGSEPATSGSETPGSPAGSPTSTEEGTSESATPESGPGSEPATSGSETPGTSTEPSEGSAPGTSESATPESGPGTSESATPESGPGTSTEPSEGSAPGTSTEPSEGSAPGSEPATSGSETPGSPAGSPTSTEEGTSTEPSEGSAPGSEPATSGSETPGSPAGSPTSTEEGTSTEPSEGSAPGTSESATPESGPGSPAGSPTSTEEGTSTEPSEGSAPGTSESATPESGPGSEPATSGSETPGTSESATPESGPGSEPATSGSETPGTSTEPSEGSAPGTSTEPSEGSAPGTSTEPSEGSAPGSPAGSPTSTEEGSPAGSPTSTEEGTSESATPESGPGTSTEPSEGSAPGTSTEPSEGSAPGSPAGSPTSTEEGSPAGSPTSTEEGSPAGSPTSTEEGTSESATPESGPGSEPATSGSETPGTSESATPESGPGSPAGSPTSTEEGTSTEPSEGSAPGTSESATPESGPGSEPATSGSETPGSPAGSPTSTEEGTSTEPSEGSAPGTSESATPESGPGTSESATPESGPGSPAGSPTSTEEGTSTEPSEGSAPGSPAGSPTSTEEGSPAGSPTSTEEGTSESATPESGPGSEPATSGSETPGTSTEPSEGSAPGSEPATSGSETPGTSESATPESGPGTSTEPSEGSAPGTSESATPESGPGTSESATPESGPGTSTEPSEGSAPGTSTEPSEGSAPGSEPATSGSETPGTSESATPESGPGTSTEPSEGSAPGSEPATSGSETPGSPAGSPTSTEEGTSESATPESGPGSPAGSPTSTEEGTSTEPSEGSAPGSEPATSGSETPGSEPATSGSETPGSEPATSGSETPGTSESATPESGPGTSESATPESGPGTSTEPSEGSAPGTSTEPSEGSAPGSEPATSGSETPGTSTEPSEGSAPGTSESATPESGPGSPAGSPTSTEEGSPAGSPTSTEEGTSTEPSEGSAPGSPAGSPTSTEEGSPA

SEQ ID NO: 102 - protein, 1024 aa, synthetic construct
  REGION 1..1024: note = Description of Artificial Sequence: Synthetic polypeptide
GSPAGSPTSTEEGTSTEPSEGSAPGSPAGSPTSTEEGTSESATPESGPGSEPATSGSETPGTSTEPSEGSAPGTSTEPSEGSAPGTSESATPESGPGTSTEPSEGSAPGTSTEPSEGSAPGSEPATSGSETPGSPAGSPTSTEEGTSESATPESGPGSPAGSPTSTEEGTSTEPSEGSAPGSPAGSPTSTEEGTSTEPSEGSAPGSPAGSPTSTEEGTSTEPSEGSAPGSPAGSPTSTEEGSPAGSPTSTEEGTSTEPSEGSAPGSEPATSGSETPGSPAGSPTSTEEGTSESATPESGPGSEPATSGSETPGSEPATSGSETPGTSESATPESGPGSPAGSPTSTEEGTSESATPESGPGSEPATSGSETPGSEPATSGSETPGTSESATPESGPGTSESATPESGPGTSTEPSEGSAPGTSTEPSEGSAPGTSESATPESGPGSPAGSPTSTEEGTSTEPSEGSAPGSEPATSGSETPGSPAGSPTSTEEGTSTEPSEGSAPGTSTEPSEGSAPGSPAGSPTSTEEGSPAGSPTSTEEGSPAGSPTSTEEGTSESATPESGPGSEPATSGSETPGTSESATPESGPGTSESATPESGPGTSTEPSEGSAPGTSESATPESGPGSPAGSPTSTEEGTSESATPESGPGTSESATPESGPGTSTEPSEGSAPGSEPATSGSETPGTSTEPSEGSAPGSPAGSPTSTEEGTSESATPESGPGTSTEPSEGSAPGTSTEPSEGSAPGSEPATSGSETPGSEPATSGSETPGTSESATPESGPGSEPATSGSETPGSPAGSPTSTEEGTSESATPESGPGSEPATSGSETPGTSTEPSEGSAPGTSESATPESGPGTSESATPESGPGTSTEPSEGSAPGSEPATSGSETPGTSTEPSEGSAPGSPAGSPTSTEEGSPAGSPTSTEEGTSESATPESGPGSEPATSGSETPGSPAGSPTSTEEGSPAGSPTSTEEGTSESATPESGPGSEPATSGSETPGTSTEPSEGSAPGTSTEPSEGSAPGSEP

SEQ ID NO: 103 - protein, 1024 aa, synthetic construct
  REGION 1..1024: note = Description of Artificial Sequence: Synthetic polypeptide
GSPAGSPTSTEEGTSTEPSEGSAPGTSESATPESGPGTSESATPESGPGSEPATSGSETPGTSTEPSEGSAPGTSESATPESGPGSPAGSPTSTEEGTSTEPSEGSAPGTSESATPESGPGSPAGSPTSTEEGTSTEPSEGSAPGTSESATPESGPGTSTEPSEGSAPGSEPATSGSETPGSEPATSGSETPGSEPATSGSETPGTSESATPESGPGSPAGSPTSTEEGTSESATPESGPGSEPATSGSETPGTSESATPESGPGTSESATPESGPGSPAGSPTSTEEGTSTEPSEGSAPGTSESATPESGPGTSTEPSEGSAPGTSTEPSEGSAPGTSTEPSEGSAPGSEPATSGSETPGTSTEPSEGSAPGTSESATPESGPGTSESATPESGPGTSTEPSEGSAPGTSESATPESGPGTSESATPESGPGSEPATSGSETPGTSTEPSEGSAPGTSESATPESGPGSPAGSPTSTEEGSPAGSPTSTEEGTSTEPSEGSAPGSEPATSGSETPGSEPATSGSETPGTSTEPSEGSAPGSEPATSGSETPGSPAGSPTSTEEGTSESATPESGPGSEPATSGSETPGSEPATSGSETPGTSESATPESGPGTSESATPESGPGTSTEPSEGSAPGSPAGSPTSTEEGTSESATPESGPGTSTEPSEGSAPGSEPATSGSETPGSPAGSPTSTEEGTSTEPSEGSAPGTSTEPSEGSAPGSEPATSGSETPGTSESATPESGPGTSTEPSEGSAPGSPAGSPTSTEEGTSESATPESGPGTSESATPESGPGTSTEPSEGSAPGSEPATSGSETPGSEPATSGSETPGTSTEPSEGSAPGTSESATPESGPGSPAGSPTSTEEGTSTEPSEGSAPGTSTEPSEGSAPGSPAGSPTSTEEGSPAGSPTSTEEGTSTEPSEGSAPGSEPATSGSETPGSPAGSPTSTEEGTSESATPESGPGSEPATSGSETPGSEPATSGSETPGTSESATPESGPGTSESATPESGPGTSTEPSEGSAPGTST

SEQ ID NO: 104 - protein, 1024 aa, synthetic construct
  REGION 1..1024: note = Description of Artificial Sequence: Synthetic polypeptide
GSEPATSGSETPGSPAGSPTSTEEGTSTEPSEGSAPGSEPATSGSETPGTSESATPESGPGTSTEPSEGSAPGTSESATPESGPGSPAGSPTSTEEGTSTEPSEGSAPGTSTEPSEGSAPGSPAGSPTSTEEGTSTEPSEGSAPGTSESATPESGPGSEPATSGSETPGTSESATPESGPGSEPATSGSETPGTSTEPSEGSAPGTSTEPSEGSAPGSEPATSGSETPGTSTEPSEGSAPGTSTEPSEGSAPGSPAGSPTSTEEGTSTEPSEGSAPGTSESATPESGPGTSESATPESGPGTSTEPSEGSAPGTSTEPSEGSAPGSPAGSPTSTEEGSPAGSPTSTEEGTSTEPSEGSAPGSEPATSGSETPGSPAGSPTSTEEGTSTEPSEGSAPGSPAGSPTSTEEGSPAGSPTSTEEGTSESATPESGPGSEPATSGSETPGSEPATSGSETPGTSTEPSEGSAPGSPAGSPTSTEEGSPAGSPTSTEEGTSESATPESGPGSEPATSGSETPGSEPATSGSETPGTSESATPESGPGSEPATSGSETPGSEPATSGSETPGTSESATPESGPGTSESATPESGPGTSESATPESGPGTSESATPESGPGSPAGSPTSTEEGTSTEPSEGSAPGTSESATPESGPGTSTEPSEGSAPGTSTEPSEGSAPGTSESATPESGPGTSTEPSEGSAPGTSESATPESGPGSPAGSPTSTEEGTSTEPSEGSAPGSEPATSGSETPGTSTEPSEGSAPGSEPATSGSETPGTSTEPSEGSAPGTSTEPSEGSAPGSPAGSPTSTEEGTSESATPESGPGTSTEPSEGSAPGSEPATSGSETPGTSESATPESGPGTSESATPESGPGTSESATPESGPGTSTEPSEGSAPGSEPATSGSETPGSPAGSPTSTEEGTSESATPESGPGTSTEPSEGSAPGTSTEPSEGSAPGSPAGSPTSTEEGTSESATPESGPGTSTEPSEGSAPGTSTEPSEGSAPGSPAGSPTSTEEGTSESATPESGPGSPA

SEQ ID NO: 105 - protein, 1024 aa, synthetic construct
  REGION 1..1024: note = Description of Artificial Sequence: Synthetic polypeptide
GTSTEPSEGSAPGTSTEPSEGSAPGTSTEPSEGSAPGTSTEPSEGSAPGSPAGSPTSTEEGSPAGSPTSTEEGTSESATPESGPGSEPATSGSETPGTSTEPSEGSAPGTSESATPESGPGTSTEPSEGSAPGTSESATPESGPGTSESATPESGPGSPAGSPTSTEEGTSTEPSEGSAPGSEPATSGSETPGTSTEPSEGSAPGSPAGSPTSTEEGTSTEPSEGSAPGSPAGSPTSTEEGSPAGSPTSTEEGSPAGSPTSTEEGTSESATPESGPGSEPATSGSETPGTSESATPESGPGTSESATPESGPGSPAGSPTSTEEGTSTEPSEGSAPGSEPATSGSETPGTSTEPSEGSAPGSPAGSPTSTEEGSPAGSPTSTEEGTSTEPSEGSAPGSEPATSGSETPGSPAGSPTSTEEGTSESATPESGPGSEPATSGSETPGSPAGSPTSTEEGTSESATPESGPGTSESATPESGPGTSTEPSEGSAPGSEPATSGSETPGSEPATSGSETPGTSESATPESGPGSEPATSGSETPGTSTEPSEGSAPGSPAGSPTSTEEGTSTEPSEGSAPGSEPATSGSETPGSEPATSGSETPGSPAGSPTSTEEGTSESATPESGPGTSTEPSEGSAPGSPAGSPTSTEEGSPAGSPTSTEEGTSESATPESGPGSPAGSPTSTEEGTSTEPSEGSAPGSEPATSGSETPGSEPATSGSETPGSEPATSGSETPGTSESATPESGPGTSESATPESGPGTSTEPSEGSAPGTSTEPSEGSAPGSEPATSGSETPGTSTEPSEGSAPGTSESATPESGPGSPAGSPTSTEEGSPAGSPTSTEEGTSTEPSEGSAPGTSESATPESGPGSPAGSPTSTEEGTSTEPSEGSAPGSEPATSGSETPGTSESATPESGPGSEPATSGSETPGTSESATPESGPGSEPATSGSETPGSEPATSGSETPGTSTEPSEGSAPGTSESATPESGPGTSTEPSEGSAPGTSTEPSEGSAPGTSESATPESGPGSPA

SEQ ID NO: 106 - protein, 1024 aa, synthetic construct
  REGION 1..1024: note = Description of Artificial Sequence: Synthetic polypeptide
GSEPATSGSETPGTSTEPSEGSAPGSEPATSGSETPGTSTEPSEGSAPGTSESATPESGPGTSESATPESGPGSEPATSGSETPGTSTEPSEGSAPGTSTEPSEGSAPGTSESATPESGPGTSTEPSEGSAPGTSTEPSEGSAPGSEPATSGSETPGSPAGSPTSTEEGTSESATPESGPGTSESATPESGPGTSTEPSEGSAPGTSESATPESGPGSEPATSGSETPGTSESATPESGPGTSESATPESGPGTSTEPSEGSAPGTSTEPSEGSAPGSEPATSGSETPGSPAGSPTSTEEGTSESATPESGPGSEPATSGSETPGSEPATSGSETPGTSESATPESGPGTSESATPESGPGSPAGSPTSTEEGTSTEPSEGSAPGTSESATPESGPGTSTEPSEGSAPGTSTEPSEGSAPGTSESATPESGPGTSTEPSEGSAPGSPAGSPTSTEEGSPAGSPTSTEEGTSESATPESGPGSEPATSGSETPGSEPATSGSETPGTSTEPSEGSAPGTSESATPESGPGSPAGSPTSTEEGSPAGSPTSTEEGTSTEPSEGSAPGSPAGSPTSTEEGSPAGSPTSTEEGTSESATPESGPGSEPATSGSETPGTSTEPSEGSAPGTSTEPSEGSAPGSEPATSGSETPGSPAGSPTSTEEGTSESATPESGPGSPAGSPTSTEEGTSTEPSEGSAPGTSESATPESGPGSEPATSGSETPGTSESATPESGPGTSESATPESGPGSPAGSPTSTEEGTSTEPSEGSAPGSEPATSGSETPGSPAGSPTSTEEGTSTEPSEGSAPGSEPATSGSETPGSEPATSGSETPGTSESATPESGPGTSESATPESGPGTSTEPSEGSAPGTSESATPESGPGSEPATSGSETPGTSESATPESGPGTSESATPESGPGTSTEPSEGSAPGTSESATPESGPGSEPATSGSETPGTSTEPSEGSAPGSPAGSPTSTEEGTSESATPESGPGTSTEPSEGSAPGTSTEPSEGSAPGSPAGSPTSTEEGTST

SEQ ID NO: 107 - protein, 1024 aa, synthetic construct
  REGION 1..1024: note = Description of Artificial Sequence: Synthetic polypeptide
GTSESATPESGPGTSTEPSEGSAPGTSESATPESGPGTSTEPSEGSAPGSEPATSGSETPGSPAGSPTSTEEGTSESATPESGPGSEPATSGSETPGSEPATSGSETPGTSESATPESGPGTSESATPESGPGTSTEPSEGSAPGSEPATSGSETPGSEPATSGSETPGTSESATPESGPGTSESATPESGPGSEPATSGSETPGTSESATPESGPGSPAGSPTSTEEGSPAGSPTSTEEGTSTEPSEGSAPGSEPATSGSETPGSPAGSPTSTEEGTSESATPESGPGSPAGSPTSTEEGTSTEPSEGSAPGSEPATSGSETPGSPAGSPTSTEEGTSESATPESGPGSPAGSPTSTEEGSPAGSPTSTEEGTSTEPSEGSAPGSEPATSGSETPGSPAGSPTSTEEGTSESATPESGPGTSTEPSEGSAPGSPAGSPTSTEEGTSESATPESGPGSEPATSGSETPGTSTEPSEGSAPGSPAGSPTSTEEGTSTEPSEGSAPGTSESATPESGPGTSESATPESGPGTSTEPSEGSAPGTSTEPSEGSAPGSEPATSGSETPGTSESATPESGPGTSESATPESGPGTSTEPSEGSAPGTSTEPSEGSAPGSPAGSPTSTEEGSPAGSPTSTEEGTSTEPSEGSAPGSEPATSGSETPGSEPATSGSETPGTSESATPESGPGSPAGSPTSTEEGTSESATPESGPGTSTEPSEGSAPGTSTEPSEGSAPGSPAGSPTSTEEGSPAGSPTSTEEGTSESATPESGPGSPAGSPTSTEEGTSTEPSEGSAPGSEPATSGSETPGSPAGSPTSTEEGSPAGSPTSTEEGTSTEPSEGSAPGTSESATPESGPGTSESATPESGPGSPAGSPTSTEEGTSTEPSEGSAPGSPAGSPTSTEEGTSTEPSEGSAPGSPAGSPTSTEEGTSTEPSEGSAPGTSTEPSEGSAPGSEPATSGSETPGSPAGSPTSTEEGTSESATPESGPGSEPATSGSETPGSPAGSPTSTEEGTSESATPESGPGTSE

SEQ ID NO: 108 - protein, 1024 aa, synthetic construct
  REGION 1..1024: note = Description of Artificial Sequence: Synthetic polypeptide
GTSESATPESGPGSPAGSPTSTEEGSPAGSPTSTEEGTSESATPESGPGSEPATSGSETPGTSTEPSEGSAPGTSTEPSEGSAPGTSTEPSEGSAPGSPAGSPTSTEEGTSTEPSEGSAPGTSESATPESGPGTSESATPESGPGSPAGSPTSTEEGSPAGSPTSTEEGSPAGSPTSTEEGTSESATPESGPGSEPATSGSETPGTSESATPESGPGTSTEPSEGSAPGTSESATPESGPGTSTEPSEGSAPGTSTEPSEGSAPGTSESATPESGPGSPAGSPTSTEEGTSESATPESGPGTSTEPSEGSAPGSPAGSPTSTEEGTSESATPESGPGSEPATSGSETPGTSTEPSEGSAPGSEPATSGSETPGSEPATSGSETPGTSESATPESGPGTSESATPESGPGTSTEPSEGSAPGTSESATPESGPGSPAGSPTSTEEGTSTEPSEGSAPGSEPATSGSETPGTSESATPESGPGSEPATSGSETPGTSTEPSEGSAPGTSESATPESGPGSPAGSPTSTEEGSPAGSPTSTEEGSPAGSPTSTEEGTSESATPESGPGSEPATSGSETPGTSESATPESGPGTSESATPESGPGSEPATSGSETPGTSTEPSEGSAPGTSTEPSEGSAPGTSTEPSEGSAPGTSESATPESGPGSEPATSGSETPGTSESATPESGPGSEPATSGSETPGTSTEPSEGSAPGSEPATSGSETPGSPAGSPTSTEEGTSESATPESGPGTSESATPESGPGTSESATPESGPGSPAGSPTSTEEGTSTEPSEGSAPGTSESATPESGPGTSESATPESGPGTSTEPSEGSAPGTSTEPSEGSAPGSPAGSPTSTEEGTSESATPESGPGSEPATSGSETPGTSESATPESGPGTSESATPESGPGTSTEPSEGSAPGSEPATSGSETPGTSESATPESGPGSPAGSPTSTEEGTSTEPSEGSAPGSEPATSGSETPGSPAGSPTSTEEGTSESATPESGPGSPAGSPTSTEEGTSTEPSEGSAPGSEP

SEQ ID NO: 109 - protein, 1024 aa, synthetic construct
  REGION 1..1024: note = Description of Artificial Sequence: Synthetic polypeptide
GSEPATSGSETPGTSTEPSEGSAPGTSESATPESGPGSEPATSGSETPGTSTEPSEGSAPGSPAGSPTSTEEGTSESATPESGPGSPAGSPTSTEEGTSTEPSEGSAPGSEPATSGSETPGTSTEPSEGSAPGTSESATPESGPGSEPATSGSETPGSEPATSGSETPGTSESATPESGPGTSTEPSEGSAPGTSESATPESGPGTSESATPESGPGSPAGSPTSTEEGSPAGSPTSTEEGTSESATPESGPGTSESATPESGPGTSTEPSEGSAPGTSTEPSEGSAPGSPAGSPTSTEEGTSTEPSEGSAPGSEPATSGSETPGSEPATSGSETPGSEPATSGSETPGSEPATSGSETPGTSESATPESGPGTSESATPESGPGTSESATPESGPGTSTEPSEGSAPGTSESATPESGPGTSESATPESGPGTSTEPSEGSAPGSPAGSPTSTEEGTSTEPSEGSAPGSEPATSGSETPGSPAGSPTSTEEGTSESATPESGPGTSTEPSEGSAPGSEPATSGSETPGTSESATPESGPGTSESATPESGPGTSTEPSEGSAPGSEPATSGSETPGSPAGSPTSTEEGTSESATPESGPGTSESATPESGPGTSTEPSEGSAPGSEPATSGSETPGSPAGSPTSTEEGTSESATPESGPGSEPATSGSETPGTSTEPSEGSAPGSEPATSGSETPGSPAGSPTSTEEGTSESATPESGPGTSTEPSEGSAPGSEPATSGSETPGTSESATPESGPGTSESATPESGPGSPAGSPTSTEEGTSTEPSEGSAPGSPAGSPTSTEEGSPAGSPTSTEEGSPAGSPTSTEEGTSESATPESGPGSEPATSGSETPGTSTEPSEGSAPGTSTEPSEGSAPGTSESATPESGPGTSTEPSEGSAPGTSESATPESGPGSEPATSGSETPGTSTEPSEGSAPGTSESATPESGPGSPAGSPTSTEEGSPAGSPTSTEEGSPAGSPTSTEEGTSESATPESGPGSPAGSPTSTEEGTSESATPESGPGSEP

SEQ ID NO: 110 - protein, 1024 aa, synthetic construct
  REGION 1..1024: note = Description of Artificial Sequence: Synthetic polypeptide
GTSTEPSEGSAPGSEPATSGSETPGTSTEPSEGSAPGTSTEPSEGSAPGSEPATSGSETPGSPAGSPTSTEEGSPAGSPTSTEEGTSESATPESGPGSEPATSGSETPGTSTEPSEGSAPGTSTEPSEGSAPGSPAGSPTSTEEGTSESATPESGPGTSESATPESGPGSPAGSPTSTEEGTSTEPSEGSAPGTSESATPESGPGTSTEPSEGSAPGSEPATSGSETPGTSESATPESGPGSEPATSGSETPGTSTEPSEGSAPGTSTEPSEGSAPGSPAGSPTSTEEGSPAGSPTSTEEGTSESATPESGPGSPAGSPTSTEEGTSTEPSEGSAPGSEPATSGSETPGSEPATSGSETPGSPAGSPTSTEEGTSESATPESGPGTSTEPSEGSAPGSEPATSGSETPGTSESATPESGPGSEPATSGSETPGSPAGSPTSTEEGTSESATPESGPGTSESATPESGPGSEPATSGSETPGTSESATPESGPGTSESATPESGPGTSESATPESGPGTSTEPSEGSAPGTSESATPESGPGSEPATSGSETPGTSTEPSEGSAPGSPAGSPTSTEEGTSTEPSEGSAPGSEPATSGSETPGSPAGSPTSTEEGTSESATPESGPGTSESATPESGPGTSTEPSEGSAPGTSESATPESGPGTSTEPSEGSAPGTSESATPESGPGSEPATSGSETPGTSTEPSEGSAPGTSTEPSEGSAPGSPAGSPTSTEEGSPAGSPTSTEEGTSESATPESGPGTSTEPSEGSAPGTSESATPESGPGSPAGSPTSTEEGSPAGSPTSTEEGSPAGSPTSTEEGTSTEPSEGSAPGSPAGSPTSTEEGSPAGSPTSTEEGTSESATPESGPGSEPATSGSETPGSEPATSGSETPGTSESATPESGPGSEPATSGSETPGTSESATPESGPGTSTEPSEGSAPGTSTEPSEGSAPGSPAGSPTSTEEGSPAGSPTSTEEGTSESATPESGPGSPAGSPTSTEEGTSTEPSEGSAPGTSESATPESGPGTSE

SEQ ID NO: 111 - protein, 948 aa, synthetic construct
  REGION 1..948: note = Description of Artificial Sequence: Synthetic polypeptide
GSSTPSGATGSPGTPGSGTASSSPGASPGTSSTGSPGSSPSASTGTGPGTPGSGTASSSPGTPGSGTASSSPGTPGSGTASSSPGSSPSASTGTGPGTPGSGTASSSPGSSPSASTGTGPGSSTPSGATGSPGSSTPSGATGSPGSSPSASTGTGPGSSTPSGATGSPGASPGTSSTGSPGASPGTSSTGSPGSSPSASTGTGPGSSPSASTGTGPGASPGTSSTGSPGSSPSASTGTGPGASPGTSSTGSPGSSPSASTGTGPGASPGTSSTGSPGTPGSGTASSSPGTPGSGTASSSPGSSTPSGATGSPGSSTPSGATGSPGSSTPSGATGSPGASPGTSSTGSPGSSPSASTGTGPGASPGTSSTGSPGASPGTSSTGSPGSSTPSGATGSPGSSPSASTGTGPGSSPSASTGTGPGTPGSGTASSSPGASPGTSSTGSPGTPGSGTASSSPGSSTPSGATGSPGSSTPSGATGSPGSSPSASTGTGPGSSPSASTGTGPGSSTPSGATGSPGASPGTSSTGSPGTPGSGTASSSPGSSPSASTGTGPGSSTPSGATGSPGASPGTSSTGSPGSSTPSGATGSPGTPGSGTASSSPGSSPSASTGTGPGSSTPSGATGSPGASPGTSSTGSPGASPGTSSTGSPGTPGSGTASSSPGTPGSGTASSSPGSSPSASTGTGPGASPGTSSTGSPGASPGTSSTGSPGTPGSGTASSSPGTPGSGTASSSPGSSTPSGATGSPGSSPSASTGTGPGSSTPSGATGSPGSSPSASTGTGPGSSPSASTGTGPGTPGSGTASSSPGSSTPSGATGSPGASPGTSSTGSPGTPGSGTASSSPGTPGSGTASSSPGSSTPSGATGSPGTPGSGTASSSPGASPGTSSTGSPGSSTPSGATGSPGSSTPSGATGSPGTPGSGTASSSPGSSTPSGATGSPGSSTPSGATGSP

SEQ ID NO: 112 - protein, 1024 aa, synthetic construct
  REGION 1..1024: note = Description of Artificial Sequence: Synthetic polypeptide
GTPGSGTASSSPGTPGSGTASSSPGSSPSASTGTGPGTPGSGTASSSPGASPGTSSTGSPGTPGSGTASSSPGSSPSASTGTGPGSSTPSGATGSPGASPGTSSTGSPGASPGTSSTGSPGSSPSASTGTGPGSSTPSGATGSPGSSPSASTGTGPGSSPSASTGTGPGTPGSGTASSSPGTPGSGTASSSPGASPGTSSTGSPGSSTPSGATGSPGSSPSASTGTGPGTPGSGTASSSPGASPGTSSTGSPGTPGSGTASSSPGSSPSASTGTGPGSSPSASTGTGPGASPGTSSTGSPGASPGTSSTGSPGSSTPSGATGSPGSSTPSGATGSPGTPGSGTASSSPGSSPSASTGTGPGSSTPSGATGSPGASPGTSSTGSPGSSTPSGATGSPGSSTPSGATGSPGSSPSASTGTGPGASPGTSSTGSPGTPGSGTASSSPGASPGTSSTGSPGSSPSASTGTGPGTPGSGTASSSPGASPGTSSTGSPGASPGTSSTGSPGSSTPSGATGSPGTPGSGTASSSPGSSTPSGATGSPGASPGTSSTGSPGTPGSGTASSSPGTPGSGTASSSPGSSTPSGATGSPGSSTPSGATGSPGTPGSGTASSSPGSSTPSGATGSPGSSTPSGATGSPGASPGTSSTGSPGSSPSASTGTGPGSSPSASTGTGPGASPGTSSTGSPGASPGTSSTGSPGTPGSGTASSSPGSSPSASTGTGPGTPGSGTASSSPGSSTPSGATGSPGSSTPSGATGSPGASPGTSSTGSPGSSPSASTGTGPGASPGTSSTGSPGSSPSASTGTGPGSSPSASTGTGPGASPGTSSTGSPGASPGTSSTGSPGSSTPSGATGSPGASPGTSSTGSPGASPGTSSTGSPGTPGSGTASSSPGTPGSGTASSSPGTPGSGTASSSPGSSTPSGATGSPGSSTPSGATGSPGSSPSASTGTGPGSSPSASTGTGPGTPGSGTASSSPGSSPSASTGTGPGASPGTSSTGSPGSSTPSGATGSPGTPGSGTASSSPGSST

SEQ ID NO: 113 - protein, 1024 aa, synthetic construct
  REGION 1..1024: note = Description of Artificial Sequence: Synthetic polypeptide
GASPGTSSTGSPGSSPSASTGTGPGSSTPSGATGSPGASPGTSSTGSPGASPGTSSTGSPGSSTPSGATGSPGTPGSGTASSSPGASPGTSSTGSPGTPGSGTASSSPGTPGSGTASSSPGSSTPSGATGSPGSSTPSGATGSPGTPGSGTASSSPGSSTPSGATGSPGSSTPSGATGSPGSSPSASTGTGPGSSPSASTGTGPGASPGTSSTGSPGTPGSGTASSSPGASPGTSSTGSPGSSTPSGATGSPGTPGSGTASSSPGSSPSASTGTGPGSSTPSGATGSPGSSPSASTGTGPGSSTPSGATGSPGASPGTSSTGSPGSSPSASTGTGPGTPGSGTASSSPGASPGTSSTGSPGSSTPSGATGSPGASPGTSSTGSPGSSPSASTGTGPGTPGSGTASSSPGTPGSGTASSSPGASPGTSSTGSPGTPGSGTASSSPGTPGSGTASSSPGSSPSASTGTGPGASPGTSSTGSPGSSTPSGATGSPGASPGTSSTGSPGSSPSASTGTGPGTPGSGTASSSPGSSPSASTGTGPGSSPSASTGTGPGASPGTSSTGSPGASPGTSSTGSPGTPGSGTASSSPGASPGTSSTGSPGASPGTSSTGSPGTPGSGTASSSPGTPGSGTASSSPGSSTPSGATGSPGSSTPSGATGSPGTPGSGTASSSPGSSPSASTGTGPGTPGSGTASSSPGSSTPSGATGSPGSSTPSGATGSPGASPGTSSTGSPGTPGSGTASSSPGASPGTSSTGSPGSSTPSGATGSPGSSTPSGATGSPGTPGSGTASSSPGSSTPSGATGSPGSSTPSGATGSPGASPGTSSTGSPGSSPSASTGTGPGSSTPSGATGSPGSSTPSGATGSPGSSPSASTGTGPGSSPSASTGTGPGSSTPSGATGSPGASPGTSSTGSPGSSPSASTGTGPGTPGSGTASSSPGASPGTSSTGSPGSSPSASTGTGPGASPGTSSTGSPGSSTPSGATGSPGSSPSASTGTGPGSSPSASTGTGPGASPGTSSTGSPGSST

SEQ ID NO: 114 - protein, 1024 aa, synthetic construct
  REGION 1..1024: note = Description of Artificial Sequence: Synthetic polypeptide
GSSPSASTGTGPGTPGSGTASSSPGSSPSASTGTGPGSSPSASTGTGPGTPGSGTASSSPGASPGTSSTGSPGSSTPSGATGSPGTPGSGTASSSPGASPGTSSTGSPGTPGSGTASSSPGTPGSGTASSSPGSSPSASTGTGPGSSPSASTGTGPGSSTPSGATGSPGASPGTSSTGSPGSSPSASTGTGPGTPGSGTASSSPGTPGSGTASSSPGSSTPSGATGSPGASPGTSSTGSPGSSPSASTGTGPGTPGSGTASSSPGTPGSGTASSSPGASPGTSSTGSPGSSTPSGATGSPGSSTPSGATGSPGSSPSASTGTGPGSSPSASTGTGPGASPGTSSTGSPGSSPSASTGTGPGSSTPSGATGSPGASPGTSSTGSPGASPGTSSTGSPGSSTPSGATGSPGSSPSASTGTGPGASPGTSSTGSPGASPGTSSTGSPGTPGSGTASSSPGSSTPSGATGSPGASPGTSSTGSPGSSTPSGATGSPGTPGSGTASSSPGSSPSASTGTGPGSSTPSGATGSPGTPGSGTASSSPGSSTPSGATGSPGSSTPSGATGSPGASPGTSSTGSPGSSPSASTGTGPGSSPSASTGTGPGASPGTSSTGSPGSSPSASTGTGPGTPGSGTASSSPGTPGSGTASSSPGASPGTSSTGSPGTPGSGTASSSPGASPGTSSTGSPGTPGSGTASSSPGASPGTSSTGSPGSSTPSGATGSPGASPGTSSTGSPGSSPSASTGTGPGTPGSGTASSSPGTPGSGTASSSPGSSPSASTGTGPGTPGSGTASSSPGASPGTSSTGSPGSSTPSGATGSPGTPGSGTASSSPGASPGTSSTGSPGTPGSGTASSSPGTPGSGTASSSPGSSTPSGATGSPGTPGSGTASSSPGSSPSASTGTGPGSSTPSGATGSPGTPGSGTASSSPGSSTPSGATGSPGSSTPSGATGSPGSSPSASTGTGPGASPGTSSTGSPGTPGSGTASSSPGSSPSASTGTGPGSSPSASTGTGPGASPGTSSTGSPGASP

SEQ ID NO: 115 - protein, 1024 aa, synthetic construct
  REGION 1..1024: note = Description of Artificial Sequence: Synthetic polypeptide
GSSTPSGATGSPGSSPSASTGTGPGTPGSGTASSSPGSSPSASTGTGPGASPGTSSTGSPGSSPSASTGTGPGTPGSGTASSSPGASPGTSSTGSPGSSTPSGATGSPGSSPSASTGTGPGSSTPSGATGSPGASPGTSSTGSPGTPGSGTASSSPGASPGTSSTGSPGSSTPSGATGSPGSSTPSGATGSPGSSPSASTGTGPGTPGSGTASSSPGSSTPSGATGSPGSSTPSGATGSPGSSPSASTGTGPGTPGSGTASSSPGASPGTSSTGSPGTPGSGTASSSPGASPGTSSTGSPGASPGTSSTGSPGTPGSGTASSSPGTPGSGTASSSPGSSTPSGATGSPGSSTPSGATGSPGSSTPSGATGSPGASPGTSSTGSPGSSPSASTGTGPGSSTPSGATGSPGSSPSASTGTGPGSSTPSGATGSPGTPGSGTASSSPGSSPSASTGTGPGSSTPSGATGSPGASPGTSSTGSPGASPGTSSTGSPGSSPSASTGTGPGASPGTSSTGSPGSSTPSGATGSPGASPGTSSTGSPGTPGSGTASSSPGTPGSGTASSSPGSSPSASTGTGPGTPGSGTASSSPGSSTPSGATGSPGSSPSASTGTGPGSSTPSGATGSPGTPGSGTASSSPGTPGSGTASSSPGSSPSASTGTGPGSSTPSGATGSPGSSTPSGATGSPGSSPSASTGTGPGSSPSASTGTGPGASPGTSSTGSPGASPGTSSTGSPGSSTPSGATGSPGASPGTSSTGSPGSSPSASTGTGPGTPGSGTASSSPGASPGTSSTGSPGASPGTSSTGSPGTPGSGTASSSPGTPGSGTASSSPGSSPSASTGTGPGTPGSGTASSSPGASPGTSSTGSPGSSTPSGATGSPGTPGSGTASSSPGTPGSGTASSSPGSSTPSGATGSPGSSTPSGATGSPGTPGSGTASSSPGSSPSASTGTGPGSSPSASTGTGPGASPGTSSTGSPGSSPSASTGTGPGSSPSASTGTGPGASPGTSSTGSPGASPGTSSTGSPGTPG

SEQ ID NO: 116 - protein, 1024 aa, synthetic construct
  REGION 1..1024: note = Description of Artificial Sequence: Synthetic polypeptide
GTPGSGTASSSPGSSTPSGATGSPGASPGTSSTGSPGSSTPSGATGSPGTPGSGTASSSPGTPGSGTASSSPGSSTPSGATGSPGSSTPSGATGSPGASPGTSSTGSPGSSPSASTGTGPGSSTPSGATGSPGASPGTSSTGSPGSSPSASTGTGPGTPGSGTASSSPGASPGTSSTGSPGASPGTSSTGSPGTPGSGTASSSPGTPGSGTASSSPGASPGTSSTGSPGASPGTSSTGSPGTPGSGTASSSPGTPGSGTASSSPGSSPSASTGTGPGSSPSASTGTGPGASPGTSSTGSPGSSPSASTGTGPGSSPSASTGTGPGASPGTSSTGSPGASPGTSSTGSPGTPGSGTASSSPGTPGSGTASSSPGSSPSASTGTGPGASPGTSSTGSPGSSTPSGATGSPGASPGTSSTGSPGSSPSASTGTGPGSSTPSGATGSPGSSPSASTGTGPGSSPSASTGTGPGASPGTSSTGSPGSSPSASTGTGPGSSPSASTGTGPGASPGTSSTGSPGASPGTSSTGSPGSSPSASTGTGPGTPGSGTASSSPGASPGTSSTGSPGSSTPSGATGSPGTPGSGTASSSPGTPGSGTASSSPGSSPSASTGTGPGSSTPSGATGSPGASPGTSSTGSPGASPGTSSTGSPGSSTPSGATGSPGSSPSASTGTGPGASPGTSSTGSPGSSTPSGATGSPGTPGSGTASSSPGASPGTSSTGSPGTPGSGTASSSPGASPGTSSTGSPGSSTPSGATGSPGSSTPSGATGSPGASPGTSSTGSPGSSPSASTGTGPGTPGSGTASSSPGTPGSGTASSSPGSSTPSGATGSPGTPGSGTASSSPGASPGTSSTGSPGSSTPSGATGSPGTPGSGTASSSPGSSPSASTGTGPGSSTPSGATGSPGSSTPSGATGSPGSSPSASTGTGPGSSTPSGATGSPGTPGSGTASSSPGSSPSASTGTGPGTPGSGTASSSPGSSTPSGATGSPGSSPSASTGTGPGSSPSASTGTGPGTPGSGTASSSPGASP

SEQ ID NO: 117 - protein, 1024 aa, synthetic construct
  REGION 1..1024: note = Description of Artificial Sequence: Synthetic polypeptide
GSSTPSGATGSPGTPGSGTASSSPGTPGSGTASSSPGASPGTSSTGSPGSSTPSGATGSPGTPGSGTASSSPGSSTPSGATGSPGSSPSASTGTGPGSSTPSGATGSPGTPGSGTASSSPGTPGSGTASSSPGSSPSASTGTGPGSSTPSGATGSPGSSPSASTGTGPGTPGSGTASSSPGASPGTSSTGSPGSSTPSGATGSPGASPGTSSTGSPGTPGSGTASSSPGSSTPSGATGSPGTPGSGTASSSPGSSPSASTGTGPGASPGTSSTGSPGASPGTSSTGSPGTPGSGTASSSPGSSTPSGATGSPGSSTPSGATGSPGSSPSASTGTGPGSSPSASTGTGPGASPGTSSTGSPGTPGSGTASSSPGTPGSGTASSSPGSSPSASTGTGPGASPGTSSTGSPGASPGTSSTGSPGTPGSGTASSSPGSSPSASTGTGPGASPGTSSTGSPGASPGTSSTGSPGSSTPSGATGSPGSSPSASTGTGPGSSPSASTGTGPGTPGSGTASSSPGTPGSGTASSSPGASPGTSSTGSPGSSTPSGATGSPGTPGSGTASSSPGASPGTSSTGSPGTPGSGTASSSPGTPGSGTASSSPGSSTPSGATGSPGSSTPSGATGSPGTPGSGTASSSPGSSPSASTGTGPGSSTPSGATGSPGSSTPSGATGSPGSSPSASTGTGPGTPGSGTASSSPGSSPSASTGTGPGASPGTSSTGSPGSSPSASTGTGPGTPGSGTASSSPGASPGTSSTGSPGASPGTSSTGSPGTPGSGTASSSPGTPGSGTASSSPGSSTPSGATGSPGTPGSGTASSSPGASPGTSSTGSPGSSTPSGATGSPGSSTPSGATGSPGSSTPSGATGSPGTPGSGTASSSPGSSPSASTGTGPGSSPSASTGTGPGSSPSASTGTGPGASPGTSSTGSPGASPGTSSTGSPGSSPSASTGTGPGTPGSGTASSSPGASPGTSSTGSPGSSTPSGATGSPGASPGTSSTGSPGASPGTSSTGSPGSSTPSGATGSPGTPG

SEQ ID NO: 118 - protein, 1024 aa, synthetic construct
  REGION 1..1024: note = Description of Artificial Sequence: Synthetic polypeptide
GSSTPSGATGSPGSSTPSGATGSPGTPGSGTASSSPGSSPSASTGTGPGTPGSGTASSSPGASPGTSSTGSPGSSTPSGATGSPGASPGTSSTGSPGTPGSGTASSSPGASPGTSSTGSPGSSPSASTGTGPGTPGSGTASSSPGASPGTSSTGSPGSSTPSGATGSPGSSPSASTGTGPGSSTPSGATGSPGASPGTSSTGSPGASPGTSSTGSPGASPGTSSTGSPGSSTPSGATGSPGASPGTSSTGSPGTPGSGTASSSPGSSTPSGATGSPGSSTPSGATGSPGSSPSASTGTGPGSSPSASTGTGPGSSTPSGATGSPGSSPSASTGTGPGSSPSASTGTGPGASPGTSSTGSPGASPGTSSTGSPGTPGSGTASSSPGSSPSASTGTGPGSSPSASTGTGPGASPGTSSTGSPGSSPSASTGTGPGTPGSGTASSSPGSSPSASTGTGPGSSTPSGATGSPGASPGTSSTGSPGSSTPSGATGSPGTPGSGTASSSPGSSPSASTGTGPGASPGTSSTGSPGSSTPSGATGSPGASPGTSSTGSPGASPGTSSTGSPGTPGSGTASSSPGASPGTSSTGSPGASPGTSSTGSPGSSTPSGATGSPGTPGSGTASSSPGSSPSASTGTGPGSSTPSGATGSPGTPGSGTASSSPGSSTPSGATGSPGSSTPSGATGSPGSSPSASTGTGPGSSPSASTGTGPGSSTPSGATGSPGASPGTSSTGSPGSSPSASTGTGPGTPGSGTASSSPGASPGTSSTGSPGSSPSASTGTGPGSSTPSGATGSPGSSPSASTGTGPGSSTPSGATGSPGSSPSASTGTGPGTPGSGTASSSPGTPGSGTASSSPGSSTPSGATGSPGSSTPSGATGSPGTPGSGTASSSPGSSPSASTGTGPGSSTPSGATGSPGSSPSASTGTGPGSSPSASTGTGPGSSTPSGATGSPGASPGTSSTGSPGASPGTSSTGSPGTPGSGTASSSPGTPGSGTASSSPGTPGSGTASSSPGSSTPSGATGSPGSST

SEQ ID NO: 119 - protein, 1024 aa, synthetic construct
  REGION 1..1024: note = Description of Artificial Sequence: Synthetic polypeptide
GASPGTSSTGSPGSSPSASTGTGPGSSTPSGATGSPGSSPSASTGTGPGTPGSGTASSSPGSSTPSGATGSPGSSTPSGATGSPGSSPSASTGTGPGSSTPSGATGSPGTPGSGTASSSPGSSPSASTGTGPGSSTPSGATGSPGASPGTSSTGSPGSSPSASTGTGPGSSPSASTGTGPGTPGSGTASSSPGASPGTSSTGSPGSSTPSGATGSPGSSPSASTGTGPGASPGTSSTGSPGSSTPSGATGSPGTPGSGTASSSPGSSPSASTGTGPGSSPSASTGTGPGSSPSASTGTGPGTPGSGTASSSPGTPGSGTASSSPGSSTPSGATGSPGTPGSGTASSSPGSSPSASTGTGPGASPGTSSTGSPGASPGTSSTGSPGTPGSGTASSSPGSSPSASTGTGPGASPGTSSTGSPGTPGSGTASSSPGSSTPSGATGSPGSSTPSGATGSPGASPGTSSTGSPGTPGSGTASSSPGSSPSASTGTGPGTPGSGTASSSPGASPGTSSTGSPGSSTPSGATGSPGASPGTSSTGSPGASPGTSSTGSPGTPGSGTASSSPGTPGSGTASSSPGSSPSASTGTGPGSSPSASTGTGPGSSPSASTGTGPGTPGSGTASSSPGASPGTSSTGSPGSSTPSGATGSPGASPGTSSTGSPGSSPSASTGTGPGASPGTSSTGSPGSSPSASTGTGPGASPGTSSTGSPGSSPSASTGTGPGSSPSASTGTGPGTPGSGTASSSPGASPGTSSTGSPGTPGSGTASSSPGTPGSGTASSSPGASPGTSSTGSPGSSTPSGATGSPGSSTPSGATGSPGSSPSASTGTGPGSSTPSGATGSPGTPGSGTASSSPGSSPSASTGTGPGSSTPSGATGSPGSSTPSGATGSPGSSPSASTGTGPGSSPSASTGTGPGASPGTSSTGSPGTPGSGTASSSPGSSPSASTGTGPGSSTPSGATGSPGASPGTSSTGSPGASPGTSSTGSPGSSPSASTGTGPGASPGTSSTGSPGASPGTSSTGSPGTPG

SEQ ID NO: 120 - protein, 1024 aa, synthetic construct
  REGION 1..1024: note = Description of Artificial Sequence: Synthetic polypeptide
GSSTPSGATGSPGSSPSASTGTGPGASPGTSSTGSPGASPGTSSTGSPGTPGSGTASSSPGSSPSASTGTGPGASPGTSSTGSPGSSTPSGATGSPGSSTPSGATGSPGASPGTSSTGSPGSSPSASTGTGPGTPGSGTASSSPGTPGSGTASSSPGASPGTSSTGSPGSSTPSGATGSPGSSTPSGATGSPGSSPSASTGTGPGTPGSGTASSSPGASPGTSSTGSPGSSTPSGATGSPGTPGSGTASSSPGSSPSASTGTGPGSSTPSGATGSPGTPGSGTASSSPGSSPSASTGTGPGTPGSGTASSSPGASPGTSSTGSPGSSTPSGATGSPGSSTPSGATGSPGTPGSGTASSSPGSSTPSGATGSPGSSTPSGATGSPGASPGTSSTGSPGASPGTSSTGSPGASPGTSSTGSPGSSTPSGATGSPGTPGSGTASSSPGSSPSASTGTGPGTPGSGTASSSPGASPGTSSTGSPGTPGSGTASSSPGASPGTSSTGSPGSSTPSGATGSPGSSPSASTGTGPGSSPSASTGTGPGTPGSGTASSSPGASPGTSSTGSPGASPGTSSTGSPGTPGSGTASSSPGASPGTSSTGSPGSSTPSGATGSPGSSTPSGATGSPGSSPSASTGTGPGASPGTSSTGSPGASPGTSSTGSPGTPGSGTASSSPGTPGSGTASSSPGSSTPSGATGSPGSSPSASTGTGPGSSPSASTGTGPGASPGTSSTGSPGASPGTSSTGSPGSSTPSGATGSPGSSPSASTGTGPGASPGTSSTGSPGSSTPSGATGSPGTPGSGTASSSPGSSPSASTGTGPGASPGTSSTGSPGSSTPSGATGSPGTPGSGTASSSPGSSTPSGATGSPGSSTPSGATGSPGSSTPSGATGSPGSSPSASTGTGPGSSPSASTGTGPGSSTPSGATGSPGSSPSASTGTGPGSSPSASTGTGPGSSTPSGATGSPGASPGTSSTGSPGASPGTSSTGSPGTPGSGTASSSPGASPGTSSTGSPGSSTPSGATGSPGASP

SEQ ID NO: 121 - protein, 1024 aa, synthetic construct
  REGION 1..1024: note = Description of Artificial Sequence: Synthetic polypeptide
GSSPSASTGTGPGSSPSASTGTGPGSSPSASTGTGPGTPGSGTASSSPGSSPSASTGTGPGSSPSASTGTGPGASPGTSSTGSPGSSPSASTGTGPGTPGSGTASSSPGTPGSGTASSSPGASPGTSSTGSPGTPGSGTASSSPGTPGSGTASSSPGSSPSASTGTGPGSSTPSGATGSPGSSPSASTGTGPGASPGTSSTGSPGSSPSASTGTGPGASPGTSSTGSPGASPGTSSTGSPGTPGSGTASSSPGTPGSGTASSSPGASPGTSSTGSPGTPGSGTASSSPGTPGSGTASSSPGSSPSASTGTGPGSSTPSGATGSPGASPGTSSTGSPGSSTPSGATGSPGSSPSASTGTGPGSSPSASTGTGPGSSTPSGATGSPGASPGTSSTGSPGSSPSASTGTGPGTPGSGTASSSPGASPGTSSTGSPGASPGTSSTGSPGTPGSGTASSSPGTPGSGTASSSPGSSTPSGATGSPGTPGSGTASSSPGASPGTSSTGSPGSSTPSGATGSPGTPGSGTASSSPGSSPSASTGTGPGSSPSASTGTGPGSSTPSGATGSPGASPGTSSTGSPGASPGTSSTGSPGTPGSGTASSSPGTPGSGTASSSPGSSTPSGATGSPGSSPSASTGTGPGSSPSASTGTGPGASPGTSSTGSPGASPGTSSTGSPGSSTPSGATGSPGASPGTSSTGSPGASPGTSSTGSPGTPGSGTASSSPGTPGSGTASSSPGTPGSGTASSSPGSSTPSGATGSPGSSTPSGATGSPGSSPSASTGTGPGSSPSASTGTGPGSSTPSGATGSPGTPGSGTASSSPGSSPSASTGTGPGASPGTSSTGSPGSSTPSGATGSPGSSPSASTGTGPGSSTPSGATGSPGASPGTSSTGSPGSSPSASTGTGPGTPGSGTASSSPGSSPSASTGTGPGSSTPSGATGSPGASPGTSSTGSPGSSPSASTGTGPGTPGSGTASSSPGSSTPSGATGSPGSSTPSGATGSPGASPGTSSTGSPGSSPSASTGTGPGSSP

SEQ ID NO: 122 - protein, 1024 aa, synthetic construct
  REGION 1..1024: note = Description of Artificial Sequence: Synthetic polypeptide
GSSPSASTGTGPGTPGSGTASSSPGSSTPSGATGSPGTPGSGTASSSPGSSTPSGATGSPGSSTPSGATGSPGSSPSASTGTGPGSSPSASTGTGPGSSPSASTGTGPGTPGSGTASSSPGASPGTSSTGSPGSSTPSGATGSPGTPGSGTASSSPGTPGSGTASSSPGSSTPSGATGSPGSSTPSGATGSPGSSPSASTGTGPGASPGTSSTGSPGASPGTSSTGSPGASPGTSSTGSPGASPGTSSTGSPGTPGSGTASSSPGTPGSGTASSSPGSSPSASTGTGPGSSTPSGATGSPGASPGTSSTGSPGSSTPSGATGSPGSSTPSGATGSPGSSPSASTGTGPGASPGTSSTGSPGTPGSGTASSSPGSSPSASTGTGPGSSPSASTGTGPGASPGTSSTGSPGASPGTSSTGSPGTPGSGTASSSPGASPGTSSTGSPGTPGSGTASSSPGTPGSGTASSSPGSSTPSGATGSPGTPGSGTASSSPGASPGTSSTGSPGSSTPSGATGSPGSSTPSGATGSPGSSPSASTGTGPGSSTPSGATGSPGSSTPSGATGSPGASPGTSSTGSPGSSPSASTGTGPGTPGSGTASSSPGASPGTSSTGSPGSSPSASTGTGPGTPGSGTASSSPGSSPSASTGTGPGTPGSGTASSSPGASPGTSSTGSPGASPGTSSTGSPGTPGSGTASSSPGTPGSGTASSSPGSSTPSGATGSPGSSTPSGATGSPGTPGSGTASSSPGSSTPSGATGSPGSSTPSGATGSPGASPGTSSTGSPGSSPSASTGTGPGSSTPSGATGSPGSSPSASTGTGPGSSPSASTGTGPGASPGTSSTGSPGSSTPSGATGSPGASPGTSSTGSPGTPGSGTASSSPGTPGSGTASSSPGSSPSASTGTGPGASPGTSSTGSPGSSTPSGATGSPGSSPSASTGTGPGSSPSASTGTGPGASPGTSSTGSPGTPGSGTASSSPGSSTPSGATGSPGTPGSGTASSSPGSSPSASTGTGPGSSPSASTGTGPGASP

SEQ ID NO: 123 - protein, 72 aa, synthetic construct
  REGION 1..72: note = Description of Artificial Sequence: Synthetic polypeptide
SPAGSPTSTEEGSPAGSPTSTEEGTSESATPESGPGTSTEPSEGSAPGTSESATPESGPGSEPATSGSETPG

SEQ ID NO: 124 - protein, 72 aa, synthetic construct
  REGION 1..72: note = Description of Artificial Sequence: Synthetic polypeptide
TSESATPESGPGTSESATPESGPGSEPATSGSETPGSEPATSGSETPGSPAGSPTSTEEGTSTEPSEGSAPG

SEQ ID NO: 125 - protein, 108 aa, synthetic construct
  REGION 1..108: note = Description of Artificial Sequence: Synthetic polypeptide
TEEGTSESATPESGPGTSTEPSEGSAPGSPAGSPTSTEEGTSTEPSEGSAPGTSTEPSEGSAPGTSESATPESGPGSEPATSGSETPGSEPATSGSETPGSPAGSPTS

SEQ ID NO: 126 - protein, 108 aa, synthetic construct
  REGION 1..108: note = Description of Artificial Sequence: Synthetic polypeptide
GSPAGSPTSTEEGTSTEPSEGSAPGTSESATPESGPGTSESATPESGPGTSESATPESGPGSEPATSGSETPGSEPATSGSETPGSPAGSPTSTEEGTSTEPSEGSAP

SEQ ID NO: 127 - protein, 144 aa, synthetic construct
  REGION 1..144: note = Description of Artificial Sequence: Synthetic polypeptide
STEPSEGSAPGSPAGSPTSTEEGTSTEPSEGSAPGTSESATPESGPGSEPATSGSETPGTSESATPESGPGSEPATSGSETPGTSESATPESGPGTSTEPSEGSAPGTSESATPESGPGSPAGSPTSTEEGSPAGSPTSTEEGS

SEQ ID NO: 128 - protein, 144 aa, synthetic construct
  REGION 1..144: note = Description of Artificial Sequence: Synthetic polypeptide
SEPATSGSETPGTSESATPESGPGSEPATSGSETPGTSESATPESGPGTSTEPSEGSAPGSPAGSPTSTEEGTSESATPESGPGSEPATSGSETPGTSESATPESGPGSPAGSPTSTEEGSPAGSPTSTEEGTSTEPSEGSAPG

SEQ ID NO: 129 - protein, 180 aa, synthetic construct
  REGION 1..180: note = Description of Artificial Sequence: Synthetic polypeptide
TSTEEGTSESATPESGPGSEPATSGSETPGTSESATPESGPGSPAGSPTSTEEGSPAGSPTSTEEGTSTEPSEGSAPGTSESATPESGPGTSESATPESGPGTSESATPESGPGSEPATSGSETPGSEPATSGSETPGSPAGSPTSTEEGTSTEPSEGSAPGTSTEPSEGSAPGSEPATS

SEQ ID NO: 130 - protein, 216 aa, synthetic construct
  REGION 1..216: note = Description of Artificial Sequence: Synthetic polypeptide
PESGPGTSTEPSEGSAPGSPAGSPTSTEEGTSESATPESGPGSEPATSGSETPGTSESATPESGPGSPAGSPTSTEEGSPAGSPTSTEEGTSTEPSEGSAPGTSESATPESGPGTSESATPESGPGTSESATPESGPGSEPATSGSETPGSEPATSGSETPGSPAGSPTSTEEGTSTEPSEGSAPGTSTEPSEGSAPGSEPATSGSETPGTSESAT

SEQ ID NO: 131 - protein, 252 aa, synthetic construct
  REGION 1..252: note = Description of Artificial Sequence: Synthetic polypeptide
ESGPGSEPATSGSETPGTSESATPESGPGTSTEPSEGSAPGSPAGSPTSTEEGTSESATPESGPGSEPATSGSETPGTSESATPESGPGSPAGSPTSTEEGSPAGSPTSTEEGTSTEPSEGSAPGTSESATPESGPGTSESATPESGPGTSESATPESGPGSEPATSGSETPGSEPATSGSETPGSPAGSPTSTEEGTSTEPSEGSAPGTSTEPSEGSAPGSEPATSGSETPGTSESATPESGPGTSTEPSE

SEQ ID NO: 132 - protein, 288 aa, synthetic construct
  REGION 1..288: note = Description of Artificial Sequence: Synthetic polypeptide
TPESGPGTSTEPSEGSAPGTSESATPESGPGSEPATSGSETPGTSESATPESGPGSEPATSGSETPGTSESATPESGPGTSTEPSEGSAPGSPAGSPTSTEEGTSESATPESGPGSEPATSGSETPGTSESATPESGPGSPAGSPTSTEEGSPAGSPTSTEEGTSTEPSEGSAPGTSESATPESGPGTSESATPESGPGTSESATPESGPGSEPATSGSETPGSEPATSGSETPGSPAGSPTSTEEGTSTEPSEGSAPGTSTEPSEGSAPGSEPATSGSETPGTSESA

SEQ ID NO: 133 - protein, 324 aa, synthetic construct
  REGION 1..324: note = Description of Artificial Sequence: Synthetic polypeptide
PESGPGSPAGSPTSTEEGSPAGSPTSTEEGSPAGSPTSTEEGTSESATPESGPGTSTEPSEGSAPGTSESATPESGPGSEPATSGSETPGTSESATPESGPGSEPATSGSETPGTSESATPESGPGTSTEPSEGSAPGSPAGSPTSTEEGTSESATPESGPGSEPATSGSETPGTSESATPESGPGSPAGSPTSTEEGSPAGSPTSTEEGTSTEPSEGSAPGTSESATPESGPGTSESATPESGPGTSESATPESGPGSEPATSGSETPGSEPATSGSETPGSPAGSPTSTEEGTSTEPSEGSAPGTSTEPSEGSAPGSEPATS

SEQ ID NO: 134 - protein, 360 aa, synthetic construct
  REGION 1..360: note = Description of Artificial Sequence: Synthetic polypeptide
PESGPGTSTEPSEGSAPGTSESATPESGPGSPAGSPTSTEEGSPAGSPTSTEEGSPAGSPTSTEEGTSESATPESGPGTSTEPSEGSAPGTSESATPESGPGSEPATSGSETPGTSESATPESGPGSEPATSGSETPGTSESATPESGPGTSTEPSEGSAPGSPAGSPTSTEEGTSESATPESGPGSEPATSGSETPGTSESATPESGPGSPAGSPTSTEEGSPAGSPTSTEEGTSTEPSEGSAPGTSESATPESGPGTSESATPESGPGTSESATPESGPGSEPATSGSETPGSEPATSGSETPGSPAGSPTSTEEGTSTEPSEGSAPGTSTEPSEGSAPGSEPATSGSETPGTSESAT

SEQ ID NO: 135 - protein, 360 aa, synthetic construct
  REGION 1..360: note = Description of Artificial Sequence: Synthetic polypeptide
PESGPGSEPATSGSETPGTSESATPESGPGTSTEPSEGSAPGTSESATPESGPGSPAGSPTSTEEGSPAGSPTSTEEGSPAGSPTSTEEGTSESATPESGPGTSTEPSEGSAPGTSESATPESGPGSEPATSGSETPGTSESATPESGPGSEPATSGSETPGTSESATPESGPGTSTEPSEGSAPGSPAGSPTSTEEGTSESATPESGPGSEPATSGSETPGTSESATPESGPGSPAGSPTSTEEGSPAGSPTSTEEGTSTEPSEGSAPGTSESATPESGPGTSESATPESGPGTSESATPESGPGSEPATSGSETPGSEPATSGSETPGSPAGSPTSTEEGTSTEPSEGSAPGTSTEPS

SEQ ID NO: 136 - protein, 432 aa, synthetic construct
  REGION 1..432: note = Description of Artificial Sequence: Synthetic polypeptide
EGSAPGSPAGSPTSTEEGTSTEPSEGSAPGTSESATPESGPGSEPATSGSETPGTSESATPESGPGSEPATSGSETPGTSESATPESGPGTSTEPSEGSAPGTSESATPESGPGSPAGSPTSTEEGSPAGSPTSTEEGSPAGSPTSTEEGTSESATPESGPGTSTEPSEGSAPGTSESATPESGPGSEPATSGSETPGTSESATPESGPGSEPATSGSETPGTSESATPESGPGTSTEPSEGSAPGSPAGSPTSTEEGTSESATPESGPGSEPATSGSETPGTSESATPESGPGSPAGSPTSTEEGSPAGSPTSTEEGTSTEPSEGSAPGTSESATPESGPGTSESATPESGPGTSESATPESGPGSEPATSGSETPGSEPATSGSETPGSPAGSPTSTEEGTSTEPSEGSAPGTSTEPSEGSAPGSEPATS

SEQ ID NO: 137 - protein, 468 aa, synthetic construct
  REGION 1..468: note = Description of Artificial Sequence: Synthetic polypeptide
EGSAPGTSTEPSEGSAPGTSTEPSEGSAPGSPAGSPTSTEEGTSTEPSEGSAPGTSESATPESGPGSEPATSGSETPGTSESATPESGPGSEPATSGSETPGTSESATPESGPGTSTEPSEGSAPGTSESATPESGPGSPAGSPTSTEEGSPAGSPTSTEEGSPAGSPTSTEEGTSESATPESGPGTSTEPSEGSAPGTSESATPESGPGSEPATSGSETPGTSESATPESGPGSEPATSGSETPGTSESATPESGPGTSTEPSEGSAPGSPAGSPTSTEEGTSESATPESGPGSEPATSGSETPGTSESATPESGPGSPAGSPTSTEEGSPAGSPTSTEEGTSTEPSEGSAPGTSESATPESGPGTSESATPESGPGTSESATPESGPGSEPATSGSETPGSEPATSGSETPGSPAGSPTSTEEGTSTEPSEGSAPGTSTEPSEGSAPGSEPATSGSETPGTSESAT

SEQ ID NO: 138 - protein, 504 aa, synthetic construct
  REGION 1..504: note = Description of Artificial Sequence: Synthetic polypeptide
EGSAPGTSTEPSEGSAPGTSTEPSEGSAPGTSTEPSEGSAPGTSTEPSEGSAPGSPAGSPTSTEEGTSTEPSEGSAPGTSESATPESGPGSEPATSGSETPGTSESATPESGPGSEPATSGSETPGTSESATPESGPGTSTEPSEGSAPGTSESATPESGPGSPAGSPTSTEEGSPAGSPTSTEEGSPAGSPTSTEEGTSESATPESGPGTSTEPSEGSAPGTSESATPESGPGSEPATSGSETPGTSESATPESGPGSEPATSGSETPGTSESATPESGPGTSTEPSEGSAPGSPAGSPTSTEEGTSESATPESGPGSEPATSGSETPGTSESATPESGPGSPAGSPTSTEEGSPAGSPTSTEEGTSTEPSEGSAPGTSESATPESGPGTSESATPESGPGTSESATPESGPGSEPATSGSETPGSEPATSGSETPGSPAGSPTSTEEGTSTEPSEGSAPGTSTEPSEGSAPGSEPATSGSETPGTSESATPESGPGTSTEPS

SEQ ID NO: 139 - protein, 540 aa, synthetic construct
  REGION 1..540: note = Description of Artificial Sequence: Synthetic polypeptide
TPESGPGSPAGSPTSTEEGTSESATPESGPGSEPATSGSETPGTSESATPESGPGTSTEPSEGSAPGTSTEPSEGSAPGTSTEPSEGSAPGTSTEPSEGSAPGTSTEPSEGSAPGTSTEPSEGSAPGSPAGSPTSTEEGTSTEPSEGSAPGTSESATPESGPGSEPATSGSETPGTSESATPESGPGSEPATSGSETPGTSESATPESGPGTSTEPSEGSAPGTSESATPESGPGSPAGSPTSTEEGSPAGSPTSTEEGSPAGSPTSTEEGTSESATPESGPGTSTEPSEGSAPGTSESATPESGPGSEPATSGSETPGTSESATPESGPGSEPATSGSETPGTSESATPESGPGTSTEPSEGSAPGSPAGSPTSTEEGTSESATPESGPGSEPATSGSETPGTSESATPESGPGSPAGSPTSTEEGSPAGSPTSTEEGTSTEPSEGSAPGTSESATPESGPGTSESATPESGPGTSESATPESGPGSEPATSGSETPGSEPATSGSETPGSPAGSPTSTEEGTSTEPSEGSAPGTSTEP

SEQ ID NO: 140 - protein, 576 aa, synthetic construct
  REGION 1..576: note = Description of Artificial Sequence: Synthetic polypeptide
TPESGPGTSESATPESGPGSPAGSPTSTEEGTSESATPESGPGSEPATSGSETPGTSESATPESGPGTSTEPSEGSAPGTSTEPSEGSAPGTSTEPSEGSAPGTSTEPSEGSAPGTSTEPSEGSAPGTSTEPSEGSAPGSPAGSPTSTEEGTSTEPSEGSAPGTSESATPESGPGSEPATSGSETPGTSESATPESGPGSEPATSGSETPGTSESATPESGPGTSTEPSEGSAPGTSESATPESGPGSPAGSPTSTEEGSPAGSPTSTEEGSPAGSPTSTEEGTSESATPESGPGTSTEPSEGSAPGTSESATPESGPGSEPATSGSETPGTSESATPESGPGSEPATSGSETPGTSESATPESGPGTSTEPSEGSAPGSPAGSPTSTEEGTSESATPESGPGSEPATSGSETPGTSESATPESGPGSPAGSPTSTEEGSPAGSPTSTEEGTSTEPSEGSAPGTSESATPESGPGTSESATPESGPGTSESATPESGPGSEPATSGSETPGSEPATSGSETPGSPAGSPTSTEEGTSTEPSEGSAPGTSTEPSEGSAPGSEPATSGSETPGTSESA

SEQ ID NO: 141 - protein, 612 aa, synthetic construct
  REGION 1..612: note = Description of Artificial Sequence: Synthetic polypeptide
GSETPGTSTEPSEGSAPGTSTEPSEGSAPGTSESATPESGPGTSESATPESGPGSPAGSPTSTEEGTSESATPESGPGSEPATSGSETPGTSESATPESGPGTSTEPSEGSAPGTSTEPSEGSAPGTSTEPSEGSAPGTSTEPSEGSAPGTSTEPSEGSAPGTSTEPSEGSAPGSPAGSPTSTEEGTSTEPSEGSAPGTSESATPESGPGSEPATSGSETPGTSESATPESGPGSEPATSGSETPGTSESATPESGPGTSTEPSEGSAPGTSESATPESGPGSPAGSPTSTEEGSPAGSPTSTEEGSPAGSPTSTEEGTSESATPESGPGTSTEPSEGSAPGTSESATPESGPGSEPATSGSETPGTSESATPESGPGSEPATSGSETPGTSESATPESGPGTSTEPSEGSAPGSPAGSPTSTEEGTSESATPESGPGSEPATSGSETPGTSESATPESGPGSPAGSPTSTEEGSPAGSPTSTEEGTSTEPSEGSAPGTSESATPESGPGTSESATPESGPGTSESATPESGPGSEPATSGSETPGSEPATSGSETPGSPAGSPTSTEEGTSTEPSEGSAPGTSTEPSEGSAPGSEPATSGSETPGTSESAT

SEQ ID NO: 142 - protein, 648 aa, synthetic construct
  REGION 1..648: note = Description of Artificial Sequence: Synthetic polypeptide
PESGPGTSTEPSEGSAPGTSESATPESGPGSEPATSGSETPGTSTEPSEGSAPGTSTEPSEGSAPGTSESATPESGPGTSESATPESGPGSPAGSPTSTEEGTSESATPESGPGSEPATSGSETPGTSESATPESGPGTSTEPSEGSAPGTSTEPSEGSAPGTSTEPSEGSAPGTSTEPSEGSAPGTSTEPSEGSAPGTSTEPSEGSAPGSPAGSPTSTEEGTSTEPSEGSAPGTSESATPESGPGSEPATSGSETPGTSESATPESGPGSEPATSGSETPGTSESATPESGPGTSTEPSEGSAPGTSESATPESGPGSPAGSPTSTEEGSPAGSPTSTEEGSPAGSPTSTEEGTSESATPESGPGTSTEPSEGSAPGTSESATPESGPGSEPATSGSETPGTSESATPESGPGSEPATSGSETPGTSESATPESGPGTSTEPSEGSAPGSPAGSPTSTEEGTSESATPESGPGSEPATSGSETPGTSESATPESGPGSPAGSPTSTEEGSPAGSPTSTEEGTSTEPSEGSAPGTSESATPESGPGTSESATPESGPGTSESATPESGPGSEPATSGSETPGSEPATSGSETPGSPAGSPTSTEEGTSTEPSEGSAPGTSTEPSEGSAPGSEPATSGSETPGTSESAT

SEQ ID NO: 143 - protein, 684 aa, synthetic construct
  REGION 1..684: note = Description of Artificial Sequence: Synthetic polypeptide
EGSAPGSPAGSPTSTEEGTSTEPSEGSAPGTSTEPSEGSAPGTSESATPESGPGTSTEPSEGSAPGTSESATPESGPGSEPATSGSETPGTSTEPSEGSAPGTSTEPSEGSAPGTSESATPESGPGTSESATPESGPGSPAGSPTSTEEGTSESATPESGPGSEPATSGSETPGTSESATPESGPGTSTEPSEGSAPGTSTEPSEGSAPGTSTEPSEGSAPGTSTEPSEGSAPGTSTEPSEGSAPGTSTEPSEGSAPGSPAGSPTSTEEGTSTEPSEGSAPGTSESATPESGPGSEPATSGSETPGTSESATPESGPGSEPATSGSETPGTSESATPESGPGTSTEPSEGSAPGTSESATPESGPGSPAGSPTSTEEGSPAGSPTSTEEGSPAGSPTSTEEGTSESATPESGPGTSTEPSEGSAPGTSESATPESGPGSEPATSGSETPGTSESATPESGPGSEPATSGSETPGTSESATPESGPGTSTEPSEGSAPGSPAGSPTSTEEGTSESATPESGPGSEPATSGSETPGTSESATPESGPGSPAGSPTSTEEGSPAGSPTSTEEGTSTEPSEGSAPGTSESATPESGPGTSESATPESGPGTSESATPESGPGSEPATSGSETPGSEPATSGSETPGSPAGSPTSTEEGTSTEPSEGSAPGTSTEPSEGSAPGSEPATS

SEQ ID NO: 144 - protein, 720 aa, synthetic construct
  REGION 1..720: note = Description of Artificial Sequence: Synthetic polypeptide
TSGSETPGSEPATSGSETPGSPAGSPTSTEEGTSESATPESGPGTSTEPSEGSAPGTSTEPSEGSAPGSPAGSPTSTEEGTSTEPSEGSAPGTSTEPSEGSAPGTSESATPESGPGTSTEPSEGSAPGTSESATPESGPGSEPATSGSETPGTSTEPSEGSAPGTSTEPSEGSAPGTSESATPESGPGTSESATPESGPGSPAGSPTSTEEGTSESATPESGPGSEPATSGSETPGTSESATPESGPGTSTEPSEGSAPGTSTEPSEGSAPGTSTEPSEGSAPGTSTEPSEGSAPGTSTEPSEGSAPGTSTEPSEGSAPGSPAGSPTSTEEGTSTEPSEGSAPGTSESATPESGPGSEPATSGSETPGTSESATPESGPGSEPATSGSETPGTSESATPESGPGTSTEPSEGSAPGTSESATPESGPGSPAGSPTSTEEGSPAGSPTSTEEGSPAGSPTSTEEGTSESATPESGPGTSTEPSEGSAPGTSESATPESGPGSEPATSGSETPGTSESATPESGPGSEPATSGSETPGTSESATPESGPGTSTEPSEGSAPGSPAGSPTSTEEGTSESATPESGPGSEPATSGSETPGTSESATPESGPGSPAGSPTSTEEGSPAGSPTSTEEGTSTEPSEGSAPGTSESATPESGPGTSESATPESGPGTSESATPESGPGSEPATSGSETPGSEPATSGSETPGSPAGSPTSTEEGTSTE

SEQ ID NO: 145 - protein, 756 aa, synthetic construct
  REGION 1..756: note = Description of Artificial Sequence: Synthetic polypeptide
TSGSETPGSEPATSGSETPGSPAGSPTSTEEGTSESATPESGPGTSTEPSEGSAPGTSTEPSEGSAPGSPAGSPTSTEEGTSTEPSEGSAPGTSTEPSEGSAPGTSESATPESGPGTSTEPSEGSAPGTSESATPESGPGSEPATSGSETPGTSTEPSEGSAPGTSTEPSEGSAPGTSESATPESGPGTSESATPESGPGSPAGSPTSTEEGTSESATPESGPGSEPATSGSETPGTSESATPESGPGTSTEPSEGSAPGTSTEPSEGSAPGTSTEPSEGSAPGTSTEPSEGSAPGTSTEPSEGSAPGTSTEPSEGSAPGSPAGSPTSTEEGTSTEPSEGSAPGTSESATPESGPGSEPATSGSETPGTSESATPESGPGSEPATSGSETPGTSESATPESGPGTSTEPSEGSAPGTSESATPESGPGSPAGSPTSTEEGSPAGSPTSTEEGSPAGSPTSTEEGTSESATPESGPGTSTEPSEGSAPGTSESATPESGPGSEPATSGSETPGTSESATPESGPGSEPATSGSETPGTSESATPESGPGTSTEPSEGSAPGSPAGSPTSTEEGTSESATPESGPGSEPATSGSETPGTSESATPESGPGSPAGSPTSTEEGSPAGSPTSTEEGTSTEPSEGSAPGTSESATPESGPGTSESATPESGPGTSESATPESGPGSEPATSGSETPGSEPATSGSETPGSPAGSPTSTEEGTSTEPSEGSAPGTSTEPSEGSAPGSEPATSGSETPGTSES

SEQ ID NO: 146 - protein, 792 aa, synthetic construct
  REGION 1..792: note = Description of Artificial Sequence: Synthetic polypeptide
EGSAPGTSESATPESGPGSEPATSGSETPGSEPATSGSETPGSPAGSPTSTEEGTSESATPESGPGTSTEPSEGSAPGTSTEPSEGSAPGSPAGSPTSTEEGTSTEPSEGSAPGTSTEPSEGSAPGTSESATPESGPGTSTEPSEGSAPGTSESATPESGPGSEPATSGSETPGTSTEPSEGSAPGTSTEPSEGSAPGTSESATPESGPGTSESATPESGPGSPAGSPTSTEEGTSESATPESGPGSEPATSGSETPGTSESATPESGPGTSTEPSEGSAPGTSTEPSEGSAPGTSTEPSEGSAPGTSTEPSEGSAPGTSTEPSEGSAPGTSTEPSEGSAPGSPAGSPTSTEEGTSTEPSEGSAPGTSESATPESGPGSEPATSGSETPGTSESATPESGPGSEPATSGSETPGTSESATPESGPGTSTEPSEGSAPGTSESATPESGPGSPAGSPTSTEEGSPAGSPTSTEEGSPAGSPTSTEEGTSESATPESGPGTSTEPSEGSAPGTSESATPESGPGSEPATSGSETPGTSESATPESGPGSEPATSGSETPGTSESATPESGPGTSTEPSEGSAPGSPAGSPTSTEEGTSESATPESGPGSEPATSGSETPGTSESATPESGPGSPAGSPTSTEEGSPAGSPTSTEEGTSTEPSEGSAPGTSESATPESGPGTSESATPESGPGTSESATPESGPGSEPATSGSETPGSEPATSGSETPGSPAGSPTSTEEGTSTEPSEGSAPGTSTEPSEGSAPGSEPATSGSETPGTSESATPESGPGTSTEPS

SEQ ID NO: 147 - protein, 828 aa, synthetic construct
  REGION 1..828: note = Description of Artificial Sequence: Synthetic polypeptide
PESGPGTSTEPSEGSAPGSPAGSPTSTEEGTSTEPSEGSAPGTSTEPSEGSAPGTSESATPESGPGSEPATSGSETPGSEPATSGSETPGSPAGSPTSTEEGTSESATPESGPGTSTEPSEGSAPGTSTEPSEGSAPGSPAGSPTSTEEGTSTEPSEGSAPGTSTEPSEGSAPGTSESATPESGPGTSTEPSEGSAPGTSESATPESGPGSEPATSGSETPGTSTEPSEGSAPGTSTEPSEGSAPGTSESATPESGPGTSESATPESGPGSPAGSPTSTEEGTSESATPESGPGSEPATSGSETPGTSESATPESGPGTSTEPSEGSAPGTSTEPSEGSAPGTSTEPSEGSAPGTSTEPSEGSAPGTSTEPSEGSAPGTSTEPSEGSAPGSPAGSPTSTEEGTSTEPSEGSAPGTSESATPESGPGSEPATSGSETPGTSESATPESGPGSEPATSGSETPGTSESATPESGPGTSTEPSEGSAPGTSESATPESGPGSPAGSPTSTEEGSPAGSPTSTEEGSPAGSPTSTEEGTSESATPESGPGTSTEPSEGSAPGTSESATPESGPGSEPATSGSETPGTSESATPESGPGSEPATSGSETPGTSESATPESGPGTSTEPSEGSAPGSPAGSPTSTEEGTSESATPESGPGSEPATSGSETPGTSESATPESGPGSPAGSPTSTEEGSPAGSPTSTEEGTSTEPSEGSAPGTSESATPESGPGTSESATPESGPGTSESATPESGPGSEPATSGSETPGSEPATSGSETPGSPAGSPTSTEEGTSTEPSEGSAPGTSTEPSEGSAPGSEPATSGSETPGTSESAT

SEQ ID NO: 148 - protein, 72 aa, synthetic construct
  REGION 1..72: note = Description of Artificial Sequence: Synthetic polypeptide
GPGSSPSASTGTGPGTPGSGTASSSPGSSTPSGATGSPGSSPSASTGTGPGASPGTSSTGSPGTPGSGTASS

SEQ ID NO: 149 - protein, 72 aa, synthetic construct
  REGION 1..72: note = Description of Artificial Sequence: Synthetic polypeptide
GSSTPSGATGSPGSSTPSGATGSPGSSPSASTGTGPGSSPSASTGTGPGASPGTSSTGSPGTPGSGTASSSP

SEQ ID NO: 150 - protein, 72 aa, synthetic construct
  REGION 1..72: note = Description of Artificial Sequence: Synthetic polypeptide
SPSASTGTGPGASPGTSSTGSPGSSPSASTGTGPGTPGSGTASSSPGSSTPSGATGSPGSSTPSGATGSPGA

SEQ ID NO: 151 - protein, 108 aa, synthetic construct
  REGION 1..108: note = Description of Artificial Sequence: Synthetic polypeptide
SASTGTGPGSSPSASTGTGPGTPGSGTASSSPGSSTPSGATGSPGSSPSASTGTGPGASPGTSSTGSPGTPGSGTASSSPGSSTPSGATGSPGTPGSGTASSSPGASP

SEQ ID NO: 152 - protein, 108 aa, synthetic construct
  REGION 1..108: note = Description of Artificial Sequence: Synthetic polypeptide
PGTPGSGTASSSPGSSTPSGATGSPGTPGSGTASSSPGSSTPSGATGSPGSSTPSGATGSPGSSPSASTGTGPGSSPSASTGTGPGASPGTSSTGSPGTPGSGTASSS

SEQ ID NO: 153 - protein, 144 aa, synthetic construct; identical to SEQ ID NO: 71
  REGION 1..144: note = Description of Artificial Sequence: Synthetic polypeptide

SEQ ID NO: 154 - protein, 144 aa, synthetic construct
  REGION 1..144: note = Description of Artificial Sequence: Synthetic polypeptide
PSGATGSPGTPGSGTASSSPGSSTPSGATGSPGSSTPSGATGSPGSSPSASTGTGPGSSPSASTGTGPGASPGTSSTGSPGTPGSGTASSSPGSSTPSGATGSPGSSPSASTGTGPGSSPSASTGTGPGASPGTSSTGSPGASP

SEQ ID NO: 155 - protein, 180 aa, synthetic construct
  REGION 1..180: note = Description of Artificial Sequence: Synthetic polypeptide
TSSTGSPGSSPSASTGTGPGSSPSASTGTGPGTPGSGTASSSPGSSTPSGATGSPGSSPSASTGTGPGASPGTSSTGSPGTPGSGTASSSPGSSTPSGATGSPGTPGSGTASSSPGASPGTSSTGSPGASPGTSSTGSPGTPGSGTASSSPGSSTPSGATGSPGASPGTSSTGSPGTPGS

SEQ ID NO: 156 - protein, 216 aa, synthetic construct
  REGION 1..216: note = Description of Artificial Sequence: Synthetic polypeptide
TGTGPGSSPSASTGTGPGTPGSGTASSSPGSSTPSGATGSPGSSPSASTGTGPGASPGTSSTGSPGTPGSGTASSSPGSSTPSGATGSPGTPGSGTASSSPGASPGTSSTGSPGASPGTSSTGSPGTPGSGTASSSPGSSTPSGATGSPGASPGTSSTGSPGTPGSGTASSSPGSSTPSGATGSPGSSPSASTGTGPGSSPSASTGTGPGSSTPSG

SEQ ID NO: 157 - protein, 252 aa, synthetic construct
  REGION 1..252: note = Description of Artificial Sequence: Synthetic polypeptide
TSSTGSPGSSPSASTGTGPGSSPSASTGTGPGTPGSGTASSSPGSSTPSGATGSPGSSPSASTGTGPGASPGTSSTGSPGTPGSGTASSSPGSSTPSGATGSPGTPGSGTASSSPGASPGTSSTGSPGASPGTSSTGSPGTPGSGTASSSPGSSTPSGATGSPGASPGTSSTGSPGTPGSGTASSSPGSSTPSGATGSPGSSPSASTGTGPGSSPSASTGTGPGSSTPSGATGSPGSSTPSGATGSPGASPG

SEQ ID NO: 158 - protein, 288 aa, synthetic construct
  REGION 1..288: note = Description of Artificial Sequence: Synthetic polypeptide
TSSTGSPGSSPSASTGTGPGSSPSASTGTGPGTPGSGTASSSPGSSTPSGATGSPGSSPSASTGTGPGASPGTSSTGSPGTPGSGTASSSPGSSTPSGATGSPGTPGSGTASSSPGASPGTSSTGSPGASPGTSSTGSPGTPGSGTASSSPGSSTPSGATGSPGASPGTSSTGSPGTPGSGTASSSPGSSTPSGATGSPGSSPSASTGTGPGSSPSASTGTGPGSSTPSGATGSPGSSTPSGATGSPGASPGTSSTGSPGASPGTSSTGSPGASPGTSSTGSPGTPGS

SEQ ID NO: 159 - protein, 324 aa, synthetic construct
  REGION 1..324: note = Description of Artificial Sequence: Synthetic polypeptide
TSSTGSPGTPGSGTASSSPGASPGTSSTGSPGASPGTSSTGSPGASPGTSSTGSPGASPGTSSTGSPGTPGSGTASSSPGSSTPSGATGSPGTPGSGTASSSPGSSTPSGATGSPGTPGSGTASSSPGSSTPSGATGSPGSSTPSGATGSPGSSPSASTGTGPGSSPSASTGTGPGASPGTSSTGSPGTPGSGTASSSPGSSTPSGATGSPGSSPSASTGTGPGSSPSASTGTGPGASPGTSSTGSPGASPGTSSTGSPGSSTPSGATGSPGSSPSASTGTGPGASPGTSSTGSPGSSPSASTGTGPGTPGSGTASSSPGSSTP

SEQ ID NO: 160 - protein, 360 aa, synthetic construct
  REGION 1..360: note = Description of Artificial Sequence: Synthetic polypeptide
TSSTGSPGASPGTSSTGSPGTPGSGTASSSPGASPGTSSTGSPGASPGTSSTGSPGASPGTSSTGSPGASPGTSSTGSPGTPGSGTASSSPGSSTPSGATGSPGTPGSGTASSSPGSSTPSGATGSPGTPGSGTASSSPGSSTPSGATGSPGSSTPSGATGSPGSSPSASTGTGPGSSPSASTGTGPGASPGTSSTGSPGTPGSGTASSSPGSSTPSGATGSPGSSPSASTGTGPGSSPSASTGTGPGASPGTSSTGSPGASPGTSSTGSPGSSTPSGATGSPGSSPSASTGTGPGASPGTSSTGSPGSSPSASTGTGPGTPGSGTASSSPGSSTPSGATGSPGSSTPSGATGSPGASPG

SEQ ID NO: 161 - protein, 396 aa, synthetic construct
  REGION 1..396: note = Description of Artificial Sequence: Synthetic polypeptide
GATGSPGSSTPSGATGSPGSSPSASTGTGPGASPGTSSTGSPGASPGTSSTGSPGTPGSGTASSSPGASPGTSSTGSPGASPGTSSTGSPGASPGTSSTGSPGASPGTSSTGSPGTPGSGTASSSPGSSTPSGATGSPGTPGSGTASSSPGSSTPSGATGSPGTPGSGTASSSPGSSTPSGATGSPGSSTPSGATGSPGSSPSASTGTGPGSSPSASTGTGPGASPGTSSTGSPGTPGSGTASSSPGSSTPSGATGSPGSSPSASTGTGPGSSPSASTGTGPGASPGTSSTGSPGASPGTSSTGSPGSSTPSGATGSPGSSPSASTGTGPGASPGTSSTGSPGSSPSASTGTGPGTPGSGTASSSPGSSTPSGATGSPGSSTPSGATGSPGASPGT

SEQ ID NO: 162 - protein, 432 aa, synthetic construct
  REGION 1..432: note = Description of Artificial Sequence: Synthetic polypeptide
GATGSPGSSTPSGATGSPGASPGTSSTGSPGTPGSGTASSSPGSSTPSGATGSPGSSTPSGATGSPGSSTPSGATGSPGSSPSASTGTGPGASPGTSSTGSPGASPGTSSTGSPGTPGSGTASSSPGASPGTSSTGSPGASPGTSSTGSPGASPGTSSTGSPGASPGTSSTGSPGTPGSGTASSSPGSSTPSGATGSPGTPGSGTASSSPGSSTPSGATGSPGTPGSGTASSSPGSSTPSGATGSPGSSTPSGATGSPGSSPSASTGTGPGSSPSASTGTGPGASPGTSSTGSPGTPGSGTASSSPGSSTPSGATGSPGSSPSASTGTGPGSSPSASTGTGPGASPGTSSTGSPGASPGTSSTGSPGSSTPSGATGSPGSSPSASTGTGPGASPGTSSTGSPGSSPSASTGTGPGTPGSGTASSSPGSSTPS

SEQ ID NO: 163 - protein, 468 aa, synthetic construct
  REGION 1..468: note = Description of Artificial Sequence: Synthetic polypeptide
TSSTGSPGSSPSASTGTGPGTPGSGTASSSPGASPGTSSTGSPGASPGTSSTGSPGASPGTSSTGSPGSSTPSGATGSPGSSTPSGATGSPGASPGTSSTGSPGTPGSGTASSSPGSSTPSGATGSPGSSTPSGATGSPGSSTPSGATGSPGSSPSASTGTGPGASPGTSSTGSPGASPGTSSTGSPGTPGSGTASSSPGASPGTSSTGSPGASPGTSSTGSPGASPGTSSTGSPGASPGTSSTGSPGTPGSGTASSSPGSSTPSGATGSPGTPGSGTASSSPGSSTPSGATGSPGTPGSGTASSSPGSSTPSGATGSPGSSTPSGATGSPGSSPSASTGTGPGSSPSASTGTGPGASPGTSSTGSPGTPGSGTASSSPGSSTPSGATGSPGSSPSASTGTGPGSSPSASTGTGPGASPGTSSTGSPGASPGTSSTGSPGSSTPSGATGSPGSSPSASTGTGPGASPG

SEQ ID NO: 164 - protein, 504 aa, synthetic construct
  REGION 1..504: note = Description of Artificial Sequence: Synthetic polypeptide
TSSTGSPGSSPSASTGTGPGTPGSGTASSSPGASPGTSSTGSPGASPGTSSTGSPGASPGTSSTGSPGSSTPSGATGSPGSSTPSGATGSPGASPGTSSTGSPGTPGSGTASSSPGSSTPSGATGSPGSSTPSGATGSPGSSTPSGATGSPGSSPSASTGTGPGASPGTSSTGSPGASPGTSSTGSPGTPGSGTASSSPGASPGTSSTGSPGASPGTSSTGSPGASPGTSSTGSPGASPGTSSTGSPGTPGSGTASSSPGSSTPSGATGSPGTPGSGTASSSPGSSTPSGATGSPGTPGSGTASSSPGSSTPSGATGSPGSSTPSGATGSPGSSPSASTGTGPGSSPSASTGTGPGASPGTSSTGSPGTPGSGTASSSPGSSTPSGATGSPGSSPSASTGTGPGSSPSASTGTGPGASPGTSSTGSPGASPGTSSTGSPGSSTPSGATGSPGSSPSASTGTGPGASPGTSSTGSPGSSPSASTGTGPGTPGSGTASSSPGSSTP

SEQ ID NO: 165 - protein, 540 aa, synthetic construct
  REGION 1..540: note = Description of Artificial Sequence: Synthetic polypeptide
TSSTGSPGASPGTSSTGSPGSSPSASTGTGPGTPGSGTASSSPGASPGTSSTGSPGASPGTSSTGSPGASPGTSSTGSPGSSTPSGATGSPGSSTPSGATGSPGASPGTSSTGSPGTPGSGTASSSPGSSTPSGATGSPGSSTPSGATGSPGSSTPSGATGSPGSSPSASTGTGPGASPGTSSTGSPGASPGTSSTGSPGTPGSGTASSSPGASPGTSSTGSPGASPGTSSTGSPGASPGTSSTGSPGASPGTSSTGSPGTPGSGTASSSPGSSTPSGATGSPGTPGSGTASSSPGSSTPSGATGSPGTPGSGTASSSPGSSTPSGATGSPGSSTPSGATGSPGSSPSASTGTGPGSSPSASTGTGPGASPGTSSTGSPGTPGSGTASSSPGSSTPSGATGSPGSSPSASTGTGPGSSPSASTGTGPGASPGTSSTGSPGASPGTSSTGSPGSSTPSGATGSPGSSPSASTGTGPGASPGTSSTGSPGSSPSASTGTGPGTPGSGTASSSPGSSTPSGATGSPGSSTPSGATGSPGASPG

SEQ ID NO: 166 - protein, 576 aa, synthetic construct
  REGION 1..576: note = Description of Artificial Sequence: Synthetic polypeptide
TSSTGSPGTPGSGTASSSPGASPGTSSTGSPGASPGTSSTGSPGASPGTSSTGSPGSSPSASTGTGPGTPGSGTASSSPGASPGTSSTGSPGASPGTSSTGSPGASPGTSSTGSPGSSTPSGATGSPGSSTPSGATGSPGASPGTSSTGSPGTPGSGTASSSPGSSTPSGATGSPGSSTPSGATGSPGSSTPSGATGSPGSSPSASTGTGPGASPGTSSTGSPGASPGTSSTGSPGTPGSGTASSSPGASPGTSSTGSPGASPGTSSTGSPGASPGTSSTGSPGASPGTSSTGSPGTPGSGTASSSPGSSTPSGATGSPGTPGSGTASSSPGSSTPSGATGSPGTPGSGTASSSPGSSTPSGATGSPGSSTPSGATGSPGSSPSASTGTGPGSSPSASTGTGPGASPGTSSTGSPGTPGSGTASSSPGSSTPSGATGSPGSSPSASTGTGPGSSPSASTGTGPGASPGTSSTGSPGASPGTSSTGSPGSSTPSGATGSPGSSPSASTGTGPGASPGTSSTGSPGSSPSASTGTGPGTPGSGTASSSPGSSTPSGATGSPGSSTPSGATGSPGASPG

SEQ ID NO: 167 - protein, 612 aa, synthetic construct
  REGION 1..612: note = Description of Artificial Sequence: Synthetic polypeptide
STGSPGTPGSGTASSSPGSSTPSGATGSPGASPGTSSTGSPGTPGSGTASSSPGSSTPSGATGSPGSSPSASTGTGPGSSPSASTGTGPGSSTPSGATGSPGSSTPSGATGSPGASPGTSSTGSPGASPGTSSTGSPGASPGTSSTGSPGTPGSGTASSSPGASPGTSSTGSPGASPGTSSTGSPGASPGTSSTGSPGSSPSASTGTGPGTPGSGTASSSPGASPGTSSTGSPGASPGTSSTGSPGASPGTSSTGSPGSSTPSGATGSPGSSTPSGATGSPGASPGTSSTGSPGTPGSGTASSSPGSSTPSGATGSPGSSTPSGATGSPGSSTPSGATGSPGSSPSASTGTGPGASPGTSSTGSPGASPGTSSTGSPGTPGSGTASSSPGASPGTSSTGSPGASPGTSSTGSPGASPGTSSTGSPGASPGTSSTGSPGTPGSGTASSSPGSSTPSGATGSPGTPGSGTASSSPGSSTPSGATGSPGTPGSGTASSSPGSSTPSGATGSPGSSTPSGATGSPGSSPSASTGTGPGSSPSASTGTGPGASPGTSSTGSPGTPGSGTASSSPGSSTPSGATGSPGSSPSASTGTGPGSSPSASTGTGPGASPGTS

SEQ ID NO: 168 - protein, 648 aa, synthetic construct
  REGION 1..648: note = Description of Artificial Sequence: Synthetic polypeptide
GTASSSPGSSTPSGATGSPGSSPSASTGTGPGSSPSASTGTGPGSSTPSGATGSPGSSTPSGATGSPGASPGTSSTGSPGASPGTSSTGSPGASPGTSSTGSPGTPGSGTASSSPGASPGTSSTGSPGASPGTSSTGSPGASPGTSSTGSPGSSPSASTGTGPGTPGSGTASSSPGASPGTSSTGSPGASPGTSSTGSPGASPGTSSTGSPGSSTPSGATGSPGSSTPSGATGSPGASPGTSSTGSPGTPGSGTASSSPGSSTPSGATGSPGSSTPSGATGSPGSSTPSGATGSPGSSPSASTGTGPGASPGTSSTGSPGASPGTSSTGSPGTPGSGTASSSPGASPGTSSTGSPGASPGTSSTGSPGASPGTSSTGSPGASPGTSSTGSPGTPGSGTASSSPGSSTPSGATGSPGTPGSGTASSSPGSSTPSGATGSPGTPGSGTASSSPGSSTPSGATGSPGSSTPSGATGSPGSSPSASTGTGPGSSPSASTGTGPGASPGTSSTGSPGTPGSGTASSSPGSSTPSGATGSPGSSPSASTGTGPGSSPSASTGTGPGASPGTSSTGSPGASPGTSSTGSPGSSTPSGATGSPGSSPSASTGTGPGASPGTSSTGSPGSSPSASTGTGPGTPGSGTASSSPGSSTP

SEQ ID NO: 169 - protein, 684 aa, synthetic construct
  REGION 1..684: note = Description of Artificial Sequence: Synthetic polypeptide
TSSTGSPGTPGSGTASSSPGSSTPSGATGSPGSSPSASTGTGPGSSPSASTGTGPGSSTPSGATGSPGSSTPSGATGSPGASPGTSSTGSPGASPGTSSTGSPGASPGTSSTGSPGTPGSGTASSSPGASPGTSSTGSPGASPGTSSTGSPGASPGTSSTGSPGSSPSASTGTGPGTPGSGTASSSPGASPGTSSTGSPGASPGTSSTGSPGASPGTSSTGSPGSSTPSGATGSPGSSTPSGATGSPGASPGTSSTGSPGTPGSGTASSSPGSSTPSGATGSPGSSTPSGATGSPGSSTPSGATGSPGSSPSASTGTGPGASPGTSSTGSPGASPGTSSTGSPGTPGSGTASSSPGASPGTSSTGSPGASPGTSSTGSPGASPGTSSTGSPGASPGTSSTGSPGTPGSGTASSSPGSSTPSGATGSPGTPGSGTASSSPGSSTPSGATGSPGTPGSGTASSSPGSSTPSGATGSPGSSTPSGATGSPGSSPSASTGTGPGSSPSASTGTGPGASPGTSSTGSPGTPGSGTASSSPGSSTPSGATGSPGSSPSASTGTGPGSSPSASTGTGPGASPGTSSTGSPGASPGTSSTGSPGSSTPSGATGSPGSSPSASTGTGPGASPGTSSTGSPGSSPSASTGTGPGTPGSGTASSSPGSSTPSGATGSPGSSTPSGATGSPGASPG

SEQ ID NO: 170 - protein, 720 aa, synthetic construct
  REGION 1..720: note = Description of Artificial Sequence: Synthetic polypeptide
TSSTGSPGTPGSGTASSSPGSSTPSGATGSPGASPGTSSTGSPGTPGSGTASSSPGSSTPSGATGSPGSSPSASTGTGPGSSPSASTGTGPGSSTPSGATGSPGSSTPSGATGSPGASPGTSSTGSPGASPGTSSTGSPGASPGTSSTGSPGTPGSGTASSSPGASPGTSSTGSPGASPGTSSTGSPGASPGTSSTGSPGSSPSASTGTGPGTPGSGTASSSPGASPGTSSTGSPGASPGTSSTGSPGASPGTSSTGSPGSSTPSGATGSPGSSTPSGATGSPGASPGTSSTGSPGTPGSGTASSSPGSSTPSGATGSPGSSTPSGATGSPGSSTPSGATGSPGSSPSASTGTGPGASPGTSSTGSPGASPGTSSTGSPGTPGSGTASSSPGASPGTSSTGSPGASPGTSSTGSPGASPGTSSTGSPGASPGTSSTGSPGTPGSGTASSSPGSSTPSGATGSPGTPGSGTASSSPGSSTPSGATGSPGTPGSGTASSSPGSSTPSGATGSPGSSTPSGATGSPGSSPSASTGTGPGSSPSASTGTGPGASPGTSSTGSPGTPGSGTASSSPGSSTPSGATGSPGSSPSASTGTGPGSSPSASTGTGPGASPGTSSTGSPGASPGTSSTGSPGSSTPSGATGSPGSSPSASTGTGPGASPGTSSTGSPGSSPSASTGTGPGTPGSGTASSSPGSSTPSGATGSPGSSTPSGATGSPGASPG

SEQ ID NO: 171 - protein, 756 aa, synthetic construct
  REGION 1..756: note = Description of Artificial Sequence: Synthetic polypeptide
TSSTGSPGSSPSASTGTGPGSSPSASTGTGPGTPGSGTASSSPGSSTPSGATGSPGSSPSASTGTGPGASPGTSSTGSPGTPGSGTASSSPGSSTPSGATGSPGTPGSGTASSSPGASPGTSSTGSPGASPGTSSTGSPGTPGSGTASSSPGSSTPSGATGSPGASPGTSSTGSPGTPGSGTASSSPGSSTPSGATGSPGSSPSASTGTGPGSSPSASTGTGPGSSTPSGATGSPGSSTPSGATGSPGASPGTSSTGSPGASPGTSSTGSPGASPGTSSTGSPGTPGSGTASSSPGASPGTSSTGSPGASPGTSSTGSPGASPGTSSTGSPGSSPSASTGTGPGTPGSGTASSSPGASPGTSSTGSPGASPGTSSTGSPGASPGTSSTGSPGSSTPSGATGSPGSSTPSGATGSPGASPGTSSTGSPGTPGSGTASSSPGSSTPSGATGSPGSSTPSGATGSPGSSTPSGATGSPGSSPSASTGTGPGASPGTSSTGSPGASPGTSSTGSPGTPGSGTASSSPGASPGTSSTGSPGASPGTSSTGSPGASPGTSSTGSPGASPGTSSTGSPGTPGSGTASSSPGSSTPSGATGSPGTPGSGTASSSPGSSTPSGATGSPGTPGSGTASSSPGSSTPSGATGSPGSSTPSGATGSPGSSPSASTGTGPGSSPSASTGTGPGASPGTSSTGSPGTPGSGTASSSPGSSTPSGATGSPGSSPSASTGTGPGSSPSASTGTGPGASPGTSSTGSPGASPG

SEQ ID NO: 172 - protein, 792 aa, synthetic construct
  REGION 1..792: note = Description of Artificial Sequence: Synthetic polypeptide
TSSTGSPGSSPSASTGTGPGSSPSASTGTGPGTPGSGTASSSPGSSTPSGATGSPGSSPSASTGTGPGASPGTSSTGSPGTPGSGTASSSPGSSTPSGATGSPGTPGSGTASSSPGASPGTSSTGSPGASPGTSSTGSPGTPGSGTASSSPGSSTPSGATGSPGASPGTSSTGSPGTPGSGTASSSPGSSTPSGATGSPGSSPSASTGTGPGSSPSASTGTGPGSSTPSGATGSPGSSTPSGATGSPGASPGTSSTGSPGASPGTSSTGSPGASPGTSSTGSPGTPGSGTASSSPGASPGTSSTGSPGASPGTSSTGSPGASPGTSSTGSPGSSPSASTGTGPGTPGSGTASSSPGASPGTSSTGSPGASPGTSSTGSPGASPGTSSTGSPGSSTPSGATGSPGSSTPSGATGSPGASPGTSSTGSPGTPGSGTASSSPGSSTPSGATGSPGSSTPSGATGSPGSSTPSGATGSPGSSPSASTGTGPGASPGTSSTGSPGASPGTSSTGSPGTPGSGTASSSPGASPGTSSTGSPGASPGTSSTGSPGASPGTSSTGSPGASPGTSSTGSPGTPGSGTASSSPGSSTPSGATGSPGTPGSGTASSSPGSSTPSGATGSPGTPGSGTASSSPGSSTPSGATGSPGSSTPSGATGSPGSSPSASTGTGPGSSPSASTGTGPGASPGTSSTGSPGTPGSGTASSSPGSSTPSGATGSPGSSPSASTGTGPGSSPSASTGTGPGASPGTSSTGSPGASPGTSSTGSPGSSTPSGATGSPGSSPSASTGTGPGASPG

SEQ ID NO: 173 - protein, 828 aa, synthetic construct
  REGION 1..828: note = Description of Artificial Sequence: Synthetic polypeptide
TSSTGSPGSSPSASTGTGPGSSPSASTGTGPGTPGSGTASSSPGSSTPSGATGSPGSSPSASTGTGPGASPGTSSTGSPGTPGSGTASSSPGSSTPSGATGSPGTPGSGTASSSPGASPGTSSTGSPGASPGTSSTGSPGTPGSGTASSSPGSSTPSGATGSPGASPGTSSTGSPGTPGSGTASSSPGSSTPSGATGSPGSSPSASTGTGPGSSPSASTGTGPGSSTPSGATGSPGSSTPSGATGSPGASPGTSSTGSPGASPGTSSTGSPGASPGTSSTGSPGTPGSGTASSSPGASPGTSSTGSPGASPGTSSTGSPGASPGTSSTGSPGSSPSASTGTGPGTPGSGTASSSPGASPGTSSTGSPGASPGTSSTGSPGASPGTSSTGSPGSSTPSGATGSPGSSTPSGATGSPGASPGTSSTGSPGTPGSGTASSSPGSSTPSGATGSPGSSTPSGATGSPGSSTPSGATGSPGSSPSASTGTGPGASPGTSSTGSPGASPGTSSTGSPGTPGSGTASSSPGASPGTSSTGSPGASPGTSSTGSPGASPGTSSTGSPGASPGTSSTGSPGTPGSGTASSSPGSSTPSGATGSPGTPGSGTASSSPGSSTPSGATGSPGTPGSGTASSSPGSSTPSGATGSPGSSTPSGATGSPGSSPSASTGTGPGSSPSASTGTGPGASPGTSSTGSPGTPGSGTASSSPGSSTPSGATGSPGSSPSASTGTGPGSSPSASTGTGPGASPGTSSTGSPGASPGTSSTGSPGSSTPSGATGSPGSSPSASTGTGPGASPGTSSTGSPGSSPSASTGTGPGTPGSGTASSSPGSSTP

SEQ ID NO: 174 - protein, 4 aa, synthetic construct
  REGION 1..4: note = Description of Artificial Sequence: Synthetic peptide
GSPG

SEQ ID NO: 175 - protein, 4 aa, synthetic construct
  REGION 1..4: note = Description of Artificial Sequence: Synthetic peptide
ETET

SEQ ID NO: 176 - protein, 5 aa, synthetic construct
  REGION 1..5: note = Description of Artificial Sequence: Synthetic peptide
PGSSS

SEQ ID NO: 177 - protein, 5 aa, synthetic construct
  REGION 1..5: note = Description of Artificial Sequence: Synthetic peptide
GPSGP

SEQ ID NO: 178 - protein, 10 aa, synthetic construct
  REGION 1..10: note = Description of Artificial Sequence: Synthetic peptide
GAGSPGAETA

SEQ ID NO: 179 - protein, 7 aa, synthetic construct
  REGION 1..7: note = Description of Artificial Sequence: Synthetic peptide
KLTRAET

SEQ ID NO: 180 - protein, 7 aa, synthetic construct
  REGION 1..7: note = Description of Artificial Sequence: Synthetic peptide
DFTRVVG

SEQ ID NO: 181 - protein, 8 aa, synthetic construct
  REGION 1..8: note = Description of Artificial Sequence: Synthetic peptide
TMTRIVGG

SEQ ID NO: 182 - protein, 8 aa, synthetic construct
  REGION 1..8: note = Description of Artificial Sequence: Synthetic peptide
SPFRSTGG

SEQ ID NO: 183 - protein, 8 aa, synthetic construct
  REGION 1..8: note = Description of Artificial Sequence: Synthetic peptide
LQVRIVGG

SEQ ID NO: 184 - protein, 8 aa, synthetic construct
  REGION 1..8: note = Description of Artificial Sequence: Synthetic peptide
PLGRIVGG

SEQ ID NO: 185 - protein, 8 aa, synthetic construct
  REGION 1..8: note = Description of Artificial Sequence: Synthetic peptide
IEGRTVGG

SEQ ID NO: 186 - protein, 8 aa, synthetic construct
  REGION 1..8: note = Description of Artificial Sequence: Synthetic peptide
LTPRSLLV

SEQ ID NO: 187 - protein, 8 aa, synthetic construct
  REGION 1..8: note = Description of Artificial Sequence: Synthetic peptide
LGPVSGVP

SEQ ID NO: 188 - protein, 8 aa, synthetic construct
  REGION 1..8: note = Description of Artificial Sequence: Synthetic peptide
VAGDSLEE

SEQ ID NO: 189 - protein, 8 aa, synthetic construct
  REGION 1..8: note = Description of Artificial Sequence: Synthetic peptide
GPAGLGGA

SEQ ID NO: 190 - protein, 8 aa, synthetic construct
  REGION 1..8: note = Description of Artificial Sequence: Synthetic peptide
  VAR_SEQ 2: note = Pro or Ala
  VAR_SEQ 3: note = Any amino acid
  VAR_SEQ 6: note = Any amino acid
  VAR_SEQ 8: note = Any amino acid
GXXGLXGX

SEQ ID NO: 191 - protein, 8 aa, synthetic construct
  REGION 1..8: note = Description of Artificial Sequence: Synthetic peptide
GPAGLRGA

SEQ ID NO: 192 - protein, 8 aa, synthetic construct
  REGION 1..8: note = Description of Artificial Sequence: Synthetic peptide
  VAR_SEQ 3: note = Any amino acid
  VAR_SEQ 6: note = Any amino acid
  VAR_SEQ 7: note = Gly or Ala
  VAR_SEQ 8: note = Any amino acid
GPXGLXXX

SEQ ID NO: 193 - protein, 8 aa, synthetic construct
  REGION 1..8: note = Description of Artificial Sequence: Synthetic peptide
APLGLRLR

SEQ ID NO: 194 - protein, 8 aa, synthetic construct
  REGION 1..8: note = Description of Artificial Sequence: Synthetic peptide
PALPLVAQ

SEQ ID NO: 195 - protein, 7 aa, synthetic construct
  REGION 1..7: note = Description of Artificial Sequence: Synthetic peptide
ENLYFQG

SEQ ID NO: 196 - protein, 8 aa, synthetic construct
  REGION 1..8: note = Description of Artificial Sequence: Synthetic peptide
ENLYFQGS

SEQ ID NO: 197 - protein, 8 aa, synthetic construct
  REGION 1..8: note = Description of Artificial Sequence: Synthetic peptide
DDDKIVGG

SEQ ID NO: 198 - protein, 8 aa, synthetic construct
  REGION 1..8: note = Description of Artificial Sequence: Synthetic peptide
DDDKIVGG

SEQ ID NO: 199 - protein, 8 aa, synthetic construct
  REGION 1..8: note = Description of Artificial Sequence: Synthetic peptide
LEVLFQGP

SEQ ID NO: 200 - protein, 8 aa, synthetic construct
  REGION 1..8: note = Description of Artificial Sequence: Synthetic peptide
LEVLFQGP

SEQ ID NO: 201 - protein, 8 aa, synthetic construct
  REGION 1..8: note = Description of Artificial Sequence: Synthetic peptide
LPKTGSES

SEQ ID NO: 202 - protein, 8 aa, synthetic construct
  REGION 1..8: note = Description of Artificial Sequence: Synthetic peptide
  VAR_SEQ 3: note = Lys, Glu, Ala or Asp
  VAR_SEQ 6: note = Any amino acid
  VAR_SEQ 7: note = Glu, Lys or Ser
LPXTGXXS

SEQ ID NO: 203 - protein, 36 aa, synthetic construct
  REGION 1..36: note = Description of Artificial Sequence: Synthetic polypeptide
GSGGEPSESGSSGESPGGSSGSESGESPGGSSGSES

SEQ ID NO: 204 - DNA, 108 bp, synthetic construct
  misc_feature 1..108: note = Description of Artificial Sequence: Synthetic polynucleotide
  source 1..108: mol_type = other DNA
ggttctggtggcgaaccgtccgagtctggtagctcaggtgaatctccgggtggctctagcggttccgagtcaggtgaatctcctggtggttccagcggttccgagtca

SEQ ID NO: 205 - protein, 36 aa, synthetic construct
  REGION 1..36: note = Description of Artificial Sequence: Synthetic polypeptide
GSEGSSGPGESSGESPGGSSGSESGSSESGSSEGGP

SEQ ID NO: 206 - DNA, 108 bp, synthetic construct
  misc_feature 1..108: note = Description of Artificial Sequence: Synthetic polynucleotide
  source 1..108: mol_type = other DNA
ggtagcgaaggttcttctggtcctggcgagtcttcaggtgaatctcctggtggttccagcggttctgaatcaggttcctccgaaagcggttcttccgagggcggtcca

SEQ ID NO: 207 - protein, 36 aa, synthetic construct
  REGION 1..36: note = Description of Artificial Sequence: Synthetic polypeptide
GSSESGSSEGGPGSSESGSSEGGPGESPGGSSGSES

SEQ ID NO: 208 - DNA, 108 bp, synthetic construct
  misc_feature 1..108: note = Description of Artificial Sequence: Synthetic polynucleotide
  source 1..108: mol_type = other DNA
ggttcctctgaaagcggttcttccgaaggtggtccaggttcctctgaaagcggttcttctgagggtggtccaggtgaatctccgggtggctccagcggttccgagtca

SEQ ID NO: 209 - protein, 36 aa, synthetic construct
  REGION 1..36: note = Description of Artificial Sequence: Synthetic polypeptide
GSGGEPSESGSSGSSESGSSEGGPGSGGEPSESGSS

SEQ ID NO: 210 - DNA, 108 bp, synthetic construct
  misc_feature 1..108: note = Description of Artificial Sequence: Synthetic polynucleotide
  source 1..108: mol_type = other DNA
ggttccggtggcgaaccgtctgaatctggtagctcaggttcttctgaaagcggttcttccgagggtggtccaggttctggtggtgaaccttccgagtctggtagctca

SEQ ID NO: 211 - protein, 36 aa, synthetic construct
  REGION 1..36: note = Description of Artificial Sequence: Synthetic polypeptide
GSSESGSSEGGPGSEGSSGPGESSGSEGSSGPGESS

SEQ ID NO: 212 - DNA, 108 bp, synthetic construct
  misc_feature 1..108: note = Description of Artificial Sequence: Synthetic polynucleotide
  source 1..108: mol_type = other DNA
ggttcttccgaaagcggttcttctgagggtggtccaggtagcgaaggttcttccggtccaggtgagtcttcaggtagcgaaggttcttctggtcctggtgaatcttca

SEQ ID NO: 213 - protein, 36 aa, synthetic construct
  REGION 1..36: note = Description of Artificial Sequence: Synthetic polypeptide
GSSESGSSEGGPGESPGGSSGSESGSEGSSGPGESS

SEQ ID NO: 214 - DNA, 108 bp, synthetic construct
  misc_feature 1..108: note = Description of Artificial Sequence: Synthetic polynucleotide
  source 1..108: mol_type = other DNA
ggttcctctgaaagcggttcttccgagggtggtccaggtgaatctccaggtggttccagcggttctgagtcaggtagcgaaggttcttctggtccaggtgaatcctca

SEQ ID NO: 215 - protein, 36 aa, synthetic construct
  REGION 1..36: note = Description of Artificial Sequence: Synthetic polypeptide
GSGGEPSESGSSGSGGEPSESGSSGSEGSSGPGESS

SEQ ID NO: 216 - DNA, 108 bp, synthetic construct
  misc_feature 1..108: note = Description of Artificial Sequence: Synthetic polynucleotide
  source 1..108: mol_type = other DNA
ggttctggtggtgaaccgtctgagtctggtagctcaggttccggtggcgaaccatccgaatctggtagctcaggtagcgaaggttcttccggtccaggtgagtcttca

SEQ ID NO: 217 - protein, 36 aa, synthetic construct
  REGION 1..36: note = Description of Artificial Sequence: Synthetic polypeptide
GSSESGSSEGGPGSEGSSGPGESSGESPGGSSGSES

SEQ ID NO: 218 - DNA, 108 bp, synthetic construct
  misc_feature 1..108: note = Description of Artificial Sequence: Synthetic polynucleotide
  source 1..108: mol_type = other DNA
ggttcttccgaaagcggttcttccgaaggcggtccaggtagcgaaggttcttctggtccaggcgaatcttcaggtgaatctcctggtggctccagcggttctgagtca

SEQ ID NO: 219 - protein, 36 aa, synthetic construct
  REGION 1..36: note = Description of Artificial Sequence: Synthetic polypeptide
GSSESGSSEGGPGSSESGSSEGGPGSSESGSSEGGP

SEQ ID NO: 220 - DNA, 108 bp, synthetic construct
  misc_feature 1..108: note = Description of Artificial Sequence: Synthetic polynucleotide
  source 1..108: mol_type = other DNA
ggttcctccgaaagcggttcttctgagggcggtccaggttcctccgaaagcggttcttccgagggcggtccaggttcttctgaaagcggttcttccgagggcggtcca

SEQ ID NO: 221 - protein, 36 aa, synthetic construct
  REGION 1..36: note = Description of Artificial Sequence: Synthetic polypeptide
GSGGEPSESGSSGSEGSSGPGESSGSSESGSSEGGP

SEQ ID NO: 222 - DNA, 108 bp, synthetic construct
  misc_feature 1..108: note = Description of Artificial Sequence: Synthetic polynucleotide
  source 1..108: mol_type = other DNA
ggttccggtggcgaaccgtccgaatctggtagctcaggtagcgaaggttcttctggtccaggcgaatcttcaggttcctctgaaagcggttcttctgagggcggtcca

SEQ ID NO: 223 - protein, 36 aa, synthetic construct; identical to SEQ ID NO: 209
  REGION 1..36: note = Description of Artificial Sequence: Synthetic polypeptide

SEQ ID NO: 224 - DNA, 108 bp, synthetic construct
  misc_feature 1..108: note = Description of Artificial Sequence: Synthetic polynucleotide
  source 1..108: mol_type = other DNA
ggttctggtggtgaaccgtccgaatctggtagctcaggttcttccgaaagcggttcttctgaaggtggtccaggttccggtggcgaaccttctgaatctggtagctca

SEQ ID NO: 225 - protein, 36 aa, synthetic construct
  REGION 1..36: note = Description of Artificial Sequence: Synthetic polypeptide
GSGGEPSESGSSGSSESGSSEGGPGESPGGSSGSES

SEQ ID NO: 226 - DNA, 108 bp, synthetic construct
  misc_feature 1..108: note = Description of Artificial Sequence: Synthetic polynucleotide
  source 1..108: mol_type = other DNA
ggttctggtggcgaaccgtccgaatctggtagctcaggttcctccgaaagcggttcttctgaaggtggtccaggtgaatctccaggtggttctagcggttctgaatca

SEQ ID NO: 227 - protein, 36 aa, synthetic construct
  REGION 1..36: note = Description of Artificial Sequence: Synthetic polypeptide
GSGGEPSESGSSGESPGGSSGSESGSEGSSGPGESS

SEQ ID NO: 228 - DNA, 108 bp, synthetic construct
  misc_feature 1..108: note = Description of Artificial Sequence: Synthetic polynucleotide
  source 1..108: mol_type = other DNA
ggttctggtggcgaaccgtctgagtctggtagctcaggtgaatctcctggtggctccagcggttctgaatcaggtagcgaaggttcttctggtcctggtgaatcttca

SEQ ID NO: 229 - protein, 36 aa, synthetic construct
  REGION 1..36: note = Description of Artificial Sequence: Synthetic polypeptide
GSGGEPSESGSSGESPGGSSGSESGSGGEPSESGSS

SEQ ID NO: 230 - DNA, 108 bp, synthetic construct
  misc_feature 1..108: note = Description of Artificial Sequence: Synthetic polynucleotide
  source 1..108: mol_type = other DNA
ggttccggtggcgaaccttccgaatctggtagctcaggtgaatctccgggtggttctagcggttctgagtcaggttctggtggtgaaccttccgagtctggtagctca

SEQ ID NO: 231 - protein, 36 aa, synthetic construct; identical to SEQ ID NO: 219
  REGION 1..36: note = Description of Artificial Sequence: Synthetic polypeptide

SEQ ID NO: 232 - DNA, 108 bp, synthetic construct
  misc_feature 1..108: note = Description of Artificial Sequence: Synthetic polynucleotide
  source 1..108: mol_type = other DNA
ggttcctctgaaagcggttcttctgagggcggtccaggttcttccgaaagcggttcttccgagggcggtccaggttcttccgaaagcggttcttctgaaggcggtcca

SEQ ID NO: 233 - protein, 36 aa, synthetic construct
  REGION 1..36: note = Description of Artificial Sequence: Synthetic polypeptide
GESPGGSSGSESGSEGSSGPGESSGSEGSSGPGESS

SEQ ID NO: 234 - DNA, 108 bp, synthetic construct
  misc_feature 1..108: note = Description of Artificial Sequence: Synthetic polynucleotide
  source 1..108: mol_type = other DNA
ggtgaatctccgggtggctccagcggttctgagtcaggtagcgaaggttcttccggtccgggtgagtcctcaggtagcgaaggttcttccggtcctggtgagtcttca

SEQ ID NO: 235 - protein, 36 aa, synthetic construct
  REGION 1..36: note = Description of Artificial Sequence: Synthetic polypeptide
GSGGEPSESGSSGSGGEPSESGSSGSSESGSSEGGP

SEQ ID NO: 236 - DNA, 108 bp, synthetic construct
  misc_feature 1..108: note = Description of Artificial Sequence: Synthetic polynucleotide
  source 1..108: mol_type = other DNA
ggttctggtggcgaaccttccgaatctggtagctcaggttccggtggtgaaccttctgaatctggtagctcaggttcttctgaaagcggttcttccgagggcggtcca

SEQ ID NO: 237 - protein, 36 aa, synthetic construct
  REGION 1..36: note = Description of Artificial Sequence: Synthetic polypeptide
GSGGEPSESGSSGSGGEPSESGSSGSGGEPSESGSS

SEQ ID NO: 238 - DNA, 108 bp, synthetic construct
  misc_feature 1..108: note = Description of Artificial Sequence: Synthetic polynucleotide
  source 1..108: mol_type = other DNA
ggttccggtggtgaaccttctgaatctggtagctcaggttccggtggcgaaccatccgagtctggtagctcaggttccggtggtgaaccatccgagtctggtagctca

SEQ ID NO: 239 - protein, 36 aa, synthetic construct
  REGION 1..36: note = Description of Artificial Sequence: Synthetic polypeptide
GSGGEPSESGSSGSSESGSSEGGPGSEGSSGPGESS

SEQ ID NO: 240 - DNA, 108 bp, synthetic construct
  misc_feature 1..108: note = Description of Artificial Sequence: Synthetic polynucleotide
  source 1..108: mol_type = other DNA
ggttccggtggcgaaccttctgaatctggtagctcaggttcctccgaaagcggttcttctgagggcggtccaggtagcgaaggttcttctggtccgggcgagtcttca

SEQ ID NO: 241 - protein, 36 aa, synthetic construct
  REGION 1..36: note = Description of Artificial Sequence: Synthetic polypeptide
GSGGEPSESGSSGSEGSSGPGESSGSGGEPSESGSS

SEQ ID NO: 242 - DNA, 108 bp, synthetic construct
  misc_feature 1..108: note = Description of Artificial Sequence: Synthetic polynucleotide
  source 1..108: mol_type = other DNA
ggttccggtggtgaaccgtccgagtctggtagctcaggtagcgaaggttcttctggtccgggtgagtcttcaggttctggtggcgaaccgtccgaatctggtagctca

SEQ ID NO: 243 - protein, 36 aa, synthetic construct; identical to SEQ ID NO: 229
  REGION 1..36: note = Description of Artificial Sequence: Synthetic polypeptide

SEQ ID NO: 244 - DNA, 108 bp, synthetic construct
  misc_feature 1..108: note = Description of Artificial Sequence: Synthetic polynucleotide
  source 1..108: mol_type = other DNA
ggttctggtggcgaaccgtccgaatctggtagctcaggtgaatctcctggtggttccagcggttccgagtcaggttctggtggcgaaccttccgaatctggtagctca

SEQ ID NO: 245 - protein, 36 aa, synthetic construct
  REGION 1..36: note = Description of Artificial Sequence: Synthetic polypeptide
GSSESGSSEGGPGSGGEPSESGSSGSSESGSSEGGP

SEQ ID NO: 246 - DNA, 108 bp, synthetic construct
  misc_feature 1..108: note = Description of Artificial Sequence: Synthetic polynucleotide
  source 1..108: mol_type = other DNA
ggttcttccgaaagcggttcttccgagggcggtccaggttccggtggtgaaccatctgaatctggtagctcaggttcttctgaaagcggttcttctgaaggtggtcca

SEQ ID NO: 247 - protein, 36 aa, synthetic construct
  REGION 1..36: note = Description of Artificial Sequence: Synthetic polypeptide
GSEGSSGPGESSGESPGGSSGSESGSEGSSGPGESS

SEQ ID NO: 248 - DNA, 108 bp, synthetic construct
  misc_feature 1..108: note = Description of Artificial Sequence: Synthetic polynucleotide
  source 1..108: mol_type = other DNA
ggtagcgaaggttcttccggtcctggtgagtcttcaggtgaatctccaggtggctctagcggttccgagtcaggtagcgaaggttcttctggtcctggcgagtcctca

SEQ ID NO: 249 - protein, 36 aa, synthetic construct; identical to SEQ ID NO: 219
  REGION 1..36: note = Description of Artificial Sequence: Synthetic polypeptide

SEQ ID NO: 250 - DNA, 108 bp, synthetic construct
  misc_feature 1..108: note = Description of Artificial Sequence: Synthetic polynucleotide
  source 1..108: mol_type = other DNA
ggttcctctgaaagcggttcttccgaaggcggtccaggttcttccgaaagcggttcttctgagggcggtccaggttcctccgaaagcggttcttctgagggtggtcca

SEQ ID NO: 251 - protein, 36 aa, synthetic construct; identical to SEQ ID NO: 203
  REGION 1..36: note = Description of Artificial Sequence: Synthetic polypeptide

SEQ ID NO: 252 - DNA, 108 bp, synthetic construct
  misc_feature 1..108: note = Description of Artificial Sequence: Synthetic polynucleotide
  source 1..108: mol_type = other DNA
ggttctggtggcgaaccttccgagtctggtagctcaggtgaatctccgggtggttctagcggttccgagtcaggtgaatctccgggtggttccagcggttctgagtca

SEQ ID NO: 253 - protein, 36 aa, synthetic construct
  REGION 1..36: note = Description of Artificial Sequence: Synthetic polypeptide
GSGGEPSESGSSGSEGSSGPGESSGESPGGSSGSES

SEQ ID NO: 254 - DNA, 108 bp, synthetic construct
  misc_feature 1..108: note = Description of Artificial Sequence: Synthetic polynucleotide
  source 1..108: mol_type = other DNA
ggttctggtggcgaaccatctgagtctggtagctcaggtagcgaaggttcttccggtccaggcgagtcttcaggtgaatctcctggtggctccagcggttctgagtca

SEQ ID NO: 255 - protein, 36 aa, synthetic construct
  REGION 1..36: note = Description of Artificial Sequence: Synthetic polypeptide
GESPGGSSGSESGESPGGSSGSESGESPGGSSGSES

SEQ ID NO: 256 - DNA, 108 bp, synthetic construct
  misc_feature 1..108: note = Description of Artificial Sequence: Synthetic polynucleotide
  source 1..108: mol_type = other DNA
ggtgaatctcctggtggttccagcggttccgagtcaggtgaatctccaggtggctctagcggttccgagtcaggtgaatctcctggtggttctagcggttctgaatca

SEQ ID NO: 257 - protein, 36 aa, synthetic construct
  REGION 1..36: note = Description of Artificial Sequence: Synthetic polypeptide
GSEGSSGPGESSGSEGSSGPGESSGSGGEPSESGSS

SEQ ID NO: 258 - DNA, 108 bp, synthetic construct
  misc_feature 1..108: note = Description of Artificial Sequence: Synthetic polynucleotide
  source 1..108: mol_type = other DNA
ggtagcgaaggttcttccggtccaggtgaatcttcaggtagcgaaggttcttctggtcctggtgaatcctcaggttccggtggcgaaccatctgaatctggtagctca

SEQ ID NO: 259 - protein, 36 aa, synthetic construct; identical to SEQ ID NO: 253
  REGION 1..36: note = Description of Artificial Sequence: Synthetic polypeptide

SEQ ID NO: 260 - DNA, 108 bp, synthetic construct
  misc_feature 1..108: note = Description of Artificial Sequence: Synthetic polynucleotide
  source 1..108: mol_type = other DNA
ggttctggtggcgaaccatccgaatctggtagctcaggtagcgaaggttcttctggtcctggcgaatcttcaggtgaatctccaggtggctctagcggttccgaatca

SEQ ID NO: 261 - protein, 36 aa, synthetic construct; identical to SEQ ID NO: 209
  REGION 1..36: note = Description of Artificial Sequence: Synthetic polypeptide

SEQ ID NO: 262 - DNA, 108 bp, synthetic construct
  misc_feature 1..108: note = Description of Artificial Sequence: Synthetic polynucleotide
  source 1..108: mol_type = other DNA
ggttccggtggtgaaccgtccgaatctggtagctcaggttcctctgaaagcggttcttccgagggtggtccaggttccggtggtgaaccttctgagtctggtagctca

SEQ ID NO: 263 - protein, 36 aa, synthetic construct
  REGION 1..36: note = Description of Artificial Sequence: Synthetic polypeptide
GSSESGSSEGGPGSGGEPSESGSSGSEGSSGPGESS

SEQ ID NO: 264 - DNA, 108 bp, synthetic construct
  misc_feature 1..108: note = Description of Artificial Sequence: Synthetic polynucleotide
  source 1..108: mol_type = other DNA
ggttcctctgaaagcggttcttctgagggcggtccaggttctggtggcgaaccatctgaatctggtagctcaggtagcgaaggttcttccggtccgggtgaatcttca

SEQ ID NO: 265 - protein, 36 aa, synthetic construct
  REGION 1..36: note = Description of Artificial Sequence: Synthetic polypeptide
GSGGEPSESGSSGSEGSSGPGESSGSEGSSGPGESS

SEQ ID NO: 266 - DNA, 108 bp, synthetic construct
  misc_feature 1..108: note = Description of Artificial Sequence: Synthetic polynucleotide
  source 1..108: mol_type = other DNA
ggttctggtggtgaaccgtccgaatctggtagctcaggtagcgaaggttcttctggtcctggcgagtcttcaggtagcgaaggttcttctggtcctggtgaatcttca

SEQ ID NO: 267 - protein, 36 aa, synthetic construct; identical to SEQ ID NO: 209
  REGION 1..36: note = Description of Artificial Sequence: Synthetic polypeptide

SEQ ID NO: 268 - DNA, 108 bp, synthetic construct
  misc_feature 1..108: note = Description of Artificial Sequence: Synthetic polynucleotide
  source 1..108: mol_type = other DNA
ggttctggtggcgaaccatccgagtctggtagctcaggttcttccgaaagcggttcttccgaaggcggtccaggttctggtggtgaaccgtccgaatctggtagctca

SEQ ID NO: 269 - protein, 36 aa, synthetic construct; identical to SEQ ID NO: 203
  REGION 1..36: note = Description of Artificial Sequence: Synthetic polypeptide

SEQ ID NO: 270 - DNA, 108 bp, synthetic construct
  misc_feature 1..108: note = Description of Artificial Sequence: Synthetic polynucleotide
  source 1..108: mol_type = other DNA
ggttccggtggcgaaccttccgaatctggtagctcaggtgaatctccgggtggttctagcggttccgaatcaggtgaatctccaggtggttctagcggttccgaatca

SEQ ID NO: 271 - protein, 36 aa, synthetic construct
  REGION 1..36: note = Description of Artificial Sequence: Synthetic polypeptide
GSGGEPSESGSSGSGGEPSESGSSGESPGGSSGSES

SEQ ID NO: 272 - DNA, 108 bp, synthetic construct
  misc_feature 1..108: note = Description of Artificial Sequence: Synthetic polynucleotide
  source 1..108: mol_type = other DNA
ggttccggtggtgaaccatctgagtctggtagctcaggttccggtggcgaaccgtccgagtctggtagctcaggtgaatctccgggtggttccagcggttccgaatca

SEQ ID NO: 273 - protein, 36 aa, synthetic construct
  REGION 1..36: note = Description of Artificial Sequence: Synthetic polypeptide
GSEGSSGPGESSGSSESGSSEGGPGSEGSSGPGESS

SEQ ID NO: 274 - DNA, 108 bp, synthetic construct
  misc_feature 1..108: note = Description of Artificial Sequence: Synthetic polynucleotide
  source 1..108: mol_type = other DNA
ggtagcgaaggttcttctggtccgggcgaatcctcaggttcctccgaaagcggttcttccgaaggtggtccaggtagcgaaggttcttccggtcctggtgaatcttca

SEQ ID NO: 275 - protein, 36 aa, synthetic construct
  REGION 1..36: note = Description of Artificial Sequence: Synthetic polypeptide
GSSESGSSEGGPGESPGGSSGSESGESPGGSSGSES

SEQ ID NO: 276 - DNA, 108 bp, synthetic construct
  misc_feature 1..108: note = Description of Artificial Sequence: Synthetic polynucleotide
  source 1..108: mol_type = other DNA
ggttcctctgaaagcggttcttctgaaggcggtccaggtgaatctccgggtggctccagcggttctgaatcaggtgaatctcctggtggctccagcggttccgagtca

SEQ ID NO: 277 - protein, 36 aa, synthetic construct; identical to SEQ ID NO: 257
  REGION 1..36: note = Description of Artificial Sequence: Synthetic polypeptide

SEQ ID NO: 278 - DNA, 108 bp, synthetic construct
  misc_feature 1..108: note = Description of Artificial Sequence: Synthetic polynucleotide
  source 1..108: mol_type = other DNA
ggtagcgaaggttcttctggtccaggcgagtcttcaggtagcgaaggttcttccggtcctggcgagtcttcaggttccggtggcgaaccgtccgaatctggtagctca

SEQ ID NO: 279 - protein, 36 aa, synthetic construct
  REGION 1..36: note = Description of Artificial Sequence: Synthetic polypeptide
GSPAGSPTSTEEGTSESATPESGPGTSTEPSEGSAP

SEQ ID NO: 280 - DNA, 108 bp, synthetic construct
  misc_feature 1..108: note = Description of Artificial Sequence: Synthetic polynucleotide
  source 1..108: mol_type = other DNA
ggtagcccggcaggctctccgacctctactgaggaaggtacttctgaaagcgcaaccccggagtccggcccaggtacctctaccgaaccgtctgagggcagcgcacca

SEQ ID NO: 281 - protein, 36 aa, synthetic construct
  REGION 1..36: note = Description of Artificial Sequence: Synthetic polypeptide
GTSTEPSEGSAPGTSTEPSEGSAPGTSTEPSEGSAP

SEQ ID NO: 282 - DNA, 108 bp, synthetic construct
  misc_feature 1..108: note = Description of Artificial Sequence: Synthetic polynucleotide
  source 1..108: mol_type = other DNA
ggtacttctaccgaaccgtccgaaggcagcgctccaggtacctctactgaaccttccgagggcagcgctccaggtacctctaccgaaccttctgaaggtagcgcacca

SEQ ID NO: 283 - protein, 36 aa, synthetic construct
  REGION 1..36: note = Description of Artificial Sequence: Synthetic polypeptide
GTSTEPSEGSAPGTSESATPESGPGTSESATPESGP

SEQ ID NO: 284 - DNA, 108 bp, synthetic construct
  misc_feature 1..108: note = Description of Artificial Sequence: Synthetic polynucleotide
  source 1..108: mol_type = other DNA
ggtacctctaccgaaccgtctgaaggtagcgcaccaggtacctctgaaagcgcaactcctgagtccggtccaggtacttctgaaagcgcaaccccggagtctggccca

SEQ ID NO: 285 - protein, 36 aa, synthetic construct; identical to SEQ ID NO: 283
  REGION 1..36: note = Description of Artificial Sequence: Synthetic polypeptide

SEQ ID NO: 286 - DNA, 108 bp, synthetic construct
  misc_feature 1..108: note = Description of Artificial Sequence: Synthetic polynucleotide
  source 1..108: mol_type = other DNA
ggtacttctactgaaccgtctgaaggtagcgcaccaggtacttctgaaagcgcaaccccggaatccggcccaggtacctctgaaagcgcaaccccggagtccggccca

SEQ ID NO: 287 - protein, 36 aa, synthetic construct
  REGION 1..36: note = Description of Artificial Sequence: Synthetic polypeptide
GSEPATSGSETPGTSESATPESGPGSPAGSPTSTEE

SEQ ID NO: 288 - DNA, 108 bp, synthetic construct
  misc_feature 1..108: note = Description of Artificial Sequence: Synthetic polynucleotide
  source 1..108: mol_type = other DNA
ggtagcgaaccggcaacctccggctctgaaaccccaggtacctctgaaagcgctactcctgaatccggcccaggtagcccggcaggttctccgacttccactgaggaa

SEQ ID NO: 289 - protein, 36 aa, synthetic construct
  REGION 1..36: note = Description of Artificial Sequence: Synthetic polypeptide
GTSESATPESGPGSEPATSGSETPGTSTEPSEGSAP

SEQ ID NO: 290 - DNA, 108 bp, synthetic construct
  misc_feature 1..108: note = Description of Artificial Sequence: Synthetic polynucleotide
  source 1..108: mol_type = other DNA
ggtacttctgaaagcgcaacccctgaatccggtccaggtagcgaaccggctacttctggctctgagactccaggtacttctaccgaaccgtccgaaggtagcgcacca

SEQ ID NO: 291 - protein, 36 aa, synthetic construct
  REGION 1..36: note = Description of Artificial Sequence: Synthetic polypeptide
GSPAGSPTSTEEGSPAGSPTSTEEGSEPATSGSETP

SEQ ID NO: 292 - DNA, 108 bp, synthetic construct
  misc_feature 1..108: note = Description of Artificial Sequence: Synthetic polynucleotide
  source 1..108: mol_type = other DNA
ggtagcccggctggctctccaacctccactgaggaaggtagcccggctggctctccaacctccactgaagaaggtagcgaaccggctacctccggctctgaaactcca

SEQ ID NO: 293 - protein, 36 aa, synthetic construct; identical to SEQ ID NO: 279
  REGION 1..36: note = Description of Artificial Sequence: Synthetic polypeptide

SEQ ID NO: 294 - DNA, 108 bp, synthetic construct
  misc_feature 1..108: note = Description of Artificial Sequence: Synthetic polynucleotide
  source 1..108: mol_type = other DNA
ggtagcccggctggctctcctacctctactgaggaaggtacttctgaaagcgctactcctgagtctggtccaggtacctctactgaaccgtccgaaggtagcgctcca

SEQ ID NO: 295 - protein, 36 aa, synthetic construct
  REGION 1..36: note = Description of Artificial Sequence: Synthetic polypeptide
GSPAGSPTSTEEGSPAGSPTSTEEGTSTEPSEGSAP

SEQ ID NO: 296 - DNA, 108 bp, synthetic construct
  misc_feature 1..108: note = Description of Artificial Sequence: Synthetic polynucleotide
  source 1..108: mol_type = other DNA
ggtagccctgctggctctccgacttctactgaggaaggtagcccggctggttctccgacttctactgaggaaggtacttctaccgaaccttccgaaggtagcgctcca

SEQ ID NO: 297 - protein, 36 aa, synthetic construct
  REGION 1..36: note = Description of Artificial Sequence: Synthetic polypeptide
GTSESATPESGPGTSTEPSEGSAPGTSTEPSEGSAP

SEQ ID NO: 298 - DNA, 108 bp, synthetic construct
  misc_feature 1..108: note = Description of Artificial Sequence: Synthetic polynucleotide
  source 1..108: mol_type = other DNA
ggtacttctgaaagcgctactccggagtccggtccaggtacctctaccgaaccgtccgaaggcagcgctccaggtacttctactgaaccttctgagggtagcgctcca

SEQ ID NO: 299 - protein, 36 aa, synthetic construct
  REGION 1..36: note = Description of Artificial Sequence: Synthetic polypeptide
GTSTEPSEGSAPGSPAGSPTSTEEGTSTEPSEGSAP

SEQ ID NO: 300 - DNA, 108 bp, synthetic construct
  misc_feature 1..108: note = Description of Artificial Sequence: Synthetic polynucleotide
  source 1..108: mol_type = other DNA
ggtacctctaccgaaccttccgaaggtagcgctccaggtagcccggcaggttctcctacttccactgaggaaggtacttctaccgaaccttctgagggtagcgcacca

SEQ ID NO: 301 - protein, 36 aa, synthetic construct
  REGION 1..36: note = Description of Artificial Sequence: Synthetic polypeptide
GSEPATSGSETPGSPAGSPTSTEEGTSESATPESGP

SEQ ID NO: 302 - DNA, 108 bp, synthetic construct
  misc_feature 1..108: note = Description of Artificial Sequence: Synthetic polynucleotide
  source 1..108: mol_type = other DNA
ggtagcgaaccggctacttccggctctgagactccaggtagccctgctggctctccgacctctaccgaagaaggtacctctgaaagcgctacccctgagtctggccca

SEQ ID NO: 303 - protein, 36 aa, synthetic construct; identical to SEQ ID NO: 283
  REGION 1..36: note = Description of Artificial Sequence: Synthetic polypeptide

SEQ ID NO: 304 - DNA, 108 bp, synthetic construct
  misc_feature 1..108: note = Description of Artificial Sequence: Synthetic polynucleotide
  source 1..108: mol_type = other DNA
ggtacttctaccgaaccttccgagggcagcgcaccaggtacttctgaaagcgctacccctgagtccggcccaggtacttctgaaagcgctactcctgaatccggtcca

SEQ ID NO: 305 - protein, 36 aa, synthetic construct
  REGION 1..36: note = Description of Artificial Sequence: Synthetic polypeptide
GTSTEPSEGSAPGSEPATSGSETPGSPAGSPTSTEE

SEQ ID NO: 306 - DNA, 108 bp, synthetic construct
  misc_feature 1..108: note = Description of Artificial Sequence: Synthetic polynucleotide
  source 1..108: mol_type = other DNA
ggtacttctactgaaccgtctgaaggcagcgcaccaggtagcgaaccggctacttccggttctgaaaccccaggtagcccagcaggttctccaacttctactgaagaa

SEQ ID NO: 307 - protein, 36 aa, synthetic construct
  REGION 1..36: note = Description of Artificial Sequence: Synthetic polypeptide
GSPAGSPTSTEEGTSESATPESGPGSEPATSGSETP

SEQ ID NO: 308 - DNA, 108 bp, synthetic construct
  misc_feature 1..108: note = Description of Artificial Sequence: Synthetic polynucleotide
  source 1..108: mol_type = other DNA
ggtagccctgctggctctccaacctccaccgaagaaggtacctctgaaagcgcaacccctgaatccggcccaggtagcgaaccggcaacctccggttctgaaacccca

SEQ ID NO: 309 - protein, 36 aa, synthetic construct
  REGION 1..36: note = Description of Artificial Sequence: Synthetic polypeptide
GTSESATPESGPGSPAGSPTSTEEGSPAGSPTSTEE

SEQ ID NO: 310 - DNA, 108 bp, synthetic construct
  misc_feature 1..108: note = Description of Artificial Sequence: Synthetic polynucleotide
  source 1..108: mol_type = other DNA
ggtacttctgaaagcgctactcctgagtccggcccaggtagcccggctggctctccgacttccaccgaggaaggtagcccggctggctctccaacttctactgaagaa

SEQ ID NO: 311 - protein, 36 aa, synthetic construct
  REGION 1..36: note = Description of Artificial Sequence: Synthetic polypeptide
GTSTEPSEGSAPGTSESATPESGPGTSTEPSEGSAP

SEQ ID NO: 312 - DNA, 108 bp, synthetic construct
  misc_feature 1..108: note = Description of Artificial Sequence: Synthetic polynucleotide
  source 1..108: mol_type = other DNA
ggtacctctactgaaccttctgagggcagcgctccaggtacttctgaaagcgctaccccggagtccggtccaggtacttctactgaaccgtccgaaggtagcgcacca

SEQ ID NO: 313 - protein, 36 aa, synthetic construct
  REGION 1..36: note = Description of Artificial Sequence: Synthetic polypeptide
GSPAGSPTSTEEGTSTEPSEGSAPGSEPATSGSETP

SEQ ID NO: 314 - DNA, 108 bp, synthetic construct
  misc_feature 1..108: note = Description of Artificial Sequence: Synthetic polynucleotide
  source 1..108: mol_type = other DNA
ggtagcccggcaggctctccgacttccaccgaggaaggtacctctactgaaccttctgagggtagcgctccaggtagcgaaccggcaacctctggctctgaaacccca

SEQ ID NO: 315 - protein, 36 aa, synthetic construct
  REGION 1..36: note = Description of Artificial Sequence: Synthetic polypeptide
GSPAGSPTSTEEGTSTEPSEGSAPGTSTEPSEGSAP

SEQ ID NO: 316 - DNA, 108 bp, synthetic construct
  misc_feature 1..108: note = Description of Artificial Sequence: Synthetic polynucleotide
  source 1..108: mol_type = other DNA
ggtagcccagcaggctctccgacttccactgaggaaggtacttctactgaaccttccgaaggcagcgcaccaggtacctctactgaaccttctgagggcagcgctcca

SEQ ID NO: 317 - protein, 36 aa, synthetic construct; identical to SEQ ID NO: 287
  REGION 1..36: note = Description of Artificial Sequence: Synthetic polypeptide

SEQ ID NO: 318 - DNA, 108 bp, synthetic construct
  misc_feature 1..108: note = Description of Artificial Sequence: Synthetic polynucleotide
  source 1..108: mol_type = other DNA
ggtagcgaacctgctacctccggttctgaaaccccaggtacctctgaaagcgcaactccggagtctggtccaggtagccctgcaggttctcctacctccactgaggaa

SEQ ID NO: 319 - protein, 36 aa, synthetic construct; identical to SEQ ID NO: 297
  REGION 1..36: note = Description of Artificial Sequence: Synthetic polypeptide

SEQ ID NO: 320 - DNA, 108 bp, synthetic construct
  misc_feature 1..108: note = Description of Artificial Sequence: Synthetic polynucleotide
  source 1..108: mol_type = other DNA
ggtacctctgaaagcgctactccggagtctggcccaggtacctctactgaaccgtctgagggtagcgctccaggtacttctactgaaccgtccgaaggtagcgcacca

SEQ ID NO: 321 - protein, 36 aa, synthetic construct; identical to SEQ ID NO: 315
  REGION 1..36: note = Description of Artificial Sequence: Synthetic polypeptide

SEQ ID NO: 322 - DNA, 108 bp, synthetic construct
  misc_feature 1..108: note = Description of Artificial Sequence: Synthetic polynucleotide
  source 1..108: mol_type = other DNA
ggtagcccggctggttctccgacttccaccgaggaaggtacctctactgaaccttctgagggtagcgctccaggtacctctactgaaccttccgaaggcagcgctcca

SEQ ID NO: 323 - protein, 36 aa, synthetic construct; identical to SEQ ID NO: 281
  REGION 1..36: note = Description of Artificial Sequence: Synthetic polypeptide

SEQ ID NO: 324 - DNA, 108 bp, synthetic construct
  misc_feature 1..108: note = Description of Artificial Sequence: Synthetic polynucleotide
  source 1..108: mol_type = other DNA
ggtacttctaccgaaccgtccgagggcagcgctccaggtacttctactgaaccttctgaaggcagcgctccaggtacttctactgaaccttccgaaggtagcgcacca

SEQ ID NO: 325 - protein, 36 aa, synthetic construct
  REGION 1..36: note = Description of Artificial Sequence: Synthetic polypeptide
GSEPATSGSETPGTSESATPESGPGTSTEPSEGSAP

SEQ ID NO: 326 - DNA, 108 bp, synthetic construct
  misc_feature 1..108: note = Description of Artificial Sequence: Synthetic polynucleotide
  source 1..108: mol_type = other DNA
ggtagcgaacctgcaacctctggctctgaaaccccaggtacctctgaaagcgctactcctgaatctggcccaggtacttctactgaaccgtccgagggcagcgcacca

SEQ ID NO: 327 - protein, 36 aa, synthetic construct; identical to SEQ ID NO: 299
  REGION 1..36: note = Description of Artificial Sequence: Synthetic polypeptide

SEQ ID NO: 328 - DNA, 108 bp, synthetic construct
  misc_feature 1..108: note = Description of Artificial Sequence: Synthetic polynucleotide
  source 1..108: mol_type = other DNA
ggtacttctaccgaaccgtccgagggtagcgcaccaggtagcccagcaggttctcctacctccaccgaggaaggtacttctaccgaaccgtccgagggtagcgcacca

SEQ ID NO: 329 - protein, 36 aa, synthetic construct
  REGION 1..36: note = Description of Artificial Sequence: Synthetic polypeptide
GSEPATSGSETPGTSESATPESGPGSEPATSGSETP

SEQ ID NO: 330 - DNA, 108 bp, synthetic construct
  misc_feature 1..108: note = Description of Artificial Sequence: Synthetic polynucleotide
  source 1..108: mol_type = other DNA
ggtagcgaaccggcaacctccggctctgaaactccaggtacttctgaaagcgctactccggaatccggcccaggtagcgaaccggctacttccggctctgaaacccca

SEQ ID NO: 331 - protein, 36 aa, synthetic construct; identical to SEQ ID NO: 329
  REGION 1..36: note = Description of Artificial Sequence: Synthetic polypeptide

SEQ ID NO: 332 - DNA, 108 bp, synthetic construct
  misc_feature 1..108: note = Description of Artificial Sequence: Synthetic polynucleotide
  source 1..108: mol_type = other DNA
ggtagcgaaccggcaacttccggctctgaaaccccaggtacttctgaaagcgctactcctgagtctggcccaggtagcgaacctgctacctctggctctgaaacccca

SEQ ID NO: 333 - protein, 36 aa, synthetic construct
  REGION 1..36: note = Description of Artificial Sequence: Synthetic polypeptide
GSEPATSGSETPGSEPATSGSETPGTSTEPSEGSAP

SEQ ID NO: 334 - DNA, 108 bp, synthetic construct
  misc_feature 1..108: note = Description of Artificial Sequence: Synthetic polynucleotide
  source 1..108: mol_type = other DNA
ggtagcgaaccggcaacctctggctctgaaactccaggtagcgaacctgcaacctccggctctgaaaccccaggtacttctactgaaccttctgagggcagcgcacca

SEQ ID NO: 335 - protein, 36 aa, synthetic construct
  REGION 1..36: note = Description of Artificial Sequence: Synthetic polypeptide
GTSESATPESGPGSEPATSGSETPGSEPATSGSETP

SEQ ID NO: 336 - DNA, 108 bp, synthetic construct
  misc_feature 1..108: note = Description of Artificial Sequence: Synthetic polynucleotide
  source 1..108: mol_type = other DNA
ggtacttctgaaagcgctaccccggaatctggcccaggtagcgaaccggctacttctggttctgaaaccccaggtagcgaaccggctacctccggttctgaaactcca

SEQ ID NO: 337 - protein, 36 aa, synthetic construct
  REGION 1..36: note = Description of Artificial Sequence: Synthetic polypeptide
GTSTEPSEGSAPGTSTEPSEGSAPGTSESATPESGP

SEQ ID NO: 338 - DNA, 108 bp, synthetic construct
  misc_feature 1..108: note = Description of Artificial Sequence: Synthetic polynucleotide
  source 1..108: mol_type = other DNA
ggtacctctactgaaccttccgaaggcagcgctccaggtacctctaccgaaccgtccgagggcagcgcaccaggtacttctgaaagcgcaacccctgaatccggtcca

SEQ ID NO: 339 - protein, 36 aa, synthetic construct
  REGION 1..36: note = Description of Artificial Sequence: Synthetic polypeptide
GSEPATSGSETPGTSESATPESGPGTSESATPESGP

SEQ ID NO: 340 - DNA, 108 bp, synthetic construct
  misc_feature 1..108: note = Description of Artificial Sequence: Synthetic polynucleotide
  source 1..108: mol_type = other DNA
ggtagcgaaccggcaacctctggctctgaaaccccaggtacctctgaaagcgctactccggaatctggtccaggtacttctgaaagcgctactccggaatccggtcca

SEQ ID NO: 341 - protein, 36 aa, synthetic construct; identical to SEQ ID NO: 333
  REGION 1..36: note = Description of Artificial Sequence: Synthetic polypeptide

SEQ ID NO: 342 - DNA, 108 bp, synthetic construct
  misc_feature 1..108: note = Description of Artificial Sequence: Synthetic polynucleotide
  source 1..108: mol_type = other DNA
ggtagcgaacctgctacctccggctctgaaactccaggtagcgaaccggctacttccggttctgaaactccaggtacctctaccgaaccttccgaaggcagcgcacca

SEQ ID NO: 343 - protein, 36 aa, synthetic construct
  REGION 1..36: note = Description of Artificial Sequence: Synthetic polypeptide
GSEPATSGSETPGTSTEPSEGSAPGSEPATSGSETP

SEQ ID NO: 344 - DNA, 108 bp, synthetic construct
  misc_feature 1..108: note = Description of Artificial Sequence: Synthetic polynucleotide
  source 1..108: mol_type = other DNA
ggtagcgaacctgctacttctggttctgaaactccaggtacttctaccgaaccgtccgagggtagcgctccaggtagcgaacctgctacttctggttctgaaactcca

SEQ ID NO: 345 - protein, 36 aa, synthetic construct
  REGION 1..36: note = Description of Artificial Sequence: Synthetic polypeptide
GTSTEPSEGSAPGTSTEPSEGSAPGSEPATSGSETP

SEQ ID NO: 346 - DNA, 108 bp, synthetic construct
  misc_feature 1..108: note = Description of Artificial Sequence: Synthetic polynucleotide
  source 1..108: mol_type = other DNA
ggtacctctaccgaaccgtccgagggtagcgcaccaggtacctctactgaaccgtctgagggtagcgctccaggtagcgaaccggcaacctccggttctgaaactcca

SEQ ID NO: 347 - protein, 36 aa, synthetic construct; identical to SEQ ID NO: 305
  REGION 1..36: note = Description of Artificial Sequence: Synthetic polypeptide

SEQ ID NO: 348 - DNA, 108 bp, synthetic construct
  misc_feature 1..108: note = Description of Artificial Sequence: Synthetic polynucleotide
  source 1..108: mol_type = other DNA
ggtacttctactgaaccttccgaaggtagcgctccaggtagcgaacctgctacttctggttctgaaaccccaggtagcccggctggctctccgacctccaccgaggaa

SEQ ID NO: 349 - protein, 36 aa, synthetic construct; identical to SEQ ID NO: 301
  REGION 1..36: note = Description of Artificial Sequence: Synthetic polypeptide

SEQ ID NO: 350 - DNA, 108 bp, synthetic construct
  misc_feature 1..108: note = Description of Artificial Sequence: Synthetic polynucleotide
  source 1..108: mol_type = other DNA
ggtagcgaaccggctacttccggctctgagactccaggtagcccagctggttctccaacctctactgaggaaggtacttctgaaagcgctacccctgaatctggtcca

SEQ ID NO: 351 - protein, 36 aa, synthetic construct
  REGION 1..36: note = Description of Artificial Sequence: Synthetic polypeptide
GTSESATPESGPGSEPATSGSETPGTSESATPESGP

SEQ ID NO: 352 - DNA, 108 bp, synthetic construct
  misc_feature 1..108: note = Description of Artificial Sequence: Synthetic polynucleotide
  source 1..108: mol_type = other DNA
ggtacctctgaaagcgcaactcctgagtctggcccaggtagcgaacctgctacctccggctctgagactccaggtacctctgaaagcgcaaccccggaatctggtcca

SEQ ID NO: 353 - protein, 36 aa, synthetic construct
  REGION 1..36: note = Description of Artificial Sequence: Synthetic polypeptide
GTSTPESGSASPGTSPSGESSTAPGTSPSGESSTAP

SEQ ID NO: 354 - DNA, 108 bp, synthetic construct
  misc_feature 1..108: note = Description of Artificial Sequence: Synthetic polynucleotide
  source 1..108: mol_type = other DNA
ggtacttctactccggaaagcggttccgcatctccaggtacttctcctagcggtgaatcttctactgctccaggtacctctcctagcggcgaatcttctactgctcca

SEQ ID NO: 355 - protein, 36 aa, synthetic construct
  REGION 1..36: note = Description of Artificial Sequence: Synthetic polypeptide
GTSPSGESSTAPGSTSSTAESPGPGTSPSGESSTAP

SEQ ID NO: 356 - DNA, 108 bp, synthetic construct
  misc_feature 1..108: note = Description of Artificial Sequence: Synthetic polynucleotide
  source 1..108: mol_type = other DNA
ggtacttctccgagcggtgaatcttctaccgcaccaggttctactagctctaccgctgaatctccgggcccaggtacttctccgagcggtgaatcttctactgctcca

SEQ ID NO: 357 - protein, 36 aa, synthetic construct
  REGION 1..36: note = Description of Artificial Sequence: Synthetic polypeptide
GSTSSTAESPGPGTSPSGESSTAPGTSTPESGSASP

SEQ ID NO: 358 - DNA, 108 bp, synthetic construct
  misc_feature 1..108: note = Description of Artificial Sequence: Synthetic polynucleotide
  source 1..108: mol_type = other DNA
ggttccaccagctctactgctgaatctcctggtccaggtacctctcctagcggtgaatcttctactgctccaggtacttctactcctgaaagcggctctgcttctcca

SEQ ID NO: 359 - protein, 36 aa, synthetic construct
  REGION 1..36: note = Description of Artificial Sequence: Synthetic polypeptide
GSTSSTAESPGPGSTSSTAESPGPGTSPSGESSTAP

SEQ ID NO: 360 - DNA, 108 bp, synthetic construct
  misc_feature 1..108: note = Description of Artificial Sequence: Synthetic polynucleotide
  source 1..108: mol_type = other DNA
ggttctaccagctctactgcagaatctcctggcccaggttccaccagctctaccgcagaatctccgggtccaggtacttcccctagcggtgaatcttctaccgcacca

SEQ ID NO: 361 - protein, 36 aa, synthetic construct; identical to SEQ ID NO: 357
  REGION 1..36: note = Description of Artificial Sequence: Synthetic polypeptide

SEQ ID NO: 362 - DNA, 108 bp, synthetic construct
  misc_feature 1..108: note = Description of Artificial Sequence: Synthetic polynucleotide
  source 1..108: mol_type = other DNA
ggttctactagctctactgctgaatctcctggcccaggtacttctcctagcggtgaatcttctaccgctccaggtacctctactccggaaagcggttctgcatctcca

SEQ ID NO: 363 - protein, 36 aa, synthetic construct
  REGION 1..36: note = Description of Artificial Sequence: Synthetic polypeptide
GSTSSTAESPGPGTSTPESGSASPGSTSESPSGTAP

SEQ ID NO: 364 - DNA, 108 bp, synthetic construct
  misc_feature 1..108: note = Description of Artificial Sequence: Synthetic polynucleotide
  source 1..108: mol_type = other DNA
ggttctaccagctctaccgcagaatctcctggtccaggtacctctactccggaaagcggctctgcatctccaggttctactagcgaatctccttctggcactgcacca

SEQ ID NO: 365 - protein, 36 aa, synthetic construct
  REGION 1..36: note = Description of Artificial Sequence: Synthetic polypeptide
GSTSSTAESPGPGTSTPESGSASPGTSTPESGSASP

SEQ ID NO: 366 - DNA, 108 bp, synthetic construct
  misc_feature 1..108: note = Description of Artificial Sequence: Synthetic polynucleotide
  source 1..108: mol_type = other DNA
ggttctactagctctactgcagaatctcctggcccaggtacctctactccggaaagcggctctgcatctccaggtacttctacccctgaaagcggttctgcatctcca

SEQ ID NO: 367 - protein, 36 aa, synthetic construct
  REGION 1..36: note = Description of Artificial Sequence: Synthetic polypeptide
GSTSESPSGTAPGTSPSGESSTAPGSTSESPSGTAP

SEQ ID NO: 368 - DNA, 108 bp, synthetic construct
  misc_feature 1..108: note = Description of Artificial Sequence: Synthetic polynucleotide
  source 1..108: mol_type = other DNA
ggttctaccagcgaatctccttctggcaccgctccaggtacctctcctagcggcgaatcttctaccgctccaggttctactagcgaatctccttctggcactgcacca

SEQ ID NO: 369 - protein, 36 aa, synthetic construct; identical to SEQ ID NO: 359
  REGION 1..36: note = Description of Artificial Sequence: Synthetic polypeptide

SEQ ID NO: 370 - DNA, 108 bp, synthetic construct
  misc_feature 1..108: note = Description of Artificial Sequence: Synthetic polynucleotide
  source 1..108: mol_type = other DNA
ggttccaccagctctactgcagaatctccgggcccaggttctactagctctactgcagaatctccgggtccaggtacttctcctagcggcgaatcttctaccgctcca

SEQ ID NO: 371 - protein, 36 aa, synthetic construct; identical to SEQ ID NO: 363
  REGION 1..36: note = Description of Artificial Sequence: Synthetic polypeptide

SEQ ID NO: 372 - DNA, 108 bp, synthetic construct
  misc_feature 1..108: note = Description of Artificial Sequence: Synthetic polynucleotide
  source 1..108: mol_type = other DNA
ggttccactagctctactgcagaatctcctggcccaggtacctctacccctgaaagcggctctgcatctccaggttctaccagcgaatccccgtctggcaccgcacca

SEQ ID NO: 373 - protein, 36 aa, synthetic construct; identical to SEQ ID NO: 359
  REGION 1..36: note = Description of Artificial Sequence: Synthetic polypeptide

SEQ ID NO: 374 - DNA, 108 bp, synthetic construct
  misc_feature 1..108: note = Description of Artificial Sequence: Synthetic polynucleotide
  source 1..108: mol_type = other DNA
ggttctactagctctactgctgaatctccgggtccaggttctaccagctctactgctgaatctcctggtccaggtacctccccgagcggtgaatcttctactgcacca

SEQ ID NO: 375 - protein, 36 aa, synthetic construct
  REGION 1..36: note = Description of Artificial Sequence: Synthetic polypeptide
GSTSSTAESPGPGSTSESPSGTAPGSTSSTAESPGP

SEQ ID NO: 376 - DNA, 108 bp, synthetic construct
  misc_feature 1..108: note = Description of Artificial Sequence: Synthetic polynucleotide
  source 1..108: mol_type = other DNA
ggttctaccagctctaccgctgaatctcctggcccaggttctaccagcgaatccccgtctggcaccgcaccaggttctactagctctaccgctgaatctccgggtcca

SEQ ID NO: 377 - protein, 36 aa, synthetic construct
  REGION 1..36: note = Description of Artificial Sequence: Synthetic polypeptide
GSTSSTAESPGPGSTSSTAESPGPGSTSSTAESPGP

SEQ ID NO: 378 - DNA, 108 bp, synthetic construct
  misc_feature 1..108: note = Description of Artificial Sequence: Synthetic polynucleotide
  source 1..108: mol_type = other DNA
ggttctaccagctctaccgcagaatctcctggcccaggttccactagctctaccgctgaatctcctggtccaggttctactagctctaccgctgaatctcctggtcca

SEQ ID NO: 379 - protein, 36 aa, synthetic construct
  REGION 1..36: note = Description of Artificial Sequence: Synthetic polypeptide
GSTSESPSGTAPGSTSSTAESPGPGSTSSTAESPGP

SEQ ID NO: 380 - DNA, 108 bp, synthetic construct
  misc_feature 1..108: note = Description of Artificial Sequence: Synthetic polynucleotide
  source 1..108: mol_type = other DNA
ggttctactagcgaatccccttctggtactgctccaggttccactagctctaccgctgaatctcctggcccaggttccactagctctactgcagaatctcctggtcca

SEQ ID NO: 381 - protein, 36 aa, synthetic construct
  REGION 1..36: note = Description of Artificial Sequence: Synthetic polypeptide
GSTSESPSGTAPGSTSESPSGTAPGSTSESPSGTAP

SEQ ID NO: 382 - DNA, 108 bp, synthetic construct
  misc_feature 1..108: note = Description of Artificial Sequence: Synthetic polynucleotide
  source 1..108: mol_type = other DNA
ggttctactagcgaatctccttctggtaccgctccaggttctaccagcgaatccccgtctggtactgctccaggttctaccagcgaatctccttctggtactgcacca

SEQ ID NO: 383 - protein, 36 aa, synthetic construct; identical to SEQ ID NO: 377
  REGION 1..36: note = Description of Artificial Sequence: Synthetic polypeptide

SEQ ID NO: 384 - DNA, 108 bp, synthetic construct
  misc_feature 1..108: note = Description of Artificial Sequence: Synthetic polynucleotide
  source 1..108: mol_type = other DNA
ggttccaccagctctactgctgaatctcctggcccaggttctaccagctctactgctgaatctccgggcccaggttccaccagctctaccgctgaatctccgggtcca

SEQ ID NO: 385 - protein, 36 aa, synthetic construct; identical to SEQ ID NO: 359
  REGION 1..36: note = Description of Artificial Sequence: Synthetic polypeptide

SEQ ID NO: 386 - DNA, 108 bp, synthetic construct
  misc_feature 1..108: note = Description of Artificial Sequence: Synthetic polynucleotide
  source 1..108: mol_type = other DNA
ggttccactagctctaccgcagaatctcctggtccaggttctactagctctactgctgaatctccgggtccaggtacctcccctagcggcgaatcttctaccgctcca

SEQ ID NO: 387 - protein, 36 aa, synthetic construct
  REGION 1..36: note = Description of Artificial Sequence: Synthetic polypeptide
GSSPSASTGTGPGSSTPSGATGSPGSSTPSGATGSP

SEQ ID NO: 388 - DNA, 108 bp, synthetic construct
  misc_feature 1..108: note = Description of Artificial Sequence: Synthetic polynucleotide
  source 1..108: mol_type = other DNA
ggttctagcccttctgcttccaccggtaccggcccaggtagctctactccgtctggtgcaactggctctccaggtagctctactccgtctggtgcaaccggctcccca

SEQ ID NO: 389 - protein, 36 aa, synthetic construct
  REGION 1..36: note = Description of Artificial Sequence: Synthetic polypeptide
GTSPSGESSTAPGTSTPESGSASPGSTSSTAESPGP

SEQ ID NO: 390 - DNA, 108 bp, synthetic construct
  misc_feature 1..108: note = Description of Artificial Sequence: Synthetic polynucleotide
  source 1..108: mol_type = other DNA
ggtacttcccctagcggtgaatcttctactgctccaggtacctctactccggaaagcggctccgcatctccaggttctactagctctactgctgaatctcctggtcca

SEQ ID NO: 391 - protein, 36 aa, synthetic construct
  REGION 1..36: note = Description of Artificial Sequence: Synthetic polypeptide
GSTSSTAESPGPGSTSSTAESPGPGTSTPESGSASP

SEQ ID NO: 392 - DNA, 108 bp, synthetic construct
  misc_feature 1..108: note = Description of Artificial Sequence: Synthetic polynucleotide
  source 1..108: mol_type = other DNA
ggttctactagctctaccgctgaatctccgggtccaggttctaccagctctactgcagaatctcctggcccaggtacttctactccggaaagcggttccgcttctcca

SEQ ID NO: 393 - protein, 36 aa, synthetic construct
  REGION 1..36: note = Description of Artificial Sequence: Synthetic polypeptide
GTSPSGESSTAPGSTSSTAESPGPGTSTPESGSASP

SEQ ID NO: 394 - DNA, 108 bp, synthetic construct
  misc_feature 1..108: note = Description of Artificial Sequence: Synthetic polynucleotide
  source 1..108: mol_type = other DNA
ggtacttctcctagcggtgaatcttctaccgctccaggttctaccagctctactgctgaatctcctggcccaggtacttctaccccggaaagcggctccgcttctcca

SEQ ID NO: 395 - protein, 36 aa, synthetic construct; identical to SEQ ID NO: 379
  REGION 1..36: note = Description of Artificial Sequence: Synthetic polypeptide

SEQ ID NO: 396 - DNA, 108 bp, synthetic construct
  misc_feature 1..108: note = Description of Artificial Sequence: Synthetic polynucleotide
  source 1..108: mol_type = other DNA
ggttctactagcgaatccccttctggtactgcaccaggttctaccagctctactgctgaatctccgggcccaggttccaccagctctaccgcagaatctcctggtcca

SEQ ID NO: 397 - protein, 36 aa, synthetic construct; identical to SEQ ID NO: 375
  REGION 1..36: note = Description of Artificial Sequence: Synthetic polypeptide

SEQ ID NO: 398 - DNA, 108 bp, synthetic construct
  misc_feature 1..108: note = Description of Artificial Sequence: Synthetic polynucleotide
  source 1..108: mol_type = other DNA
ggttccaccagctctaccgctgaatctccgggcccaggttctaccagcgaatccccttctggcactgcaccaggttctactagctctaccgcagaatctccgggccca

SEQ ID NO: 399 - protein, 36 aa, synthetic construct; identical to SEQ ID NO: 357
  REGION 1..36: note = Description of Artificial Sequence: Synthetic polypeptide

SEQ ID NO: 400 - DNA, 108 bp, synthetic construct
  misc_feature 1..108: note = Description of Artificial Sequence: Synthetic polynucleotide
  source 1..108: mol_type = other DNA
ggttctaccagctctactgctgaatctccgggtccaggtacttccccgagcggtgaatcttctactgcaccaggtacttctactccggaaagcggttccgcttctcca

SEQ ID NO: 401 - protein, 36 aa, synthetic construct
  REGION 1..36: note = Description of Artificial Sequence: Synthetic polypeptide
GSTSESPSGTAPGSTSESPSGTAPGTSPSGESSTAP

SEQ ID NO: 402 - DNA, 108 bp, synthetic construct
  misc_feature 1..108: note = Description of Artificial Sequence: Synthetic polynucleotide
  source 1..108: mol_type = other DNA
ggttctaccagcgaatctccttctggcaccgctccaggttctactagcgaatccccgtctggtaccgcaccaggtacttctcctagcggcgaatcttctaccgcacca

SEQ ID NO: 403 - protein, 36 aa, synthetic construct
  REGION 1..36: note = Description of Artificial Sequence: Synthetic polypeptide
GSTSESPSGTAPGSTSESPSGTAPGTSTPESGSASP

SEQ ID NO: 404 - DNA, 108 bp, synthetic construct
  misc_feature 1..108: note = Description of Artificial Sequence: Synthetic polynucleotide
  source 1..108: mol_type = other DNA
ggttctaccagcgaatccccttctggtactgctccaggttctaccagcgaatccccttctggcaccgcaccaggtacttctacccctgaaagcggctccgcttctcca

SEQ ID NO: 405 - protein, 36 aa, synthetic construct
  REGION 1..36: note = Description of Artificial Sequence: Synthetic polypeptide
GTSTPESGSASPGSTSSTAESPGPGSTSSTAESPGP

SEQ ID NO: 406 - DNA, 108 bp, synthetic construct
  misc_feature 1..108: note = Description of Artificial Sequence: Synthetic polynucleotide
  source 1..108: mol_type = other DNA
ggtacctctactcctgaaagcggttctgcatctccaggttccactagctctaccgcagaatctccgggcccaggttctactagctctactgctgaatctcctggccca

SEQ ID NO: 407 - protein, 36 aa, synthetic construct; identical to SEQ ID NO: 401
  REGION 1..36: note = Description of Artificial Sequence: Synthetic polypeptide

SEQ ID NO: 408 - DNA, 108 bp, synthetic construct
  misc_feature 1..108: note = Description of Artificial Sequence: Synthetic polynucleotide
  source 1..108: mol_type = other DNA
ggttctaccagcgaatccccttctggcactgcaccaggttctactagcgaatccccttctggtaccgcaccaggtacttctccgagcggcgaatcttctactgctcca

SEQ ID NO: 409 - protein, 36 aa, synthetic construct
  REGION 1..36: note = Description of Artificial Sequence: Synthetic polypeptide
GSTSSTAESPGPGSTSSTAESPGPGSTSESPSGTAP

SEQ ID NO: 410 - DNA, 108 bp, synthetic construct
  misc_feature 1..108: note = Description of Artificial Sequence: Synthetic polynucleotide
  source 1..108: mol_type = other DNA
ggttctactagctctaccgctgaatctcctggcccaggttccactagctctaccgcagaatctccgggcccaggttctactagcgaatccccttctggtaccgctcca

SEQ ID NO: 411 - protein, 36 aa, synthetic construct; identical to SEQ ID NO: 391
  REGION 1..36: note = Description of Artificial Sequence: Synthetic polypeptide

SEQ ID NO: 412 - DNA, 108 bp, synthetic construct
  misc_feature 1..108: note = Description of Artificial Sequence: Synthetic polynucleotide
  source 1..108: mol_type = other DNA
ggttccaccagctctactgcagaatctcctggcccaggttctactagctctaccgcagaatctcctggtccaggtacctctactcctgaaagcggttccgcatctcca

SEQ ID NO: 413 - protein, 36 aa, synthetic construct; identical to SEQ ID NO: 409
  REGION 1..36: note = Description of Artificial Sequence: Synthetic polypeptide

SEQ ID NO: 414 - DNA, 108 bp, synthetic construct
  misc_feature 1..108: note = Description of Artificial Sequence: Synthetic polynucleotide
  source 1..108: mol_type = other DNA
ggttctactagctctactgctgaatctccgggcccaggttctactagctctaccgctgaatctccgggtccaggttctactagcgaatctccttctggtaccgctcca

SEQ ID NO: 415 - protein, 36 aa, synthetic construct
  REGION 1..36: note = Description of Artificial Sequence: Synthetic polypeptide
GTSPSGESSTAPGSTSESPSGTAPGSTSSTAESPGP

SEQ ID NO: 416 - DNA, 108 bp, synthetic construct
  misc_feature 1..108: note = Description of Artificial Sequence: Synthetic polynucleotide
  source 1..108: mol_type = other DNA
ggtacctccccgagcggtgaatcttctactgcaccaggttctactagcgaatccccttctggtactgctccaggttccaccagctctactgcagaatctccgggtcca

SEQ ID NO: 417 - protein, 36 aa, synthetic construct
  REGION 1..36: note = Description of Artificial Sequence: Synthetic polypeptide
GSTSESPSGTAPGTSPSGESSTAPGSTSSTAESPGP

SEQ ID NO: 418 - DNA, 108 bp, synthetic construct
  misc_feature 1..108: note = Description of Artificial Sequence: Synthetic polynucleotide
  source 1..108: mol_type = other DNA
ggttctactagcgaatccccgtctggtactgctccaggtacttcccctagcggtgaatcttctactgctccaggttctaccagctctaccgcagaatctccgggtcca

SEQ ID NO: 419 - protein, 36 aa, synthetic construct
  REGION 1..36: note = Description of Artificial Sequence: Synthetic polypeptide
GSTSSTAESPGPGSTSESPSGTAPGTSPSGESSTAP

SEQ ID NO: 420 - DNA, 108 bp, synthetic construct
  misc_feature 1..108: note = Description of Artificial Sequence: Synthetic polynucleotide
  source 1..108: mol_type = other DNA
ggttctaccagctctaccgctgaatctcctggcccaggttctactagcgaatctccgtctggcaccgcaccaggtacttcccctagcggtgaatcttctactgcacca

SEQ ID NO: 421 - protein, 36 aa, synthetic construct; identical to SEQ ID NO: 403
  REGION 1..36: note = Description of Artificial Sequence: Synthetic polypeptide

SEQ ID NO: 422 - DNA, 108 bp, synthetic construct
  misc_feature 1..108: note = Description of Artificial Sequence: Synthetic polynucleotide
  source 1..108: mol_type = other DNA
ggttctactagcgaatctccttctggcactgcaccaggttctaccagcgaatctccgtctggcactgcaccaggtacctctacccctgaaagcggttccgcttctcca

SEQ ID NO: 423 - protein, 36 aa, synthetic construct
  REGION 1..36: note = Description of Artificial Sequence: Synthetic polypeptide
GTSTPESGSASPGSTSESPSGTAPGSTSSTAESPGP

SEQ ID NO: 424 - DNA, 108 bp, synthetic construct
  misc_feature 1..108: note = Description of Artificial Sequence: Synthetic polynucleotide
  source 1..108: mol_type = other DNA
ggtacctctactccggaaagcggttccgcatctccaggttctaccagcgaatccccgtctggcaccgcaccaggttctactagctctactgctgaatctccgggccca

SEQ ID NO: 425 - protein, 36 aa, synthetic construct
  REGION 1..36: note = Description of Artificial Sequence: Synthetic polypeptide
GSTSSTAESPGPGTSPSGESSTAPGTSPSGESSTAP

SEQ ID NO: 426 - DNA, 108 bp, synthetic construct
  misc_feature 1..108: note = Description of Artificial Sequence: Synthetic polynucleotide
  source 1..108: mol_type = other DNA
ggttctactagctctactgcagaatctccgggcccaggtacctctcctagcggtgaatcttctaccgctccaggtacttctccgagcggtgaatcttctaccgctcca

SEQ ID NO: 427 - protein, 36 aa, synthetic construct
  REGION 1..36: note = Description of Artificial Sequence: Synthetic polypeptide
GTSPSGESSTAPGTSPSGESSTAPGTSPSGESSTAP

SEQ ID NO: 428 - DNA, 108 bp, synthetic construct
  misc_feature 1..108: note = Description of Artificial Sequence: Synthetic polynucleotide
  source 1..108: mol_type = other DNA
ggtacctcccctagcggcgaatcttctactgctccaggtacctctcctagcggcgaatcttctaccgctccaggtacctcccctagcggtgaatcttctaccgcacca

SEQ ID NO: 429 - protein, 36 aa, synthetic construct; identical to SEQ ID NO: 363
  REGION 1..36: note = Description of Artificial Sequence: Synthetic polypeptide

SEQ ID NO: 430 - DNA, 108 bp, synthetic construct
  misc_feature 1..108: note = Description of Artificial Sequence: Synthetic polynucleotide
  source 1..108: mol_type = other DNA
ggttccactagctctactgctgaatctcctggcccaggtacttctactccggaaagcggttccgcttctccaggttctactagcgaatctccgtctggcaccgcacca

SEQ ID NO: 431 - protein, 36 aa, synthetic construct
  REGION 1..36: note = Description of Artificial Sequence: Synthetic polypeptide
GSTSESPSGTAPGTSPSGESSTAPGTSPSGESSTAP

SEQ ID NO: 432 - DNA, 108 bp, synthetic construct
  misc_feature 1..108: note = Description of Artificial Sequence: Synthetic polynucleotide
  source 1..108: mol_type = other DNA
ggttctactagcgaatctccgtctggcactgctccaggtacttctcctagcggtgaatcttctaccgctccaggtacttcccctagcggcgaatcttctaccgctcca

SEQ ID NO: 433 - protein, 36 aa, synthetic construct
  REGION 1..36: note = Description of Artificial Sequence: Synthetic polypeptide
GSTSESPSGTAPGTSTPESGSASPGSTSSTAESPGP

SEQ ID NO: 434 - DNA, 108 bp, synthetic construct
  misc_feature 1..108: note = Description of Artificial Sequence: Synthetic polynucleotide
  source 1..108: mol_type = other DNA
ggttctactagcgaatctccttctggtaccgctccaggtacttctacccctgaaagcggctccgcttctccaggttccactagctctaccgctgaatctccgggtcca

SEQ ID NO: 435 - protein, 36 aa, synthetic construct; identical to SEQ ID NO: 409
  REGION 1..36: note = Description of Artificial Sequence: Synthetic polypeptide

SEQ ID NO: 436 - DNA, 108 bp, synthetic construct
  misc_feature 1..108: note = Description of Artificial Sequence: Synthetic polynucleotide
  source 1..108: mol_type = other DNA
ggttccactagctctactgctgaatctcctggcccaggttctaccagctctaccgctgaatctcctggcccaggttctaccagcgaatctccgtctggcaccgcacca

SEQ ID NO: 437 - protein, 36 aa, synthetic construct
  REGION 1..36: note = Description of Artificial Sequence: Synthetic polypeptide
GSTSESPSGTAPGTSTPESGSASPGTSTPESGSASP

SEQ ID NO: 438 - DNA, 108 bp, synthetic construct
  misc_feature 1..108: note = Description of Artificial Sequence: Synthetic polynucleotide
  source 1..108: mol_type = other DNA
ggttctactagcgaatccccgtctggtaccgcaccaggtacttctaccccggaaagcggctctgcttctccaggtacttctaccccggaaagcggctccgcatctcca

SEQ ID NO: 439 - protein, 36 aa, synthetic construct; identical to SEQ ID NO: 437
  REGION 1..36: note = Description of Artificial Sequence: Synthetic polypeptide

SEQ ID NO: 440 - DNA, 108 bp, synthetic construct
  misc_feature 1..108: note = Description of Artificial Sequence: Synthetic polynucleotide
  source 1..108: mol_type = other DNA
ggttctactagcgaatccccgtctggtactgctccaggtacttctactcctgaaagcggttccgcttctccaggtacctctactccggaaagcggttctgcatctcca

SEQ ID NO: 441 - protein, 36 aa, synthetic construct
  REGION 1..36: note = Description of Artificial Sequence: Synthetic polypeptide
GASPGTSSTGSPGTPGSGTASSSPGSSTPSGATGSP

SEQ ID NO: 442 - DNA, 108 bp, synthetic construct
  misc_feature 1..108: note = Description of Artificial Sequence: Synthetic polynucleotide
  source 1..108: mol_type = other DNA
ggtgcatccccgggcactagctctaccggttctccaggtactcctggtagcggtactgcttcttcttctccaggtagctctactccttctggtgctactggttctcca

SEQ ID NO: 443 - protein, 36 aa, synthetic construct
  REGION 1..36: note = Description of Artificial Sequence: Synthetic polypeptide
GSSTPSGATGSPGSSPSASTGTGPGSSTPSGATGSP

SEQ ID NO: 444 - DNA, 108 bp, synthetic construct
  misc_feature 1..108: note = Description of Artificial Sequence: Synthetic polynucleotide
  source 1..108: mol_type = other DNA
ggtagctctaccccttctggtgctaccggctctccaggttctagcccgtctgcttctaccggtaccggtccaggtagctctaccccttctggtgctactggttctcca

SEQ ID NO: 445 - protein, 36 aa, synthetic construct
  REGION 1..36: note = Description of Artificial Sequence: Synthetic polypeptide
GASPGTSSTGSPGSSPSASTGTGPGSSTPSGATGSP

SEQ ID NO: 446 - DNA, 108 bp, synthetic construct
  misc_feature 1..108: note = Description of Artificial Sequence: Synthetic polynucleotide
  source 1..108: mol_type = other DNA
ggtgcatctccgggtactagctctaccggttctccaggttctagcccttctgcttccactggtaccggcccaggtagctctaccccgtctggtgctactggttcccca

SEQ ID NO: 447 - protein, 36 aa, synthetic construct
  REGION 1..36: note = Description of Artificial Sequence: Synthetic polypeptide
GTPGSGTASSSPGSSTPSGATGSPGASPGTSSTGSP

SEQ ID NO: 448 - DNA, 108 bp, synthetic construct
  misc_feature 1..108: note = Description of Artificial Sequence: Synthetic polynucleotide
  source 1..108: mol_type = other DNA
ggtactccgggcagcggtactgcttcttcctctccaggtagctctaccccttctggtgcaactggttccccaggtgcatcccctggtactagctctaccggttctcca

SEQ ID NO: 449 - protein, 36 aa, synthetic construct
  REGION 1..36: note = Description of Artificial Sequence: Synthetic polypeptide
GTPGSGTASSSPGASPGTSSTGSPGSRPSASTGTGP

SEQ ID NO: 450 - DNA, 108 bp, synthetic construct
  misc_feature 1..108: note = Description of Artificial Sequence: Synthetic polynucleotide
  source 1..108: mol_type = other DNA
ggtacccctggcagcggtactgcttcttcttctccaggtgcttcccctggtaccagctctaccggttctccaggttctagaccttctgcatccaccggtactggtcca

SEQ ID NO: 451 - protein, 36 aa, synthetic construct
  REGION 1..36: note = Description of Artificial Sequence: Synthetic polypeptide
GASPGTSSTGSPGSSTPSGATGSPGASPGTSSTGSP

SEQ ID NO: 452 - DNA, 108 bp, synthetic construct
  misc_feature 1..108: note = Description of Artificial Sequence: Synthetic polynucleotide
  source 1..108: mol_type = other DNA
ggtgcatctcctggtaccagctctaccggttctccaggtagctctactccttctggtgctactggctctccaggtgcttccccgggtaccagctctaccggttctcca

SEQ ID NO: 453 - protein, 36 aa, synthetic construct
  REGION 1..36: note = Description of Artificial Sequence: Synthetic polypeptide
GTPGSGTASSSPGSSTPSGATGSPGSSTPSGATGSP

SEQ ID NO: 454 - DNA, 108 bp, synthetic construct
  misc_feature 1..108: note = Description of Artificial Sequence: Synthetic polynucleotide
  source 1..108: mol_type = other DNA
ggtaccccgggcagcggtaccgcatcttcctctccaggtagctctaccccgtctggtgctaccggttccccaggtagctctaccccgtctggtgcaaccggctcccca

SEQ ID NO: 455 - protein, 36 aa, synthetic construct
  REGION 1..36: note = Description of Artificial Sequence: Synthetic polypeptide
GASPGTSSTGSPGASPGTSSTGSPGASPGTSSTGSP

SEQ ID NO: 456 - DNA, 108 bp, synthetic construct
  misc_feature 1..108: note = Description of Artificial Sequence: Synthetic polynucleotide
  source 1..108: mol_type = other DNA
ggtgcatctccgggcactagctctactggttctccaggtgcatcccctggcactagctctactggttctccaggtgcttctcctggtaccagctctactggttctcca

SEQ ID NO: 457 - protein, 36 aa, synthetic construct
  REGION 1..36: note = Description of Artificial Sequence: Synthetic polypeptide
GSSTPSGATGSPGSSPSASTGTGPGASPGTSSTGSP

SEQ ID NO: 458 - DNA, 108 bp, synthetic construct
  misc_feature 1..108: note = Description of Artificial Sequence: Synthetic polynucleotide
  source 1..108: mol_type = other DNA
ggtagctctactccgtctggtgcaaccggctccccaggttctagcccgtctgcttccactggtactggcccaggtgcttccccgggcaccagctctactggttctcca

SEQ ID NO: 459 - protein, 36 aa, synthetic construct
  REGION 1..36: note = Description of Artificial Sequence: Synthetic polypeptide
GSSTPSGATGSPGSSTPSGATGSPGTPGSGTASSSP

SEQ ID NO: 460 - DNA, 108 bp, synthetic construct
  misc_feature 1..108: note = Description of Artificial Sequence: Synthetic polynucleotide
  source 1..108: mol_type = other DNA
ggtagctctactccttctggtgctaccggttccccaggtagctctactccttctggtgctactggttccccaggtactccgggcagcggtactgcttcttcctctcca

SEQ ID NO: 461 - protein, 36 aa, synthetic construct
  REGION 1..36: note = Description of Artificial Sequence: Synthetic polypeptide
GSSTPSGATGSPGSSTPSGATGSPGASPGTSSTGSP

SEQ ID NO: 462 - DNA, 108 bp, synthetic construct
  misc_feature 1..108: note = Description of Artificial Sequence: Synthetic polynucleotide
  source 1..108: mol_type = other DNA
ggtagctctactccgtctggtgcaaccggttccccaggtagctctactccttctggtgctactggctccccaggtgcatcccctggcaccagctctaccggttctcca

SEQ ID NO: 463 - protein, 36 aa, synthetic construct
  REGION 1..36: note = Description of Artificial Sequence: Synthetic polypeptide
GTPGSGTASSSPGSSPSASTGTGPGSSTPSGATGSP

SEQ ID NO: 464 - DNA, 108 bp, synthetic construct
  misc_feature 1..108: note = Description of Artificial Sequence: Synthetic polynucleotide
  source 1..108: mol_type = other DNA
ggtactcctggtagcggtaccgcatcttcctctccaggttctagcccttctgcatctaccggtaccggtccaggtagctctactccttctggtgctactggctctcca

SEQ ID NO: 465 - protein, 36 aa, synthetic construct
  REGION 1..36: note = Description of Artificial Sequence: Synthetic polypeptide
GASPGTSSTGSPGSSPSASTGTGPGTPGSGTASSSP

SEQ ID NO: 466 - DNA, 108 bp, synthetic construct
  misc_feature 1..108: note = Description of Artificial Sequence: Synthetic polynucleotide
  source 1..108: mol_type = other DNA
ggtgcttccccgggcactagctctaccggttctccaggttctagcccttctgcatctactggtactggcccaggtactccgggcagcggtactgcttcttcctctcca

SEQ ID NO: 467 - protein, 36 aa, synthetic construct; identical to SEQ ID NO: 461
  REGION 1..36: note = Description of Artificial Sequence: Synthetic polypeptide

SEQ ID NO: 468 - DNA, 108 bp, synthetic construct
  misc_feature 1..108: note = Description of Artificial Sequence: Synthetic polynucleotide
  source 1..108: mol_type = other DNA
ggtagctctactccgtctggtgctaccggctctccaggtagctctaccccttctggtgcaaccggctccccaggtgcttctccgggtaccagctctactggttctcca

SEQ ID NO: 469 - protein, 36 aa, synthetic construct
  REGION 1..36: note = Description of Artificial Sequence: Synthetic polypeptide
GTPGSGTASSSPGSSTPSGATGSPGSSPSASTGTGP

SEQ ID NO: 470 - DNA, 108 bp, synthetic construct
  misc_feature 1..108: note = Description of Artificial Sequence: Synthetic polynucleotide
  source 1..108: mol_type = other DNA
ggtacccctggcagcggtaccgcttcttcctctccaggtagctctaccccgtctggtgctactggctctccaggttctagcccgtctgcatctaccggtaccggccca

SEQ ID NO: 471 - protein, 36 aa, synthetic construct
  REGION 1..36: note = Description of Artificial Sequence: Synthetic polypeptide
GSSTPSGATGSPGTPGSGTASSSPGTPGSGTASSSP

SEQ ID NO: 472 - DNA, 108 bp, synthetic construct
  misc_feature 1..108: note = Description of Artificial Sequence: Synthetic polynucleotide
  source 1..108: mol_type = other DNA
ggtagctctactccttctggtgcaaccggctccccaggtaccccgggcagcggtaccgcatcttcctctccaggtactccgggtagcggtactgcttcttcttctcca

SEQ ID NO: 473 - protein, 36 aa, synthetic construct; identical to SEQ ID NO: 447
  REGION 1..36: note = Description of Artificial Sequence: Synthetic polypeptide

SEQ ID NO: 474 - DNA, 108 bp, synthetic construct
  misc_feature 1..108: note = Description of Artificial Sequence: Synthetic polynucleotide
  source 1..108: mol_type = other DNA
ggtaccccgggtagcggtactgcttcttcctctccaggtagctctaccccttctggtgcaaccggctctccaggtgcttctccgggcaccagctctaccggttctcca

SEQ ID NO: 475 - protein, 36 aa, synthetic construct; identical to SEQ ID NO: 461
  REGION 1..36: note = Description of Artificial Sequence: Synthetic polypeptide

SEQ ID NO: 476 - DNA, 108 bp, synthetic construct
  misc_feature 1..108: note = Description of Artificial Sequence: Synthetic polynucleotide
  source 1..108: mol_type = other DNA
ggtagctctaccccgtctggtgctaccggctctccaggtagctctaccccgtctggtgcaaccggctccccaggtgcatccccgggtactagctctaccggttctcca

SEQ ID NO: 477 - protein, 36 aa, synthetic construct; identical to SEQ ID NO: 441
  REGION 1..36: note = Description of Artificial Sequence: Synthetic polypeptide

SEQ ID NO: 478 - DNA, 108 bp, synthetic construct
  misc_feature 1..108: note = Description of Artificial Sequence: Synthetic polynucleotide
  source 1..108: mol_type = other DNA
ggtgcttctccgggcaccagctctactggttctccaggtaccccgggcagcggtaccgcatcttcttctccaggtagctctactccttctggtgcaactggttctcca

SEQ ID NO: 479 - protein, 36 aa, synthetic construct
  REGION 1..36: note = Description of Artificial Sequence: Synthetic polypeptide
GSSPSASTGTGPGSSTPSGATGSPGTPGSGTASSSP

SEQ ID NO: 480 - DNA, 108 bp, synthetic construct
  misc_feature 1..108: note = Description of Artificial Sequence: Synthetic polynucleotide
  source 1..108: mol_type = other DNA
ggttctagcccgtctgcttccaccggtactggcccaggtagctctaccccgtctggtgcaactggttccccaggtacccctggtagcggtaccgcttcttcttctcca

SEQ ID NO: 481 - protein, 36 aa, synthetic construct; identical to SEQ ID NO: 445
  REGION 1..36: note = Description of Artificial Sequence: Synthetic polypeptide

SEQ ID NO: 482 - DNA, 108 bp, synthetic construct
  misc_feature 1..108: note = Description of Artificial Sequence: Synthetic polynucleotide
  source 1..108: mol_type = other DNA
ggtgcttctccgggcaccagctctactggttctccaggttctagcccttctgcatccaccggtaccggtccaggtagctctaccccttctggtgcaaccggctctcca

SEQ ID NO: 483 - protein, 36 aa, synthetic construct
  REGION 1..36: note = Description of Artificial Sequence: Synthetic polypeptide
GASPGTSSTGSPGSSTPSGATGSPGSSTPSGATGSP

SEQ ID NO: 484 - DNA, 108 bp, synthetic construct
  misc_feature 1..108: note = Description of Artificial Sequence: Synthetic polynucleotide
  source 1..108: mol_type = other DNA
ggtgcatccccgggcaccagctctaccggttctccaggtagctctaccccgtctggtgctaccggctctccaggtagctctaccccgtctggtgctactggctctcca

SEQ ID NO: 485 - protein, 36 aa, synthetic construct
  REGION 1..36: note = Description of Artificial Sequence: Synthetic polypeptide
GTPGSGTASSSPGSSTPSGATGSPGTPGSGTASSSP

SEQ ID NO: 486 - DNA, 108 bp, synthetic construct
  misc_feature 1..108: note = Description of Artificial Sequence: Synthetic polynucleotide
  source 1..108: mol_type = other DNA
ggtacccctggtagcggtactgcttcttcctctccaggtagctctactccgtctggtgctaccggttctccaggtaccccgggtagcggtaccgcatcttcttctcca

SEQ ID NO: 487 - protein, 36 aa, synthetic construct; identical to SEQ ID NO: 387
  REGION 1..36: note = Description of Artificial Sequence: Synthetic polypeptide

SEQ ID NO: 488 - DNA, 108 bp, synthetic construct
  misc_feature 1..108: note = Description of Artificial Sequence: Synthetic polynucleotide
  source 1..108: mol_type = other DNA
ggttctagcccttctgcttccaccggtactggcccaggtagctctaccccttctggtgctaccggctccccaggtagctctactccttctggtgcaactggctctcca

SEQ ID NO: 489 - protein, 36 aa, synthetic construct
  REGION 1..36: note = Description of Artificial Sequence: Synthetic polypeptide
GASPGTSSTGSPGSSPSASTGTGPGSSPSASTGTGP

SEQ ID NO: 490 - DNA, 108 bp, synthetic construct
  misc_feature 1..108: note = Description of Artificial Sequence: Synthetic polynucleotide
  source 1..108: mol_type = other DNA
ggtgcttctcctggcaccagctctactggttctccaggttctagcccttctgcttctaccggtactggtccaggttctagcccttctgcatccactggtactggtcca

SEQ ID NO: 491 - protein, 36 aa, synthetic construct
  REGION 1..36: note = Description of Artificial Sequence: Synthetic polypeptide
GTPGSGTASSSPGASPGTSSTGSPGASPGTSSTGSP

SEQ ID NO: 492 - DNA, 108 bp, synthetic construct
  misc_feature 1..108: note = Description of Artificial Sequence: Synthetic polynucleotide
  source 1..108: mol_type = other DNA
ggtactcctggcagcggtaccgcttcttcttctccaggtgcttctcctggtactagctctactggttctccaggtgcttctccgggcactagctctactggttctcca

SEQ ID NO: 493 - protein, 36 aa, synthetic construct
  REGION 1..36: note = Description of Artificial Sequence: Synthetic polypeptide
GSSTPSGATGSPGASPGTSSTGSPGSSTPSGATGSP

SEQ ID NO: 494 - DNA, 108 bp, synthetic construct
  misc_feature 1..108: note = Description of Artificial Sequence: Synthetic polynucleotide
  source 1..108: mol_type = other DNA
ggtagctctaccccgtctggtgctaccggttccccaggtgcttctcctggtactagctctaccggttctccaggtagctctaccccgtctggtgctactggctctcca

SEQ ID NO: 495 - protein, 36 aa, synthetic construct
  REGION 1..36: note = Description of Artificial Sequence: Synthetic polypeptide
GSSTPSGATGSPGTPGSGTASSSPGSSTPSGATGSP

SEQ ID NO: 496 - DNA, 108 bp, synthetic construct
  misc_feature 1..108: note = Description of Artificial Sequence: Synthetic polynucleotide
  source 1..108: mol_type = other DNA
ggtagctctaccccgtctggtgctactggttctccaggtactccgggcagcggtactgcttcttcctctccaggtagctctaccccttctggtgctactggctctcca

SEQ ID NO: 497 - protein, 36 aa, synthetic construct; identical to SEQ ID NO: 445
  REGION 1..36: note = Description of Artificial Sequence: Synthetic polypeptide

SEQ ID NO: 498 - DNA, 108 bp, synthetic construct
  misc_feature 1..108: note = Description of Artificial Sequence: Synthetic polynucleotide
  source 1..108: mol_type = other DNA
ggtgcatctcctggtaccagctctactggttctccaggttctagcccttctgcttctaccggtaccggtccaggtagctctactccttctggtgctaccggttctcca

SEQ ID NO: 499 - protein, 36 aa, synthetic construct
  REGION 1..36: note = Description of Artificial Sequence: Synthetic polypeptide
GSSTPSGATGSPGSSTPSGATGSPGSSTPSGATGSP

SEQ ID NO: 500 - DNA, 108 bp, synthetic construct
  misc_feature 1..108: note = Description of Artificial Sequence: Synthetic polynucleotide
  source 1..108: mol_type = other DNA
ggtagctctaccccgtctggtgctactggctctccaggtagctctactccttctggtgctactggttccccaggtagctctaccccgtctggtgcaactggctctcca

SEQ ID NO: 501 - protein, 36 aa, synthetic construct
  REGION 1..36: note = Description of Artificial Sequence: Synthetic polypeptide
GASPGTSSTGSPGTPGSGTASSSPGASPGTSSTGSP

SEQ ID NO: 502 - DNA, 108 bp, synthetic construct
  misc_feature 1..108: note = Description of Artificial Sequence: Synthetic polynucleotide
  source 1..108: mol_type = other DNA
ggtgcatccccgggtaccagctctaccggttctccaggtactcctggcagcggtactgcatcttcctctccaggtgcttctccgggcaccagctctactggttctcca

SEQ ID NO: 503 - protein, 36 aa, synthetic construct; identical to SEQ ID NO: 457
  REGION 1..36: note = Description of Artificial Sequence: Synthetic polypeptide

SEQ ID NO: 504 - DNA, 108 bp, synthetic construct
  misc_feature 1..108: note = Description of Artificial Sequence: Synthetic polynucleotide
  source 1..108: mol_type = other DNA
ggtagctctactccttctggtgcaactggttctccaggttctagcccgtctgcatccactggtaccggtccaggtgcttcccctggcaccagctctaccggttctcca

SEQ ID NO: 505 - protein, 36 aa, synthetic construct
  REGION 1..36: note = Description of Artificial Sequence: Synthetic polypeptide
GASPGTSSTGSPGSSTPSGATGSPGSSPSASTGTGP

SEQ ID NO: 506 - DNA, 108 bp, synthetic construct
  misc_feature 1..108: note = Description of Artificial Sequence: Synthetic polynucleotide
  source 1..108: mol_type = other DNA
ggtgcatctcctggtactagctctactggttctccaggtagctctactccgtctggtgcaaccggctctccaggttctagcccttctgcatctaccggtactggtcca

SEQ ID NO: 507 - protein, 36 aa, synthetic construct; identical to SEQ ID NO: 447
  REGION 1..36: note = Description of Artificial Sequence: Synthetic polypeptide

SEQ ID NO: 508 - DNA, 108 bp, synthetic construct
  misc_feature 1..108: note = Description of Artificial Sequence: Synthetic polynucleotide
  source 1..108: mol_type = other DNA
ggtactcctggcagcggtaccgcatcttcctctccaggtagctctactccgtctggtgcaactggttccccaggtgcttctccgggtaccagctctaccggttctcca

SEQ ID NO: 509 - protein, 36 aa, synthetic construct; identical to SEQ ID NO: 495
  REGION 1..36: note = Description of Artificial Sequence: Synthetic polypeptide

SEQ ID NO: 510 - DNA, 108 bp, synthetic construct
  misc_feature 1..108: note = Description of Artificial Sequence: Synthetic polynucleotide
  source 1..108: mol_type = other DNA
ggtagctctaccccgtctggtgcaaccggctccccaggtactcctggtagcggtaccgcttcttcttctccaggtagctctactccgtctggtgctaccggctcccca

SEQ ID NO: 511 - protein, 36 aa, synthetic construct
  REGION 1..36: note = Description of Artificial Sequence: Synthetic polypeptide
GSSPSASTGTGPGSSPSASTGTGPGASPGTSSTGSP

SEQ ID NO: 512 - DNA, 108 bp, synthetic construct
  misc_feature 1..108: note = Description of Artificial Sequence: Synthetic polynucleotide
  source 1..108: mol_type = other DNA
ggttctagcccttctgcatccaccggtaccggcccaggttctagcccgtctgcttctaccggtactggtccaggtgcttctccgggtactagctctactggttctcca

SEQ ID NO: 513 - protein, 36 aa, synthetic construct
  REGION 1..36: note = Description of Artificial Sequence: Synthetic polypeptide
GTPGSGTASSSPGSSTPSGATGSPGSNPSASTGTGP

SEQ ID NO: 514 - DNA, 108 bp, synthetic construct
  misc_feature 1..108: note = Description of Artificial Sequence: Synthetic polynucleotide
  source 1..108: mol_type = other DNA
ggtaccccgggtagcggtaccgcttcttcttctccaggtagctctactccgtctggtgctaccggctctccaggttctaacccttctgcatccaccggtaccggccca

SEQ ID NO: 515 - protein, 36 aa, synthetic construct
  REGION 1..36: note = Description of Artificial Sequence: Synthetic polypeptide
GSSPSASTGTGPGSSTPSGATGSPGASPGTSSTGSP

SEQ ID NO: 516 - DNA, 108 bp, synthetic construct
  misc_feature 1..108: note = Description of Artificial Sequence: Synthetic polynucleotide
  source 1..108: mol_type = other DNA
ggttctagcccttctgcatctactggtactggcccaggtagctctactccttctggtgctaccggctctccaggtgcttctccgggtactagctctaccggttctcca

SEQ ID NO: 517 - protein, 36 aa, synthetic construct
  REGION 1..36: note = Description of Artificial Sequence: Synthetic polypeptide
GSSTPSGATGSPGASPGTSSTGSPGTPGSGTASSSP

SEQ ID NO: 518 - DNA, 108 bp, synthetic construct
  misc_feature 1..108: note = Description of Artificial Sequence: Synthetic polynucleotide
  source 1..108: mol_type = other DNA
ggtagctctaccccttctggtgcaaccggctctccaggtgcatccccgggtaccagctctaccggttctccaggtactccgggtagcggtaccgcttcttcctctcca

SEQ ID NO: 519 - protein, 36 aa, synthetic construct; identical to SEQ ID NO: 499
  REGION 1..36: note = Description of Artificial Sequence: Synthetic polypeptide

SEQ ID NO: 520 - DNA, 108 bp, synthetic construct
  misc_feature 1..108: note = Description of Artificial Sequence: Synthetic polynucleotide
  source 1..108: mol_type = other DNA
ggtagctctactccgtctggtgcaaccggttccccaggtagctctaccccttctggtgcaaccggctccccaggtagctctaccccttctggtgcaactggctctcca

SEQ ID NO: 521 - protein, 36 aa, synthetic construct; identical to SEQ ID NO: 441
  REGION 1..36: note = Description of Artificial Sequence: Synthetic polypeptide

SEQ ID NO: 522 - DNA, 108 bp, synthetic construct
  misc_feature 1..108: note = Description of Artificial Sequence: Synthetic polynucleotide
  source 1..108: mol_type = other DNA
ggtgcttctcctggcactagctctaccggttctccaggtacccctggtagcggtaccgcatcttcctctccaggtagctctactccttctggtgctactggttcccca

SEQ ID NO: 523 - protein, 36 aa, synthetic construct
  REGION 1..36: note = Description of Artificial Sequence: Synthetic polypeptide
GSSTPSGATGSPGSSPSASTGTGPGSSPSASTGTGP

SEQ ID NO: 524 - DNA, 108 bp, synthetic construct
  misc_feature 1..108: note = Description of Artificial Sequence: Synthetic polynucleotide
  source 1..108: mol_type = other DNA
ggtagctctaccccgtctggtgctactggctccccaggttctagcccttctgcatccaccggtaccggtccaggttctagcccgtctgcatctactggtactggtcca

SEQ ID NO: 525 - protein, 36 aa, synthetic construct; identical to SEQ ID NO: 489
  REGION 1..36: note = Description of Artificial Sequence: Synthetic polypeptide

SEQ ID NO: 526 - DNA, 108 bp, synthetic construct
  misc_feature 1..108: note = Description of Artificial Sequence: Synthetic polynucleotide
  source 1..108: mol_type = other DNA
ggtgcttccccgggcaccagctctactggttctccaggttctagcccgtctgcttctactggtactggtccaggttctagcccttctgcttccactggtactggtcca

SEQ ID NO: 527 - protein, 36 aa, synthetic construct; identical to SEQ ID NO: 465
  REGION 1..36: note = Description of Artificial Sequence: Synthetic polypeptide

SEQ ID NO: 528 - DNA, 108 bp, synthetic construct
  misc_feature 1..108: note = Description of Artificial Sequence: Synthetic polynucleotide
  source 1..108: mol_type = other DNA
ggtgcttccccgggtaccagctctaccggttctccaggttctagcccttctgcttctaccggtaccggtccaggtacccctggcagcggtaccgcatcttcctctcca

SEQ ID NO: 529 - DNA, 432 bp, synthetic construct
  misc_feature 1..432: note = Description of Artificial Sequence: Synthetic polynucleotide
  source 1..432: mol_type = other DNA
ggtaccccgggcagcggtaccgcatcttcctctccaggtagctctaccccgtctggtgctaccggttccccaggtagctctaccccgtctggtgcaaccggctccccaggtagcccggctggctctcctacctctactgaggaaggtacttctgaaagcgctactcctgagtctggtccaggtacctctactgaaccgtccgaaggtagcgctccaggttctagcccttctgcatccaccggtaccggcccaggttctagcccgtctgcttctaccggtactggtccaggtgcttctccgggtactagctctactggttctccaggtacctctaccgaaccgtccgagggtagcgcaccaggtacctctactgaaccgtctgagggtagcgctccaggtagcgaaccggcaacctccggttctgaaactcca

SEQ ID NO: 530 - protein, 144 aa, synthetic construct
  REGION 1..144: note = Description of Artificial Sequence: Synthetic polypeptide
GTPGSGTASSSPGSSTPSGATGSPGSSTPSGATGSPGSPAGSPTSTEEGTSESATPESGPGTSTEPSEGSAPGSSPSASTGTGPGSSPSASTGTGPGASPGTSSTGSPGTSTEPSEGSAPGTSTEPSEGSAPGSEPATSGSETP

SEQ ID NO: 531 - DNA, 432 bp, synthetic construct
  misc_feature 1..432: note = Description of Artificial Sequence: Synthetic polynucleotide
  source 1..432: mol_type = other DNA
ggttctaccagcgaatccccttctggcactgcaccaggttctactagcgaatccccttctggtaccgcaccaggtacttctccgagcggcgaatcttctactgctccaggtacctctactgaaccttccgaaggcagcgctccaggtacctctaccgaaccgtccgagggcagcgcaccaggtacttctgaaagcgcaacccctgaatccggtccaggtgcatctcctggtaccagctctaccggttctccaggtagctctactccttctggtgctactggctctccaggtgcttccccgggtaccagctctaccggttctccaggttctactagcgaatctccttctggcactgcaccaggttctaccagcgaatctccgtctggcactgcaccaggtacctctacccctgaaagcggttccgcttctcca

SEQ ID NO: 532 - protein, 144 aa, synthetic construct
  REGION 1..144: note = Description of Artificial Sequence: Synthetic polypeptide
GSTSESPSGTAPGSTSESPSGTAPGTSPSGESSTAPGTSTEPSEGSAPGTSTEPSEGSAPGTSESATPESGPGASPGTSSTGSPGSSTPSGATGSPGASPGTSSTGSPGSTSESPSGTAPGSTSESPSGTAPGTSTPESGSASP

SEQ ID NO: 533 - DNA, 432 bp, synthetic construct
  misc_feature 1..432: note = Description of Artificial Sequence: Synthetic polynucleotide
  source 1..432: mol_type = other DNA
ggtacttctaccgaaccttccgagggcagcgcaccaggtacttctgaaagcgctacccctgagtccggcccaggtacttctgaaagcgctactcctgaatccggtccaggtacctctactgaaccttctgagggcagcgctccaggtacttctgaaagcgctaccccggagtccggtccaggtacttctactgaaccgtccgaaggtagcgcaccaggtacttctactgaaccttccgaaggtagcgctccaggtagcgaacctgctacttctggttctgaaaccccaggtagcccggctggctctccgacctccaccgaggaaggtgcttctcctggcaccagctctactggttctccaggttctagcccttctgcttctaccggtactggtccaggttctagcccttctgcatccactggtactggtcca

SEQ ID NO: 534 - protein, 144 aa, synthetic construct
  REGION 1..144: note = Description of Artificial Sequence: Synthetic polypeptide
GTSTEPSEGSAPGTSESATPESGPGTSESATPESGPGTSTEPSEGSAPGTSESATPESGPGTSTEPSEGSAPGTSTEPSEGSAPGSEPATSGSETPGSPAGSPTSTEEGASPGTSSTGSPGSSPSASTGTGPGSSPSASTGTGP

SEQ ID NO: 535 - DNA, 432 bp, synthetic construct
  misc_feature 1..432: note = Description of Artificial Sequence: Synthetic polynucleotide
  source 1..432: mol_type = other DNA
ggtagcgaaccggcaacctctggctctgaaaccccaggtacctctgaaagcgctactccggaatctggtccaggtacttctgaaagcgctactccggaatccggtccaggttctaccagcgaatctccttctggcaccgctccaggttctactagcgaatccccgtctggtaccgcaccaggtacttctcctagcggcgaatcttctaccgcaccaggtgcatctccgggtactagctctaccggttctccaggttctagcccttctgcttccactggtaccggcccaggtagctctaccccgtctggtgctactggttccccaggtagctctactccgtctggtgcaaccggttccccaggtagctctactccttctggtgctactggctccccaggtgcatcccctggcaccagctctaccggttctcca

SEQ ID NO: 536 - protein, 144 aa, synthetic construct
  REGION 1..144: note = Description of Artificial Sequence: Synthetic polypeptide
GSEPATSGSETPGTSESATPESGPGTSESATPESGPGSTSESPSGTAPGSTSESPSGTAPGTSPSGESSTAPGASPGTSSTGSPGSSPSASTGTGPGSSTPSGATGSPGSSTPSGATGSPGSSTPSGATGSPGASPGTSSTGSP

SEQ ID NO: 537 - DNA, 432 bp, synthetic construct
  misc_feature 1..432: note = Description of Artificial Sequence: Synthetic polynucleotide
  source 1..432: mol_type = other DNA
ggtgcttctccgggcaccagctctactggttctccaggttctagcccttctgcatccaccggtaccggtccaggtagctctaccccttctggtgcaaccggctctccaggtacttctgaaagcgctaccccggaatctggcccaggtagcgaaccggctacttctggttctgaaaccccaggtagcgaaccggctacctccggttctgaaactccaggtacttctgaaagcgctactccggagtccggtccaggtacctctaccgaaccgtccgaaggcagcgctccaggtacttctactgaaccttctgagggtagcgctccaggtacctctaccgaaccgtccgagggtagcgcaccaggtacctctactgaaccgtctgagggtagcgctccaggtagcgaaccggcaacctccggttctgaaactcca

SEQ ID NO: 538 - protein, 144 aa, synthetic construct
  REGION 1..144: note = Description of Artificial Sequence: Synthetic polypeptide
GASPGTSSTGSPGSSPSASTGTGPGSSTPSGATGSPGTSESATPESGPGSEPATSGSETPGSEPATSGSETPGTSESATPESGPGTSTEPSEGSAPGTSTEPSEGSAPGTSTEPSEGSAPGTSTEPSEGSAPGSEPATSGSETP

SEQ ID NO: 539 - DNA, 432 bp, synthetic construct
  misc_feature 1..432: note = Description of Artificial Sequence: Synthetic polynucleotide
  source 1..432: mol_type = other DNA
ggtacctctaccgaaccttccgaaggtagcgctccaggtagcccggcaggttctcctacttccactgaggaaggtacttctaccgaaccttctgagggtagcgcaccaggtacctctgaaagcgcaactcctgagtctggcccaggtagcgaacctgctacctccggctctgagactccaggtacctctgaaagcgcaaccccggaatctggtccaggtagcccggctggctctcctacctctactgaggaaggtacttctgaaagcgctactcctgagtctggtccaggtacctctactgaaccgtccgaaggtagcgctccaggtagcgaacctgctacttctggttctgaaactccaggtacttctaccgaaccgtccgagggtagcgctccaggtagcgaacctgctacttctggttctgaaactcca

SEQ ID NO: 540 - protein, 144 aa, synthetic construct
  REGION 1..144: note = Description of Artificial Sequence: Synthetic polypeptide
GTSTEPSEGSAPGSPAGSPTSTEEGTSTEPSEGSAPGTSESATPESGPGSEPATSGSETPGTSESATPESGPGSPAGSPTSTEEGTSESATPESGPGTSTEPSEGSAPGSEPATSGSETPGTSTEPSEGSAPGSEPATSGSETP

SEQ ID NO: 541 - DNA, 432 bp, synthetic construct
  misc_feature 1..432: note = Description of Artificial Sequence: Synthetic polynucleotide
  source 1..432: mol_type = other DNA
ggtacttctaccgaaccgtccgaaggcagcgctccaggtacctctactgaaccttccgagggcagcgctccaggtacctctaccgaaccttctgaaggtagcgcaccaggtacttctaccgaaccgtccgaaggcagcgctccaggtacctctactgaaccttccgagggcagcgctccaggtacctctaccgaaccttctgaaggtagcgcaccaggtacttctaccgaaccttccgagggcagcgcaccaggtacttctgaaagcgctacccctgagtccggcccaggtacttctgaaagcgctactcctgaatccggtccaggtacttctactgaaccttccgaaggtagcgctccaggtagcgaacctgctacttctggttctgaaaccccaggtagcccggctggctctccgacctccaccgaggaa

SEQ ID NO: 542 - protein, 144 aa, synthetic construct
  REGION 1..144: note = Description of Artificial Sequence: Synthetic polypeptide
GTSTEPSEGSAPGTSTEPSEGSAPGTSTEPSEGSAPGTSTEPSEGSAPGTSTEPSEGSAPGTSTEPSEGSAPGTSTEPSEGSAPGTSESATPESGPGTSESATPESGPGTSTEPSEGSAPGSEPATSGSETPGSPAGSPTSTEE

SEQ ID NO: 543 - DNA, 432 bp, synthetic construct
  misc_feature 1..432: note = Description of Artificial Sequence: Synthetic polynucleotide
  source 1..432: mol_type = other DNA
ggtacttctaccgaaccgtccgagggcagcgctccaggtacttctactgaaccttctgaaggcagcgctccaggtacttctactgaaccttccgaaggtagcgcaccaggttctaccagcgaatccccttctggtactgctccaggttctaccagcgaatccccttctggcaccgcaccaggtacttctacccctgaaagcggctccgcttctccaggtagcgaacctgcaacctctggctctgaaaccccaggtacctctgaaagcgctactcctgaatctggcccaggtacttctactgaaccgtccgagggcagcgcaccaggtacttctactgaaccgtctgaaggtagcgcaccaggtacttctgaaagcgcaaccccggaatccggcccaggtacctctgaaagcgcaaccccggagtccggccca

SEQ ID NO: 544 - protein, 144 aa, synthetic construct
  REGION 1..144: note = Description of Artificial Sequence: Synthetic polypeptide
GTSTEPSEGSAPGTSTEPSEGSAPGTSTEPSEGSAPGSTSESPSGTAPGSTSESPSGTAPGTSTPESGSASPGSEPATSGSETPGTSESATPESGPGTSTEPSEGSAPGTSTEPSEGSAPGTSESATPESGPGTSESATPESGP

SEQ ID NO: 545 - DNA, 432 bp, synthetic construct
  misc_feature 1..432: note = Description of Artificial Sequence: Synthetic polynucleotide
  source 1..432: mol_type = other DNA
ggtagctctaccccttctggtgctaccggctctccaggttctagcccgtctgcttctaccggtaccggtccaggtagctctaccccttctggtgctactggttctccaggtagccctgctggctctccgacttctactgaggaaggtagcccggctggttctccgacttctactgaggaaggtacttctaccgaaccttccgaaggtagcgctccaggtgcttccccgggcactagctctaccggttctccaggttctagcccttctgcatctactggtactggcccaggtactccgggcagcggtactgcttcttcctctccaggttctactagctctactgctgaatctcctggcccaggtacttctcctagcggtgaatcttctaccgctccaggtacctctactccggaaagcggttctgcatctcca

SEQ ID NO: 546 - protein, 144 aa, synthetic construct
  REGION 1..144: note = Description of Artificial Sequence: Synthetic polypeptide
GSSTPSGATGSPGSSPSASTGTGPGSSTPSGATGSPGSPAGSPTSTEEGSPAGSPTSTEEGTSTEPSEGSAPGASPGTSSTGSPGSSPSASTGTGPGTPGSGTASSSPGSTSSTAESPGPGTSPSGESSTAPGTSTPESGSASP

SEQ ID NO: 547 - DNA, 432 bp, synthetic construct
  misc_feature 1..432: note = Description of Artificial Sequence: Synthetic polynucleotide
  source 1..432: mol_type = other DNA
ggtacctctactgaaccttctgagggcagcgctccaggtacttctgaaagcgctaccccggagtccggtccaggtacttctactgaaccgtccgaaggtagcgcaccaggtacttctactgaaccgtctgaaggtagcgcaccaggtacttctgaaagcgcaaccccggaatccggcccaggtacctctgaaagcgcaaccccggagtccggcccaggtactcctggcagcggtaccgcttcttcttctccaggtgcttctcctggtactagctctactggttctccaggtgcttctccgggcactagctctactggttctccaggtagccctgctggctctccgacttctactgaggaaggtagcccggctggttctccgacttctactgaggaaggtacttctaccgaaccttccgaaggtagcgctcca

SEQ ID NO: 548 - protein, 144 aa, synthetic construct
  REGION 1..144: note = Description of Artificial Sequence: Synthetic polypeptide
GTSTEPSEGSAPGTSESATPESGPGTSTEPSEGSAPGTSTEPSEGSAPGTSESATPESGPGTSESATPESGPGTPGSGTASSSPGASPGTSSTGSPGASPGTSSTGSPGSPAGSPTSTEEGSPAGSPTSTEEGTSTEPSEGSAP

SEQ ID NO: 549 - DNA, 432 bp, synthetic construct
  misc_feature 1..432: note = Description of Artificial Sequence: Synthetic polynucleotide
  source 1..432: mol_type = other DNA
ggtagcccagcaggctctccgacttccactgaggaaggtacttctactgaaccttccgaaggcagcgcaccaggtacctctactgaaccttctgagggcagcgctccaggtacctctaccgaaccgtctgaaggtagcgcaccaggtacctctgaaagcgcaactcctgagtccggtccaggtacttctgaaagcgcaaccccggagtctggcccaggtaccccgggtagcggtactgcttcttcctctccaggtagctctaccccttctggtgcaaccggctctccaggtgcttctccgggcaccagctctaccggttctccaggtacctctactgaaccttctgagggcagcgctccaggtacttctgaaagcgctaccccggagtccggtccaggtacttctactgaaccgtccgaaggtagcgcacca

SEQ ID NO: 550 - protein, 144 aa, synthetic construct
  REGION 1..144: note = Description of Artificial Sequence: Synthetic polypeptide
GSPAGSPTSTEEGTSTEPSEGSAPGTSTEPSEGSAPGTSTEPSEGSAPGTSESATPESGPGTSESATPESGPGTPGSGTASSSPGSSTPSGATGSPGASPGTSSTGSPGTSTEPSEGSAPGTSESATPESGPGTSTEPSEGSAP

SEQ ID NO: 551 - DNA, 432 bp, synthetic construct
  misc_feature 1..432: note = Description of Artificial Sequence: Synthetic polynucleotide
  source 1..432: mol_type = other DNA
ggtagcgaaccggcaacctccggctctgaaactccaggtacttctgaaagcgctactccggaatccggcccaggtagcgaaccggctacttccggctctgaaaccccaggtagctctaccccgtctggtgcaaccggctccccaggtactcctggtagcggtaccgcttcttcttctccaggtagctctactccgtctggtgctaccggctccccaggtgcatctcctggtaccagctctaccggttctccaggtagctctactccttctggtgctactggctctccaggtgcttccccgggtaccagctctaccggttctccaggtagcgaacctgctacttctggttctgaaactccaggtacttctaccgaaccgtccgagggtagcgctccaggtagcgaacctgctacttctggttctgaaactcca

SEQ ID NO: 552 - protein, 144 aa, synthetic construct
  REGION 1..144: note = Description of Artificial Sequence: Synthetic polypeptide
GSEPATSGSETPGTSESATPESGPGSEPATSGSETPGSSTPSGATGSPGTPGSGTASSSPGSSTPSGATGSPGASPGTSSTGSPGSSTPSGATGSPGASPGTSSTGSPGSEPATSGSETPGTSTEPSEGSAPGSEPATSGSETP

SEQ ID NO: 553 - DNA, 432 bp, synthetic construct
  misc_feature 1..432: note = Description of Artificial Sequence: Synthetic polynucleotide
  source 1..432: mol_type = other DNA
ggtacctctactgaaccttccgaaggcagcgctccaggtacctctaccgaaccgtccgagggcagcgcaccaggtacttctgaaagcgcaacccctgaatccggtccaggtagccctgctggctctccgacttctactgaggaaggtagcccggctggttctccgacttctactgaggaaggtacttctaccgaaccttccgaaggtagcgctccaggtagcccggctggttctccgacttccaccgaggaaggtacctctactgaaccttctgagggtagcgctccaggtacctctactgaaccttccgaaggcagcgctccaggtgcttccccgggcaccagctctactggttctccaggttctagcccgtctgcttctactggtactggtccaggttctagcccttctgcttccactggtactggtcca

SEQ ID NO: 554 - protein, 144 aa, synthetic construct
  REGION 1..144: note = Description of Artificial Sequence: Synthetic polypeptide
GTSTEPSEGSAPGTSTEPSEGSAPGTSESATPESGPGSPAGSPTSTEEGSPAGSPTSTEEGTSTEPSEGSAPGSPAGSPTSTEEGTSTEPSEGSAPGTSTEPSEGSAPGASPGTSSTGSPGSSPSASTGTGPGSSPSASTGTGP

SEQ ID NO: 555 - DNA, 432 bp, synthetic construct
  misc_feature 1..432: note = Description of Artificial Sequence: Synthetic polynucleotide
  source 1..432: mol_type = other DNA
ggtagctctaccccgtctggtgctaccggttccccaggtgcttctcctggtactagctctaccggttctccaggtagctctaccccgtctggtgctactggctctccaggtagccctgctggctctccaacctccaccgaagaaggtacctctgaaagcgcaacccctgaatccggcccaggtagcgaaccggcaacctccggttctgaaaccccaggtgcatctcctggtactagctctactggttctccaggtagctctactccgtctggtgcaaccggctctccaggttctagcccttctgcatctaccggtactggtccaggttctaccagcgaatccccttctggtactgctccaggttctaccagcgaatccccttctggcaccgcaccaggtacttctacccctgaaagcggctccgcttctcca

SEQ ID NO: 556 - protein, 144 aa, synthetic construct
  REGION 1..144: note = Description of Artificial Sequence: Synthetic polypeptide
GSSTPSGATGSPGASPGTSSTGSPGSSTPSGATGSPGSPAGSPTSTEEGTSESATPESGPGSEPATSGSETPGASPGTSSTGSPGSSTPSGATGSPGSSPSASTGTGPGSTSESPSGTAPGSTSESPSGTAPGTSTPESGSASP

SEQ ID NO: 557 - DNA, 432 bp, synthetic construct
  misc_feature 1..432: note = Description of Artificial Sequence: Synthetic polynucleotide
  source 1..432: mol_type = other DNA
ggttctaccagcgaatctccttctggcaccgctccaggttctactagcgaatccccgtctggtaccgcaccaggtacttctcctagcggcgaatcttctaccgcaccaggtacctctgaaagcgctactccggagtctggcccaggtacctctactgaaccgtctgagggtagcgctccaggtacttctactgaaccgtccgaaggtagcgcaccaggtacctctactgaaccttctgagggcagcgctccaggtacttctgaaagcgctaccccggagtccggtccaggtacttctactgaaccgtccgaaggtagcgcaccaggtagctctaccccgtctggtgctaccggttccccaggtgcttctcctggtactagctctaccggttctccaggtagctctaccccgtctggtgctactggctctcca

SEQ ID NO: 558 - protein, 144 aa, synthetic construct
  REGION 1..144: note = Description of Artificial Sequence: Synthetic polypeptide
GSTSESPSGTAPGSTSESPSGTAPGTSPSGESSTAPGTSESATPESGPGTSTEPSEGSAPGTSTEPSEGSAPGTSTEPSEGSAPGTSESATPESGPGTSTEPSEGSAPGSSTPSGATGSPGASPGTSSTGSPGSSTPSGATGSP

SEQ ID NO: 559 - DNA, 432 bp, synthetic construct
  misc_feature 1..432: note = Description of Artificial Sequence: Synthetic polynucleotide
  source 1..432: mol_type = other DNA
ggttctactagctctactgcagaatctccgggcccaggtacctctcctagcggtgaatcttctaccgctccaggtacttctccgagcggtgaatcttctaccgctccaggttctactagctctaccgctgaatctccgggtccaggttctaccagctctactgcagaatctcctggcccaggtacttctactccggaaagcggttccgcttctccaggtacttctcctagcggtgaatcttctaccgctccaggttctaccagctctactgctgaatctcctggcccaggtacttctaccccggaaagcggctccgcttctccaggttctaccagctctaccgctgaatctcctggcccaggttctactagcgaatctccgtctggcaccgcaccaggtacttcccctagcggtgaatcttctactgcacca

SEQ ID NO: 560 - protein, 144 aa, synthetic construct
  REGION 1..144: note = Description of Artificial Sequence: Synthetic polypeptide
GSTSSTAESPGPGTSPSGESSTAPGTSPSGESSTAPGSTSSTAESPGPGSTSSTAESPGPGTSTPESGSASPGTSPSGESSTAPGSTSSTAESPGPGTSTPESGSASPGSTSSTAESPGPGSTSESPSGTAPGTSPSGESSTAP

SEQ ID NO: 561 - DNA, 432 bp, synthetic construct
  misc_feature 1..432: note = Description of Artificial Sequence: Synthetic polynucleotide
  source 1..432: mol_type = other DNA
ggtacctctactccggaaagcggttccgcatctccaggttctaccagcgaatccccgtctggcaccgcaccaggttctactagctctactgctgaatctccgggcccaggtacctctactgaaccttccgaaggcagcgctccaggtacctctaccgaaccgtccgagggcagcgcaccaggtacttctgaaagcgcaacccctgaatccggtccaggtacctctgaaagcgctactccggagtctggcccaggtacctctactgaaccgtctgagggtagcgctccaggtacttctactgaaccgtccgaaggtagcgcaccaggtacttctgaaagcgctactccggagtccggtccaggtacctctaccgaaccgtccgaaggcagcgctccaggtacttctactgaaccttctgagggtagcgctccc

SEQ ID NO: 562 - protein, 144 aa, synthetic construct
  REGION 1..144: note = Description of Artificial Sequence: Synthetic polypeptide
GTSTPESGSASPGSTSESPSGTAPGSTSSTAESPGPGTSTEPSEGSAPGTSTEPSEGSAPGTSESATPESGPGTSESATPESGPGTSTEPSEGSAPGTSTEPSEGSAPGTSESATPESGPGTSTEPSEGSAPGTSTEPSEGSAP

SEQ ID NO: 563 - DNA, 432 bp, synthetic construct
  misc_feature 1..432: note = Description of Artificial Sequence: Synthetic polynucleotide
  source 1..432: mol_type = other DNA
ggtacctctaccgaaccgtccgagggtagcgcaccaggtacctctactgaaccgtctgagggtagcgctccaggtagcgaaccggcaacctccggttctgaaactccaggtacttctactgaaccgtctgaaggtagcgcaccaggtacttctgaaagcgcaaccccggaatccggcccaggtacctctgaaagcgcaaccccggagtccggcccaggtgcatctccgggtactagctctaccggttctccaggttctagcccttctgcttccactggtaccggcccaggtagctctaccccgtctggtgctactggttccccaggtagctctactccgtctggtgcaaccggttccccaggtagctctactccttctggtgctactggctccccaggtgcatcccctggcaccagctctaccggttctcca

SEQ ID NO: 564 - protein, 144 aa, synthetic construct
  REGION 1..144: note = Description of Artificial Sequence: Synthetic polypeptide
GTSTEPSEGSAPGTSTEPSEGSAPGSEPATSGSETPGTSTEPSEGSAPGTSESATPESGPGTSESATPESGPGASPGTSSTGSPGSSPSASTGTGPGSSTPSGATGSPGSSTPSGATGSPGSSTPSGATGSPGASPGTSSTGSP

SEQ ID NO: 565 - DNA, 432 bp, synthetic construct
  misc_feature 1..432: note = Description of Artificial Sequence: Synthetic polynucleotide
  source 1..432: mol_type = other DNA
ggtagcgaaccggcaacctctggctctgaaactccaggtagcgaacctgcaacctccggctctgaaaccccaggtacttctactgaaccttctgagggcagcgcaccaggtagcgaacctgcaacctctggctctgaaaccccaggtacctctgaaagcgctactcctgaatctggcccaggtacttctactgaaccgtccgagggcagcgcaccaggtagctctactccgtctggtgctaccggctctccaggtagctctaccccttctggtgcaaccggctccccaggtgcttctccgggtaccagctctactggttctccaggtagctctaccccgtctggtgctaccggttccccaggtgcttctcctggtactagctctaccggttctccaggtagctctaccccgtctggtgctactggctctcca

SEQ ID NO: 566 - protein, 144 aa, synthetic construct
  REGION 1..144: note = Description of Artificial Sequence: Synthetic polypeptide
GSEPATSGSETPGSEPATSGSETPGTSTEPSEGSAPGSEPATSGSETPGTSESATPESGPGTSTEPSEGSAPGSSTPSGATGSPGSSTPSGATGSPGASPGTSSTGSPGSSTPSGATGSPGASPGTSSTGSPGSSTPSGATGSP

SEQ ID NO: 567 - DNA, 432 bp, synthetic construct
  misc_feature 1..432: note = Description of Artificial Sequence: Synthetic polynucleotide
  source 1..432: mol_type = other DNA
ggtacttctaccgaaccgtccgagggcagcgctccaggtacttctactgaaccttctgaaggcagcgctccaggtacttctactgaaccttccgaaggtagcgcaccaggtacttctgaaagcgctactccggagtccggtccaggtacctctaccgaaccgtccgaaggcagcgctccaggtacttctactgaaccttctgagggtagcgctccaggttctactagcgaatctccgtctggcactgctccaggtacttctcctagcggtgaatcttctaccgctccaggtacttcccctagcggcgaatcttctaccgctccaggtagcccggctggctctcctacctctactgaggaaggtacttctgaaagcgctactcctgagtctggtccaggtacctctactgaaccgtccgaaggtagcgctcca

SEQ ID NO: 568 - protein, 144 aa, synthetic construct
  REGION 1..144: note = Description of Artificial Sequence: Synthetic polypeptide
GTSTEPSEGSAPGTSTEPSEGSAPGTSTEPSEGSAPGTSESATPESGPGTSTEPSEGSAPGTSTEPSEGSAPGSTSESPSGTAPGTSPSGESSTAPGTSPSGESSTAPGSPAGSPTSTEEGTSESATPESGPGTSTEPSEGSAP

SEQ ID NO: 569 - DNA, 432 bp, synthetic construct
  misc_feature 1..432: note = Description of Artificial Sequence: Synthetic polynucleotide
  source 1..432: mol_type = other DNA
ggtacttctactgaaccttccgaaggtagcgctccaggtagcgaacctgctacttctggttctgaaaccccaggtagcccggctggctctccgacctccaccgaggaaggtagcccggcaggctctccgacctctactgaggaaggtacttctgaaagcgcaaccccggagtccggcccaggtacctctaccgaaccgtctgagggcagcgcaccaggtacctctactgaaccttccgaaggcagcgctccaggtacctctaccgaaccgtccgagggcagcgcaccaggtacttctgaaagcgcaacccctgaatccggtccaggtagctctactccgtctggtgcaaccggctccccaggttctagcccgtctgcttccactggtactggcccaggtgcttccccgggcaccagctctactggttctcca

SEQ ID NO: 570 - protein, 144 aa, synthetic construct
  REGION 1..144: note = Description of Artificial Sequence: Synthetic polypeptide
GTSTEPSEGSAPGSEPATSGSETPGSPAGSPTSTEEGSPAGSPTSTEEGTSESATPESGPGTSTEPSEGSAPGTSTEPSEGSAPGTSTEPSEGSAPGTSESATPESGPGSSTPSGATGSPGSSPSASTGTGPGASPGTSSTGSP

SEQ ID NO: 571 - DNA, 432 bp, synthetic construct
  misc_feature 1..432: note = Description of Artificial Sequence: Synthetic polynucleotide
  source 1..432: mol_type = other DNA
ggtagcgaaccggctacttccggctctgagactccaggtagccctgctggctctccgacctctaccgaagaaggtacctctgaaagcgctacccctgagtctggcccaggtacctctactgaaccttccgaaggcagcgctccaggtacctctaccgaaccgtccgagggcagcgcaccaggtacttctgaaagcgcaacccctgaatccggtccaggtacctctactccggaaagcggttccgcatctccaggttctaccagcgaatccccgtctggcaccgcaccaggttctactagctctactgctgaatctccgggcccaggtacttctgaaagcgctactccggagtccggtccaggtacctctaccgaaccgtccgaaggcagcgctccaggtacttctactgaaccttctgagggtagcgctcca

SEQ ID NO: 572 - protein, 144 aa, synthetic construct
  REGION 1..144: note = Description of Artificial Sequence: Synthetic polypeptide
GSEPATSGSETPGSPAGSPTSTEEGTSESATPESGPGTSTEPSEGSAPGTSTEPSEGSAPGTSESATPESGPGTSTPESGSASPGSTSESPSGTAPGSTSSTAESPGPGTSESATPESGPGTSTEPSEGSAPGTSTEPSEGSAP

SEQ ID NO: 573 - DNA, 432 bp, synthetic construct
  misc_feature 1..432: note = Description of Artificial Sequence: Synthetic polynucleotide
  source 1..432: mol_type = other DNA
ggtacttctaccgaaccgtccgagggcagcgctccaggtacttctactgaaccttctgaaggcagcgctccaggtacttctactgaaccttccgaaggtagcgcaccaggtacctctaccgaaccgtctgaaggtagcgcaccaggtacctctgaaagcgcaactcctgagtccggtccaggtacttctgaaagcgcaaccccggagtctggcccaggtactcctggcagcggtaccgcatcttcctctccaggtagctctactccgtctggtgcaactggttccccaggtgcttctccgggtaccagctctaccggttctccaggttccaccagctctactgctgaatctcctggtccaggtacctctcctagcggtgaatcttctactgctccaggtacttctactcctgaaagcggctctgcttctcca

SEQ ID NO: 574 - protein, 144 aa, synthetic construct
  REGION 1..144: note = Description of Artificial Sequence: Synthetic polypeptide
GTSTEPSEGSAPGTSTEPSEGSAPGTSTEPSEGSAPGTSTEPSEGSAPGTSESATPESGPGTSESATPESGPGTPGSGTASSSPGSSTPSGATGSPGASPGTSSTGSPGSTSSTAESPGPGTSPSGESSTAPGTSTPESGSASP

SEQ ID NO: 575 - DNA, 432 bp, synthetic construct
  misc_feature 1..432: note = Description of Artificial Sequence: Synthetic polynucleotide
  source 1..432: mol_type = other DNA
ggtagcccggcaggctctccgacctctactgaggaaggtacttctgaaagcgcaaccccggagtccggcccaggtacctctaccgaaccgtctgagggcagcgcaccaggtacttctgaaagcgcaacccctgaatccggtccaggtagcgaaccggctacttctggctctgagactccaggtacttctaccgaaccgtccgaaggtagcgcaccaggtagcccggctggttctccgacttccaccgaggaaggtacctctactgaaccttctgagggtagcgctccaggtacctctactgaaccttccgaaggcagcgctccaggtacttctaccgaaccgtccgagggcagcgctccaggtacttctactgaaccttctgaaggcagcgctccaggtacttctactgaaccttccgaaggtagcgcacca

SEQ ID NO: 576 - protein, 144 aa, synthetic construct
  REGION 1..144: note = Description of Artificial Sequence: Synthetic polypeptide
GSPAGSPTSTEEGTSESATPESGPGTSTEPSEGSAPGTSESATPESGPGSEPATSGSETPGTSTEPSEGSAPGSPAGSPTSTEEGTSTEPSEGSAPGTSTEPSEGSAPGTSTEPSEGSAPGTSTEPSEGSAPGTSTEPSEGSAP

SEQ ID NO: 577 - DNA, 432 bp, synthetic construct
  misc_feature 1..432: note = Description of Artificial Sequence: Synthetic polynucleotide
  source 1..432: mol_type = other DNA
ggtacttctccgagcggtgaatcttctaccgcaccaggttctactagctctaccgctgaatctccgggcccaggtacttctccgagcggtgaatcttctactgctccaggtacctctgaaagcgctactccggagtctggcccaggtacctctactgaaccgtctgagggtagcgctccaggtacttctactgaaccgtccgaaggtagcgcaccaggttctagcccttctgcatctactggtactggcccaggtagctctactccttctggtgctaccggctctccaggtgcttctccgggtactagctctaccggttctccaggtacttctactccggaaagcggttccgcatctccaggtacttctcctagcggtgaatcttctactgctccaggtacctctcctagcggcgaatcttctactgctcca

SEQ ID NO: 578 - protein, 144 aa, synthetic construct
  REGION 1..144: note = Description of Artificial Sequence: Synthetic polypeptide
GTSPSGESSTAPGSTSSTAESPGPGTSPSGESSTAPGTSESATPESGPGTSTEPSEGSAPGTSTEPSEGSAPGSSPSASTGTGPGSSTPSGATGSPGASPGTSSTGSPGTSTPESGSASPGTSPSGESSTAPGTSPSGESSTAP

SEQ ID NO: 579 - DNA, 432 bp, synthetic construct
  misc_feature 1..432: note = Description of Artificial Sequence: Synthetic polynucleotide
  source 1..432: mol_type = other DNA
ggtacctctgaaagcgctactccggagtctggcccaggtacctctactgaaccgtctgagggtagcgctccaggtacttctactgaaccgtccgaaggtagcgcaccaggtagccctgctggctctccgacttctactgaggaaggtagcccggctggttctccgacttctactgaggaaggtacttctaccgaaccttccgaaggtagcgctccaggttctagcccttctgcttccaccggtactggcccaggtagctctaccccttctggtgctaccggctccccaggtagctctactccttctggtgcaactggctctccaggtagcgaaccggcaacttccggctctgaaaccccaggtacttctgaaagcgctactcctgagtctggcccaggtagcgaacctgctacctctggctctgaaacccca

SEQ ID NO: 580 - protein, 144 aa, synthetic construct
  REGION 1..144: note = Description of Artificial Sequence: Synthetic polypeptide
GTSESATPESGPGTSTEPSEGSAPGTSTEPSEGSAPGSPAGSPTSTEEGSPAGSPTSTEEGTSTEPSEGSAPGSSPSASTGTGPGSSTPSGATGSPGSSTPSGATGSPGSEPATSGSETPGTSESATPESGPGSEPATSGSETP

SEQ ID NO: 581 - DNA, 432 bp, synthetic construct
  misc_feature 1..432: note = Description of Artificial Sequence: Synthetic polynucleotide
  source 1..432: mol_type = other DNA
ggtacttctaccgaaccgtccgaaggcagcgctccaggtacctctactgaaccttccgagggcagcgctccaggtacctctaccgaaccttctgaaggtagcgcaccaggtagctctaccccgtctggtgctaccggttccccaggtgcttctcctggtactagctctaccggttctccaggtagctctaccccgtctggtgctactggctctccaggtacttctgaaagcgcaacccctgaatccggtccaggtagcgaaccggctacttctggctctgagactccaggtacttctaccgaaccgtccgaaggtagcgcaccaggttctactagcgaatctccttctggcactgcaccaggttctaccagcgaatctccgtctggcactgcaccaggtacctctacccctgaaagcggttccgcttctcca

SEQ ID NO: 582 - protein, 144 aa, synthetic construct
  REGION 1..144: note = Description of Artificial Sequence: Synthetic polypeptide
GTSTEPSEGSAPGTSTEPSEGSAPGTSTEPSEGSAPGSSTPSGATGSPGASPGTSSTGSPGSSTPSGATGSPGTSESATPESGPGSEPATSGSETPGTSTEPSEGSAPGSTSESPSGTAPGSTSESPSGTAPGTSTPESGSASP

SEQ ID NO: 583 - DNA, 432 bp, synthetic construct
  misc_feature 1..432: note = Description of Artificial Sequence: Synthetic polynucleotide
  source 1..432: mol_type = other DNA
ggtacctctactcctgaaagcggttctgcatctccaggttccactagctctaccgcagaatctccgggcccaggttctactagctctactgctgaatctcctggcccaggttctagcccttctgcatctactggtactggcccaggtagctctactccttctggtgctaccggctctccaggtgcttctccgggtactagctctaccggttctccaggtagcgaaccggcaacctccggctctgaaaccccaggtacctctgaaagcgctactcctgaatccggcccaggtagcccggcaggttctccgacttccactgaggaaggttctactagcgaatctccttctggcactgcaccaggttctaccagcgaatctccgtctggcactgcaccaggtacctctacccctgaaagcggttccgcttctccc

SEQ ID NO: 584 - protein, 144 aa, synthetic construct
  REGION 1..144: note = Description of Artificial Sequence: Synthetic polypeptide
GTSTPESGSASPGSTSSTAESPGPGSTSSTAESPGPGSSPSASTGTGPGSSTPSGATGSPGASPGTSSTGSPGSEPATSGSETPGTSESATPESGPGSPAGSPTSTEEGSTSESPSGTAPGSTSESPSGTAPGTSTPESGSASP

SEQ ID NO: 585 - DNA, 432 bp, synthetic construct
  misc_feature 1..432: note = Description of Artificial Sequence: Synthetic polynucleotide
  source 1..432: mol_type = other DNA
ggtagcccggctggctctcctacctctactgaggaaggtacttctgaaagcgctactcctgagtctggtccaggtacctctactgaaccgtccgaaggtagcgctccaggttctaccagcgaatctccttctggcaccgctccaggttctactagcgaatccccgtctggtaccgcaccaggtacttctcctagcggcgaatcttctaccgcaccaggtacctctaccgaaccttccgaaggtagcgctccaggtagcccggcaggttctcctacttccactgaggaaggtacttctaccgaaccttctgagggtagcgcaccaggtagcgaacctgcaacctctggctctgaaaccccaggtacctctgaaagcgctactcctgaatctggcccaggtacttctactgaaccgtccgagggcagcgcacca

SEQ ID NO: 586 - protein, 144 aa, synthetic construct
  REGION 1..144: note = Description of Artificial Sequence: Synthetic polypeptide
GSPAGSPTSTEEGTSESATPESGPGTSTEPSEGSAPGSTSESPSGTAPGSTSESPSGTAPGTSPSGESSTAPGTSTEPSEGSAPGSPAGSPTSTEEGTSTEPSEGSAPGSEPATSGSETPGTSESATPESGPGTSTEPSEGSAP

SEQ ID NO: 587 - DNA, 432 bp, synthetic construct
  misc_feature 1..432: note = Description of Artificial Sequence: Synthetic polynucleotide
  source 1..432: mol_type = other DNA
ggtacctctaccgaaccttccgaaggtagcgctccaggtagcccggcaggttctcctacttccactgaggaaggtacttctaccgaaccttctgagggtagcgcaccaggtacctcccctagcggcgaatcttctactgctccaggtacctctcctagcggcgaatcttctaccgctccaggtacctcccctagcggtgaatcttctaccgcaccaggttctaccagcgaatccccttctggtactgctccaggttctaccagcgaatccccttctggcaccgcaccaggtacttctacccctgaaagcggctccgcttctccaggtagcgaacctgcaacctctggctctgaaaccccaggtacctctgaaagcgctactcctgaatctggcccaggtacttctactgaaccgtccgagggcagcgcacca

SEQ ID NO: 588 - protein, 144 aa, synthetic construct
  REGION 1..144: note = Description of Artificial Sequence: Synthetic polypeptide
GTSTEPSEGSAPGSPAGSPTSTEEGTSTEPSEGSAPGTSPSGESSTAPGTSPSGESSTAPGTSPSGESSTAPGSTSESPSGTAPGSTSESPSGTAPGTSTPESGSASPGSEPATSGSETPGTSESATPESGPGTSTEPSEGSAP

SEQ ID NO: 589 - DNA, 432 bp, synthetic construct
  misc_feature 1..432: note = Description of Artificial Sequence: Synthetic polynucleotide
  source 1..432: mol_type = other DNA
ggtagcgaaccggcaacctctggctctgaaaccccaggtacctctgaaagcgctactccggaatctggtccaggtacttctgaaagcgctactccggaatccggtccaggtacttctccgagcggtgaatcttctaccgcaccaggttctactagctctaccgctgaatctccgggcccaggtacttctccgagcggtgaatcttctactgctccaggttctactagcgaatccccgtctggtactgctccaggtacttcccctagcggtgaatcttctactgctccaggttctaccagctctaccgcagaatctccgggtccaggtagctctactccgtctggtgcaaccggttccccaggtagctctaccccttctggtgcaaccggctccccaggtagctctaccccttctggtgcaaactggctctcc

SEQ ID NO: 590 - protein, 144 aa, synthetic construct
  REGION 1..144: note = Description of Artificial Sequence: Synthetic polypeptide
GSEPATSGSETPGTSESATPESGPGTSESATPESGPGTSPSGESSTAPGSTSSTAESPGPGTSPSGESSTAPGSTSESPSGTAPGTSPSGESSTAPGSTSSTAESPGPGSSTPSGATGSPGSSTPSGATGSPGSSTPSGANWLS

SEQ ID NO: 591 - DNA, 432 bp, synthetic construct
  misc_feature 1..432: note = Description of Artificial Sequence: Synthetic polynucleotide
  source 1..432: mol_type = other DNA
ggtagccctgctggctctccgacttctactgaggaaggtagcccggctggttctccgacttctactgaggaaggtacttctaccgaaccttccgaaggtagcgctccaggtacctctactgaaccttccgaaggcagcgctccaggtacctctaccgaaccgtccgagggcagcgcaccaggtacttctgaaagcgcaacccctgaatccggtccaggtgcatctcctggtaccagctctaccggttctccaggtagctctactccttctggtgctactggctctccaggtgcttccccgggtaccagctctaccggttctccaggtagctctaccccgtctggtgctactggttctccaggtactccgggcagcggtactgcttcttcctctccaggtagctctaccccttctggtgctactggctctcca

SEQ ID NO: 592 - protein, 144 aa, synthetic construct
  REGION 1..144: note = Description of Artificial Sequence: Synthetic polypeptide
GSPAGSPTSTEEGSPAGSPTSTEEGTSTEPSEGSAPGTSTEPSEGSAPGTSTEPSEGSAPGTSESATPESGPGASPGTSSTGSPGSSTPSGATGSPGASPGTSSTGSPGSSTPSGATGSPGTPGSGTASSSPGSSTPSGATGSP

SEQ ID NO: 593 - DNA, 432 bp, synthetic construct
  misc_feature 1..432: note = Description of Artificial Sequence: Synthetic polynucleotide
  source 1..432: mol_type = other DNA
ggtagctctaccccgtctggtgctactggttctccaggtactccgggcagcggtactgcttcttcctctccaggtagctctaccccttctggtgctactggctctccaggtagcccggctggctctcctacctctactgaggaaggtacttctgaaagcgctactcctgagtctggtccaggtacctctactgaaccgtccgaaggtagcgctccaggtacctctgaaagcgcaactcctgagtctggcccaggtagcgaacctgctacctccggctctgagactccaggtacctctgaaagcgcaaccccggaatctggtccaggtacttctactgaaccgtctgaaggtagcgcaccaggtacttctgaaagcgcaaccccggaatccggcccaggtacctctgaaagcgcaaccccggagtccggccca

SEQ ID NO: 594 - protein, 144 aa, synthetic construct
  REGION 1..144: note = Description of Artificial Sequence: Synthetic polypeptide
GSSTPSGATGSPGTPGSGTASSSPGSSTPSGATGSPGSPAGSPTSTEEGTSESATPESGPGTSTEPSEGSAPGTSESATPESGPGSEPATSGSETPGTSESATPESGPGTSTEPSEGSAPGTSESATPESGPGTSESATPESGP

SEQ ID NO: 595 - protein, 1469 aa, synthetic construct
  REGION 1..1469: note = Description of Artificial Sequence: Synthetic polypeptide
ATRRYYLGAVELSWDYMQSDLGELPVDARFPPRVPKSFPFNTSVVYKKTLFVEFTDHLFNIAKPRPPWMGLLGPTIQAEVYDTVVITLKNMASHPVSLHAVGVSYWKASEGAEYDDQTSQREKEDDKVFPGGSHTYVWQVLKENGPMASDPLCLTYSYLSHVDLVKDLNSGLIGALLVCREGSLAKEKTQTLHKFILLFAVFDEGKSWHSETKNSLMQDRDAASARAWPKMHTVNGYVNRSLPGLIGCHRKSVYWHVIGMGTTPEVHSIFLEGHTFLVRNHRQASLEISPITFLTAQTLLMDLGQFLLFCHISSHQHDGMEAYVKVDSCPEEPQLRMKNNEEAEDYDDDLTDSEMDVVRFDDDNSPSFIQIRSVAKKHPKTWVHYIAAEEEDWDYAPLVLAPDDRSYKSQYLNNGPQRIGRKYKKVRFMAYTDETFKTREAIQHESGILGPLLYGEVGDTLLIIFKNQASRPYNIYPHGITDVRPLYSRRLPKGVKHLKDFPILPGEIFKYKWTVTVEDGPTKSDPRCLTRYYSSFVNMERDLASGLIGPLLICYKESVDQRGNQIMSDKRNVILFSVFDENRSWYLTENIQRFLPNPAGVQLEDPEFQASNIMHSINGYVFDSLQLSVCLHEVAYWYILSIGAQTDFLSVFFSGYTFKHKMVYEDTLTLFPFSGETVFMSMENPGLWILGCHNSDFRNRGMTALLKVSSCDKNTGDYYEDSYEDISAYLLSKNNAIEPRSFSQNPPVLKRHQREITRTTLQSDQEEIDYDDTISVEMKKEDFDIYDEDENQSPRSFQKKTRHYFIAAVERLWDYGMSSSPHVLRNRAQSGSVPQFKKVVFQEFTDGSFTQPLYRGELNEHLGLLGPYIRAEVEDNIMVTFRNQASRPYSFYSSLISYEEDQRQGAEPRKNFVKPNETKTYFWKVQHHMAPTKDEFDCKAWAYFSDVDLEKDVHSGLIGPLLVCHTNTLNPAHGRQVTVQEFALFFTIFDETKSWYFTENMERNCRAPCNIQMEDPTFKENYRFHAINGYIMDTLPGLVMAQDQRIRWYLLSMGSNENIHSIHFSGHVFTVRKKEEYKMALYNLYPGVFETVEMLPSKAGIWRVECLIGEHLHAGMSTLFLVYSNKCQTPLGMASGHIRDFQITASGQYGQWAPKLARLHYSGSINAWSTKEPFSWIKVDLLAPMIIHGIKTQGARQKFSSLYISQFIIMYSLDGKKWQTYRGNSTGTLMVFFGNVDSSGIKHNIFNPPIIARYIRLHPTHYSIRSTLRMELMGCDLNSCSMPLGMESKAISDAQITASSYFTNMFATWSPSKARLHLQGRSNAWRPQVNNPKEWLQVDFQKTMKVTGVTTQGVKSLLTSMYVKEFLISSSQDGHQWTLFFQNGKVKVFQGNQDSFTPVVNSLDPPLLTRYLRIHPQSWVHQIALRMEVLGCEAQDLYGAGSPGAETAEQKLISEEDLSPATGHHHHHH

SEQ ID NO: 596 - DNA, 4410 bp, synthetic construct
  misc_feature 1..4410: note = Description of Artificial Sequence: Synthetic polynucleotide
  source 1..4410: mol_type = other DNA
gccaccagaagatactacctgggtgcagtggaactgtcatgggactatatgcaaagtgatctcggtgagctgcctgtggacgcaagatttcctcctagagtgccaaaatcttttccattcaacacctcagtcgtgtacaaaaagactctgtttgtagaattcacggatcaccttttcaacatcgctaagccaaggccaccctggatgggtctgctaggtcctaccatccaggctgaggtttatgatacagtggtcattacacttaagaacatggcttcccatcctgtcagtcttcatgctgttggtgtatcctactggaaagcttctgagggagctgaatatgatgatcagaccagtcaaagggagaaagaagatgataaagtcttccctggtggaagccatacatatgtctggcaggtcctgaaagagaatggtccaatggcctctgacccactgtgccttacctactcatatctttctcatgtggacctggtaaaagacttgaattcaggcctcattggagccctactagtatgtagagaagggagtctggccaaggaaaagacacagaccttgcacaaatttatactactttttgctgtatttgatgaagggaaaagttggcactcagaaacaaagaactccttgatgcaggatagggatgctgcatctgctcgggcctggcctaaaatgcacacagtcaatggttatgtaaacaggtctctgccaggtctgattggatgccacaggaaatcagtctattggcatgtgattggaatgggcaccactcctgaagtgcactcaatattcctcgaaggtcacacatttcttgtgaggaaccatcgccaggctagcttggaaatctcgccaataactttccttactgctcaaacactcttgatggaccttggacagtttctactgttttgtcatatctcttcccaccaacatgatggcatggaagcttatgtcaaagtagacagctgtccagaggaaccccaactacgaatgaaaaataatgaagaagcggaagactatgatgatgatcttactgattctgaaatggatgtggtcaggtttgatgatgacaactctccttcctttatccaaattcgctcagttgccaagaagcatcctaaaacttgggtacattacattgctgctgaagaggaggactgggactatgctcccttagtcctcgcccccgatgacagaagttataaaagtcaatatttgaacaatggccctcagcggattggtaggaagtacaaaaaagtccgatttatggcatacacagatgaaacctttaagactcgtgaagctattcagcatgaatcaggaatcttgggacctttactttatggggaagttggagacacactgttgattatatttaagaatcaagcaagcagaccatataacatctaccctcacggaatcactgatgtccgtcctttgtattcaaggagattaccaaaaggtgtaaaacatttgaaggattttccaattctgccaggagaaatattcaaatataaatggacagtgactgtagaagatgggccaactaaatcagatcctcggtgcctgacccgctattactctagtttcgttaatatggagagagatctagcttcaggactcattggccctctcctcatctgctacaaagaatctgtagatcaaagaggaaaccagataatgtcagacaagaggaatgtcatcctgttttctgtatttgatgagaaccgaagctggtacctcacagagaatatacaacgctttctccccaatccagctggagtgcagcttgaggatccagagttccaagcctccaacatcatgcacagcatcaatggctatgtttttgatagtttgcagttgtcagtttgtttgcatgaggtggcatactggtacattctaagcattggagcacagactgacttcctttctgtcttcttctctggatataccttcaaacacaaaatggtctatgaagacacactcaccctattcccattctcaggagaaactgtcttcatgtcgatggaaaacccaggtctatggattctggggtgccacaactcagactttcggaacagaggcatgaccgccttactgaaggtttctagttgtgacaagaacactggtgattattacgaggacagttatgaagatatttcagcatacttgctgagtaaaaacaatgccattgaaccaagaagcttctctcaaaacccaccagtcttgaaacgccatcaacgggaaataactcgtactactcttcagtcagatcaagaggaaatcgattatgatgataccatatcagttgaaatgaagaaggaagattttgacatttatgatgaggatgaaaatcagagcccccgcagctttcaaaagaaaacacgacactattttattgctgcagtggagaggctctgggattatgggatgagtagctccccacatgttctaagaaacagggctcagagtggcagtgtccctcagttcaagaaagttgttttccaggaatttactgatggctcctttactcagcccttataccgtggagaactaaatgaacatttgggactcctggggccatatataagagcagaagttgaagataatatcatggtaactttcagaaatcaggcctctcgtccctattccttctattctagccttatttcttatgaggaagatcagaggcaaggagcagaacctagaaaaaactttgtcaagcctaatgaaaccaaaacttacttttggaaagtgcaacatcatatggcacccactaaagatgagtttgactgcaaagcctgggcttatttctctgatgttgacctggaaaaagatgtgcactcaggcctgattggaccccttctggtctgccacactaacacactgaaccctgctcatgggagacaagtgacagtacaggaatttgctctgtttttcaccatctttgatgagaccaaaagctggtacttcactgaaaatatggaaagaaactgcagggctccctgcaatatccagatggaagatcccacttttaaagagaattatcgcttccatgcaatcaatggctacataatggatacactacctggcttagtaatggctcaggatcaaaggattcgatggtatctgctcagcatgggcagcaatgaaaacatccattctattcatttcagtggacatgtgttcactgtacgaaaaaaagaggagtataaaatggcactgtacaatctctatccaggtgtttttgagacagtggaaatgttaccatccaaagctggaatttggcgggtggaatgccttattggcgagcatctacatgctgggatgagcacactttttctggtgtacagcaataagtgtcagactcccctgggaatggcttctggacacattagagattttcagattacagcttcaggacaatatggacagtgggccccaaagctggccagacttcattattccggatcaatcaatgcctggagcaccaaggagcccttttcttggatcaaggtggatctgttggcaccaatgattattcacggcatcaagacccagggtgcccgtcagaagttctccagcctctacatctctcagtttatcatcatgtatagtcttgatgggaagaagtggcagacttatcgaggaaattccactggaaccttaatggtcttctttggcaatgtggattcatctgggataaaacacaatatttttaaccctccaattattgctcgatacatccgtttgcacccaactcattatagcattcgcagcactcttcgcatggagttgatgggctgtgatttaaatagttgcagcatgccattgggaatggagagtaaagcaatatcagatgcacagattactgcttcatcctactttaccaatatgtttgccacctggtctccttcaaaagctcgacttcacctccaagggaggagtaatgcctggagacctcaggtgaataatccaaaagagtggctgcaagtggacttccagaagacaatgaaagtcacaggagtaactactcagggagtaaaatctctgcttaccagcatgtatgtgaaggagttcctcatctccagcagtcaagatggccatcagtggactctcttttttcagaatggcaaagtaaaggtttttcagggaaatcaagactccttcacacctgtggtgaactctctagacccaccgttactgactcgctaccttcgaattcacccccagagttgggtgcaccagattgccctgaggatggaggttctgggctgcgaggcacaggacctctacggcgccggatcacctggggccgaaacggccgaacaaaaactcatctcagaagaggatctgtcacctgcaaccggtcatcatcaccatcaccattga

SEQ ID NO: 597 - protein, 1511 aa, synthetic construct
  REGION 1..1511: note = Description of Artificial Sequence: Synthetic polypeptide
ATRGAPGSPAGSPTSTEEGTSESATPESGPGSEPATSGSETPASSRYYLGAVELSWDYMQSDLGELPVDARFPPRVPKSFPFNTSVVYKKTLFVEFTDHLFNIAKPRPPWMGLLGPTIQAEVYDTVVITLKNMASHPVSLHAVGVSYWKASEGAEYDDQTSQREKEDDKVFPGGSHTYVWQVLKENGPMASDPLCLTYSYLSHVDLVKDLNSGLIGALLVCREGSLAKEKTQTLHKFILLFAVFDEGKSWHSETKNSLMQDRDAASARAWPKMHTVNGYVNRSLPGLIGCHRKSVYWHVIGMGTTPEVHSIFLEGHTFLVRNHRQASLEISPITFLTAQTLLMDLGQFLLFCHISSHQHDGMEAYVKVDSCPEEPQLRMKNNEEAEDYDDDLTDSEMDVVRFDDDNSPSFIQIRSVAKKHPKTWVHYIAAEEEDWDYAPLVLAPDDRSYKSQYLNNGPQRIGRKYKKVRFMAYTDETFKTREAIQHESGILGPLLYGEVGDTLLIIFKNQASRPYNIYPHGITDVRPLYSRRLPKGVKHLKDFPILPGEIFKYKWTVTVEDGPTKSDPRCLTRYYSSFVNMERDLASGLIGPLLICYKESVDQRGNQIMSDKRNVILFSVFDENRSWYLTENIQRFLPNPAGVQLEDPEFQASNIMHSINGYVFDSLQLSVCLHEVAYWYILSIGAQTDFLSVFFSGYTFKHKMVYEDTLTLFPFSGETVFMSMENPGLWILGCHNSDFRNRGMTALLKVSSCDKNTGDYYEDSYEDISAYLLSKNNAIEPRSFSQNPPVLKRHQREITRTTLQSDQEEIDYDDTISVEMKKEDFDIYDEDENQSPRSFQKKTRHYFIAAVERLWDYGMSSSPHVLRNRAQSGSVPQFKKVVFQEFTDGSFTQPLYRGELNEHLGLLGPYIRAEVEDNIMVTFRNQASRPYSFYSSLISYEEDQRQGAEPRKNFVKPNETKTYFWKVQHHMAPTKDEFDCKAWAYFSDVDLEKDVHSGLIGPLLVCHTNTLNPAHGRQVTVQEFALFFTIFDETKSWYFTENMERNCRAPCNIQMEDPTFKENYRFHAINGYIMDTLPGLVMAQDQRIRWYLLSMGSNENIHSIHFSGHVFTVRKKEEYKMALYNLYPGVFETVEMLPSKAGIWRVECLIGEHLHAGMSTLFLVYSNKCQTPLGMASGHIRDFQITASGQYGQWAPKLARLHYSGSINAWSTKEPFSWIKVDLLAPMIIHGIKTQGARQKFSSLYISQFIIMYSLDGKKWQTYRGNSTGTLMVFFGNVDSSGIKHNIFNPPIIARYIRLHPTHYSIRSTLRMELMGCDLNSCSMPLGMESKAISDAQITASSYFTNMFATWSPSKARLHLQGRSNAWRPQVNNPKEWLQVDFQKTMKVTGVTTQGVKSLLTSMYVKEFLISSSQDGHQWTLFFQNGKVKVFQGNQDSFTPVVNSLDPPLLTRYLRIHPQSWVHQIALRMEVLGCEAQDLYGAGSPGAETAEQKLISEEDLSPATGHHHHHH

SEQ ID NO: 598 - DNA, 4536 bp, synthetic construct
  misc_feature 1..4536: note = Description of Artificial Sequence: Synthetic polynucleotide
  source 1..4536: mol_type = other DNA
gccaccagaggcgcgccaggttctcctgctggctcccccacctcaacagaagaggggacaagcgaaagcgctacgcctgagagtggccctggctctgagccagccacctccggctctgaaacccctgcctcgagcagatactacctgggtgcagtggaactgtcatgggactatatgcaaagtgatctcggtgagctgcctgtggacgcaagatttcctcctagagtgccaaaatcttttccattcaacacctcagtcgtgtacaaaaagactctgtttgtagaattcacggatcaccttttcaacatcgctaagccaaggccaccctggatgggtctgctaggtcctaccatccaggctgaggtttatgatacagtggtcattacacttaagaacatggcttcccatcctgtcagtcttcatgctgttggtgtatcctactggaaagcttctgagggagctgaatatgatgatcagaccagtcaaagggagaaagaagatgataaagtcttccctggtggaagccatacatatgtctggcaggtcctgaaagagaatggtccaatggcctctgacccactgtgccttacctactcatatctttctcatgtggacctggtaaaagacttgaattcaggcctcattggagccctactagtatgtagagaagggagtctggccaaggaaaagacacagaccttgcacaaatttatactactttttgctgtatttgatgaagggaaaagttggcactcagaaacaaagaactccttgatgcaggatagggatgctgcatctgctcgggcctggcctaaaatgcacacagtcaatggttatgtaaacaggtctctgccaggtctgattggatgccacaggaaatcagtctattggcatgtgattggaatgggcaccactcctgaagtgcactcaatattcctcgaaggtcacacatttcttgtgaggaaccatcgccaggctagcttggaaatctcgccaataactttccttactgctcaaacactcttgatggaccttggacagtttctactgttttgtcatatctcttcccaccaacatgatggcatggaagcttatgtcaaagtagacagctgtccagaggaaccccaactacgaatgaaaaataatgaagaagcggaagactatgatgatgatcttactgattctgaaatggatgtggtcaggtttgatgatgacaactctccttcctttatccaaattcgctcagttgccaagaagcatcctaaaacttgggtacattacattgctgctgaagaggaggactgggactatgctcccttagtcctcgcccccgatgacagaagttataaaagtcaatatttgaacaatggccctcagcggattggtaggaagtacaaaaaagtccgatttatggcatacacagatgaaacctttaagactcgtgaagctattcagcatgaatcaggaatcttgggacctttactttatggggaagttggagacacactgttgattatatttaagaatcaagcaagcagaccatataacatctaccctcacggaatcactgatgtccgtcctttgtattcaaggagattaccaaaaggtgtaaaacatttgaaggattttccaattctgccaggagaaatattcaaatataaatggacagtgactgtagaagatgggccaactaaatcagatcctcggtgcctgacccgctattactctagtttcgttaatatggagagagatctagcttcaggactcattggccctctcctcatctgctacaaagaatctgtagatcaaagaggaaaccagataatgtcagacaagaggaatgtcatcctgttttctgtatttgatgagaaccgaagctggtacctcacagagaatatacaacgctttctccccaatccagctggagtgcagcttgaggatccagagttccaagcctccaacatcatgcacagcatcaatggctatgtttttgatagtttgcagttgtcagtttgtttgcatgaggtggcatactggtacattctaagcattggagcacagactgacttcctttctgtcttcttctctggatataccttcaaacacaaaatggtctatgaagacacactcaccctattcccattctcaggagaaactgtcttcatgtcgatggaaaacccaggtctatggattctggggtgccacaactcagactttcggaacagaggcatgaccgccttactgaaggtttctagttgtgacaagaacactggtgattattacgaggacagttatgaagatatttcagcatacttgctgagtaaaaacaatgccattgaaccaagaagcttctctcaaaacccaccagtcttgaaacgccatcaacgggaaataactcgtactactcttcagtcagatcaagaggaaatcgattatgatgataccatatcagttgaaatgaagaaggaagattttgacatttatgatgaggatgaaaatcagagcccccgcagctttcaaaagaaaacacgacactattttattgctgcagtggagaggctctgggattatgggatgagtagctccccacatgttctaagaaacagggctcagagtggcagtgtccctcagttcaagaaagttgttttccaggaatttactgatggctcctttactcagcccttataccgtggagaactaaatgaacatttgggactcctggggccatatataagagcagaagttgaagataatatcatggtaactttcagaaatcaggcctctcgtccctattccttctattctagccttatttcttatgaggaagatcagaggcaaggagcagaacctagaaaaaactttgtcaagcctaatgaaaccaaaacttacttttggaaagtgcaacatcatatggcacccactaaagatgagtttgactgcaaagcctgggcttatttctctgatgttgacctggaaaaagatgtgcactcaggcctgattggaccccttctggtctgccacactaacacactgaaccctgctcatgggagacaagtgacagtacaggaatttgctctgtttttcaccatctttgatgagaccaaaagctggtacttcactgaaaatatggaaagaaactgcagggctccctgcaatatccagatggaagatcccacttttaaagagaattatcgcttccatgcaatcaatggctacataatggatacactacctggcttagtaatggctcaggatcaaaggattcgatggtatctgctcagcatgggcagcaatgaaaacatccattctattcatttcagtggacatgtgttcactgtacgaaaaaaagaggagtataaaatggcactgtacaatctctatccaggtgtttttgagacagtggaaatgttaccatccaaagctggaatttggcgggtggaatgccttattggcgagcatctacatgctgggatgagcacactttttctggtgtacagcaataagtgtcagactcccctgggaatggcttctggacacattagagattttcagattacagcttcaggacaatatggacagtgggccccaaagctggccagacttcattattccggatcaatcaatgcctggagcaccaaggagcccttttcttggatcaaggtggatctgttggcaccaatgattattcacggcatcaagacccagggtgcccgtcagaagttctccagcctctacatctctcagtttatcatcatgtatagtcttgatgggaagaagtggcagacttatcgaggaaattccactggaaccttaatggtcttctttggcaatgtggattcatctgggataaaacacaatatttttaaccctccaattattgctcgatacatccgtttgcacccaactcattatagcattcgcagcactcttcgcatggagttgatgggctgtgatttaaatagttgcagcatgccattgggaatggagagtaaagcaatatcagatgcacagattactgcttcatcctactttaccaatatgtttgccacctggtctccttcaaaagctcgacttcacctccaagggaggagtaatgcctggagacctcaggtgaataatccaaaagagtggctgcaagtggacttccagaagacaatgaaagtcacaggagtaactactcagggagtaaaatctctgcttaccagcatgtatgtgaaggagttcctcatctccagcagtcaagatggccatcagtggactctcttttttcagaatggcaaagtaaaggtttttcagggaaatcaagactccttcacacctgtggtgaactctctagacccaccgttactgactcgctaccttcgaattcacccccagagttgggtgcaccagattgccctgaggatggaggttctgggctgcgaggcacaggacctctacggcgccggatcacctggggccgaaacggccgaacaaaaactcatctcagaagaggatctgtcacctgcaaccggtcatcatcaccatcaccattga

SEQ ID NO: 599 - protein, 1514 aa, synthetic construct
  REGION 1..1514: note = Description of Artificial Sequence: Synthetic polypeptide
ATRGAPGSPAGSPTSTEEGTSESATPESGPGSEPATSGSETPASSATRRYYLGAVELSWDYMQSDLGELPVDARFPPRVPKSFPFNTSVVYKKTLFVEFTDHLFNIAKPRPPWMGLLGPTIQAEVYDTVVITLKNMASHPVSLHAVGVSYWKASEGAEYDDQTSQREKEDDKVFPGGSHTYVWQVLKENGPMASDPLCLTYSYLSHVDLVKDLNSGLIGALLVCREGSLAKEKTQTLHKFILLFAVFDEGKSWHSETKNSLMQDRDAASARAWPKMHTVNGYVNRSLPGLIGCHRKSVYWHVIGMGTTPEVHSIFLEGHTFLVRNHRQASLEISPITFLTAQTLLMDLGQFLLFCHISSHQHDGMEAYVKVDSCPEEPQLRMKNNEEAEDYDDDLTDSEMDVVRFDDDNSPSFIQIRSVAKKHPKTWVHYIAAEEEDWDYAPLVLAPDDRSYKSQYLNNGPQRIGRKYKKVRFMAYTDETFKTREAIQHESGILGPLLYGEVGDTLLIIFKNQASRPYNIYPHGITDVRPLYSRRLPKGVKHLKDFPILPGEIFKYKWTVTVEDGPTKSDPRCLTRYYSSFVNMERDLASGLIGPLLICYKESVDQRGNQIMSDKRNVILFSVFDENRSWYLTENIQRFLPNPAGVQLEDPEFQASNIMHSINGYVFDSLQLSVCLHEVAYWYILSIGAQTDFLSVFFSGYTFKHKMVYEDTLTLFPFSGETVFMSMENPGLWILGCHNSDFRNRGMTALLKVSSCDKNTGDYYEDSYEDISAYLLSKNNAIEPRSFSQNPPVLKRHQREITRTTLQSDQEEIDYDDTISVEMKKEDFDIYDEDENQSPRSFQKKTRHYFIAAVERLWDYGMSSSPHVLRNRAQSGSVPQFKKVVFQEFTDGSFTQPLYRGELNEHLGLLGPYIRAEVEDNIMVTFRNQASRPYSFYSSLISYEEDQRQGAEPRKNFVKPNETKTYFWKVQHHMAPTKDEFDCKAWAYFSDVDLEKDVHSGLIGPLLVCHTNTLNPAHGRQVTVQEFALFFTIFDETKSWYFTENMERNCRAPCNIQMEDPTFKENYRFHAINGYIMDTLPGLVMAQDQRIRWYLLSMGSNENIHSIHFSGHVFTVRKKEEYKMALYNLYPGVFETVEMLPSKAGIWRVECLIGEHLHAGMSTLFLVYSNKCQTPLGMASGHIRDFQITASGQYGQWAPKLARLHYSGSINAWSTKEPFSWIKVDLLAPMIIHGIKTQGARQKFSSLYISQFIIMYSLDGKKWQTYRGNSTGTLMVFFGNVDSSGIKHNIFNPPIIARYIRLHPTHYSIRSTLRMELMGCDLNSCSMPLGMESKAISDAQITASSYFTNMFATWSPSKARLHLQGRSNAWRPQVNNPKEWLQVDFQKTMKVTGVTTQGVKSLLTSMYVKEFLISSSQDGHQWTLFFQNGKVKVFQGNQDSFTPVVNSLDPPLLTRYLRIHPQSWVHQIALRMEVLGCEAQDLYGAGSPGAETAEQKLISEEDLSPATGHHHHHH

SEQ ID NO: 600 - DNA, 4545 bp, synthetic construct
  misc_feature 1..4545: note = Description of Artificial Sequence: Synthetic polynucleotide
  source 1..4545: mol_type = other DNA
gccaccagaggcgcgccaggttctcctgctggctcccccacctcaacagaagaggggacaagcgaaagcgctacgcctgagagtggccctggctctgagccagccacctccggctctgaaacccctgcctcgagcgctacaagaagatactacctgggtgcagtggaactgtcatgggactatatgcaaagtgatctcggtgagctgcctgtggacgcaagatttcctcctagagtgccaaaatcttttccattcaacacctcagtcgtgtacaaaaagactctgtttgtagaattcacggatcaccttttcaacatcgctaagccaaggccaccctggatgggtctgctaggtcctaccatccaggctgaggtttatgatacagtggtcattacacttaagaacatggcttcccatcctgtcagtcttcatgctgttggtgtatcctactggaaagcttctgagggagctgaatatgatgatcagaccagtcaaagggagaaagaagatgataaagtcttccctggtggaagccatacatatgtctggcaggtcctgaaagagaatggtccaatggcctctgacccactgtgccttacctactcatatctttctcatgtggacctggtaaaagacttgaattcaggcctcattggagccctactagtatgtagagaagggagtctggccaaggaaaagacacagaccttgcacaaatttatactactttttgctgtatttgatgaagggaaaagttggcactcagaaacaaagaactccttgatgcaggatagggatgctgcatctgctcgggcctggcctaaaatgcacacagtcaatggttatgtaaacaggtctctgccaggtctgattggatgccacaggaaatcagtctattggcatgtgattggaatgggcaccactcctgaagtgcactcaatattcctcgaaggtcacacatttcttgtgaggaaccatcgccaggctagcttggaaatctcgccaataactttccttactgctcaaacactcttgatggaccttggacagtttctactgttttgtcatatctcttcccaccaacatgatggcatggaagcttatgtcaaagtagacagctgtccagaggaaccccaactacgaatgaaaaataatgaagaagcggaagactatgatgatgatcttactgattctgaaatggatgtggtcaggtttgatgatgacaactctccttcctttatccaaattcgctcagttgccaagaagcatcctaaaacttgggtacattacattgctgctgaagaggaggactgggactatgctcccttagtcctcgcccccgatgacagaagttataaaagtcaatatttgaacaatggccctcagcggattggtaggaagtacaaaaaagtccgatttatggcatacacagatgaaacctttaagactcgtgaagctattcagcatgaatcaggaatcttgggacctttactttatggggaagttggagacacactgttgattatatttaagaatcaagcaagcagaccatataacatctaccctcacggaatcactgatgtccgtcctttgtattcaaggagattaccaaaaggtgtaaaacatttgaaggattttccaattctgccaggagaaatattcaaatataaatggacagtgactgtagaagatgggccaactaaatcagatcctcggtgcctgacccgctattactctagtttcgttaatatggagagagatctagcttcaggactcattggccctctcctcatctgctacaaagaatctgtagatcaaagaggaaaccagataatgtcagacaagaggaatgtcatcctgttttctgtatttgatgagaaccgaagctggtacctcacagagaatatacaacgctttctccccaatccagctggagtgcagcttgaggatccagagttccaagcctccaacatcatgcacagcatcaatggctatgtttttgatagtttgcagttgtcagtttgtttgcatgaggtggcatactggtacattctaagcattggagcacagactgacttcctttctgtcttcttctctggatataccttcaaacacaaaatggtctatgaagacacactcaccctattcccattctcaggagaaactgtcttcatgtcgatggaaaacccaggtctatggattctggggtgccacaactcagactttcggaacagaggcatgaccgccttactgaaggtttctagttgtgacaagaacactggtgattattacgaggacagttatgaagatatttcagcatacttgctgagtaaaaacaatgccattgaaccaagaagcttctctcaaaacccaccagtcttgaaacgccatcaacgggaaataactcgtactactcttcagtcagatcaagaggaaatcgattatgatgataccatatcagttgaaatgaagaaggaagattttgacatttatgatgaggatgaaaatcagagcccccgcagctttcaaaagaaaacacgacactattttattgctgcagtggagaggctctgggattatgggatgagtagctccccacatgttctaagaaacagggctcagagtggcagtgtccctcagttcaagaaagttgttttccaggaatttactgatggctcctttactcagcccttataccgtggagaactaaatgaacatttgggactcctggggccatatataagagcagaagttgaagataatatcatggtaactttcagaaatcaggcctctcgtccctattccttctattctagccttatttcttatgaggaagatcagaggcaaggagcagaacctagaaaaaactttgtcaagcctaatgaaaccaaaacttacttttggaaagtgcaacatcatatggcacccactaaagatgagtttgactgcaaagcctgggcttatttctctgatgttgacctggaaaaagatgtgcactcaggcctgattggaccccttctggtctgccacactaacacactgaaccctgctcatgggagacaagtgacagtacaggaatttgctctgtttttcaccatctttgatgagaccaaaagctggtacttcactgaaaatatggaaagaaactgcagggctccctgcaatatccagatggaagatcccacttttaaagagaattatcgcttccatgcaatcaatggctacataatggatacactacctggcttagtaatggctcaggatcaaaggattcgatggtatctgctcagcatgggcagcaatgaaaacatccattctattcatttcagtggacatgtgttcactgtacgaaaaaaagaggagtataaaatggcactgtacaatctctatccaggtgtttttgagacagtggaaatgttaccatccaaagctggaatttggcgggtggaatgccttattggcgagcatctacatgctgggatgagcacactttttctggtgtacagcaataagtgtcagactcccctgggaatggcttctggacacattagagattttcagattacagcttcaggacaatatggacagtgggccccaaagctggccagacttcattattccggatcaatcaatgcctggagcaccaaggagcccttttcttggatcaaggtggatctgttggcaccaatgattattcacggcatcaagacccagggtgcccgtcagaagttctccagcctctacatctctcagtttatcatcatgtatagtcttgatgggaagaagtggcagacttatcgaggaaattccactggaaccttaatggtcttctttggcaatgtggattcatctgggataaaacacaatatttttaaccctccaattattgctcgatacatccgtttgcacccaactcattatagcattcgcagcactcttcgcatggagttgatgggctgtgatttaaatagttgcagcatgccattgggaatggagagtaaagcaatatcagatgcacagattactgcttcatcctactttaccaatatgtttgccacctggtctccttcaaaagctcgacttcacctccaagggaggagtaatgcctggagacctcaggtgaataatccaaaagagtggctgcaagtggacttccagaagacaatgaaagtcacaggagtaactactcagggagtaaaatctctgcttaccagcatgtatgtgaaggagttcctcatctccagcagtcaagatggccatcagtggactctcttttttcagaatggcaaagtaaaggtttttcagggaaatcaagactccttcacacctgtggtgaactctctagacccaccgttactgactcgctaccttcgaattcacccccagagttgggtgcaccagattgccctgaggatggaggttctgggctgcgaggcacaggacctctacggcgccggatcacctggggccgaaacggccgaacaaaaactcatctcagaagaggatctgtcacctgcaaccggtcatcatcaccatcaccattga

SEQ ID NO: 601 - protein, 1511 aa, synthetic construct
  REGION 1..1511: note = Description of Artificial Sequence: Synthetic polypeptide
ATRRYYLGAVELSWDYMQGAPGSPAGSPTSTEEGTSESATPESGPGSEPATSGSETPASSSDLGELPVDARFPPRVPKSFPFNTSVVYKKTLFVEFTDHLFNIAKPRPPWMGLLGPTIQAEVYDTVVITLKNMASHPVSLHAVGVSYWKASEGAEYDDQTSQREKEDDKVFPGGSHTYVWQVLKENGPMASDPLCLTYSYLSHVDLVKDLNSGLIGALLVCREGSLAKEKTQTLHKFILLFAVFDEGKSWHSETKNSLMQDRDAASARAWPKMHTVNGYVNRSLPGLIGCHRKSVYWHVIGMGTTPEVHSIFLEGHTFLVRNHRQASLEISPITFLTAQTLLMDLGQFLLFCHISSHQHDGMEAYVKVDSCPEEPQLRMKNNEEAEDYDDDLTDSEMDVVRFDDDNSPSFIQIRSVAKKHPKTWVHYIAAEEEDWDYAPLVLAPDDRSYKSQYLNNGPQRIGRKYKKVRFMAYTDETFKTREAIQHESGILGPLLYGEVGDTLLIIFKNQASRPYNIYPHGITDVRPLYSRRLPKGVKHLKDFPILPGEIFKYKWTVTVEDGPTKSDPRCLTRYYSSFVNMERDLASGLIGPLLICYKESVDQRGNQIMSDKRNVILFSVFDENRSWYLTENIQRFLPNPAGVQLEDPEFQASNIMHSINGYVFDSLQLSVCLHEVAYWYILSIGAQTDFLSVFFSGYTFKHKMVYEDTLTLFPFSGETVFMSMENPGLWILGCHNSDFRNRGMTALLKVSSCDKNTGDYYEDSYEDISAYLLSKNNAIEPRSFSQNPPVLKRHQREITRTTLQSDQEEIDYDDTISVEMKKEDFDIYDEDENQSPRSFQKKTRHYFIAAVERLWDYGMSSSPHVLRNRAQSGSVPQFKKVVFQEFTDGSFTQPLYRGELNEHLGLLGPYIRAEVEDNIMVTFRNQASRPYSFYSSLISYEEDQRQGAEPRKNFVKPNETKTYFWKVQHHMAPTKDEFDCKAWAYFSDVDLEKDVHSGLIGPLLVCHTNTLNPAHGRQVTVQEFALFFTIFDETKSWYFTENMERNCRAPCNIQMEDPTFKENYRFHAINGYIMDTLPGLVMAQDQRIRWYLLSMGSNENIHSIHFSGHVFTVRKKEEYKMALYNLYPGVFETVEMLPSKAGIWRVECLIGEHLHAGMSTLFLVYSNKCQTPLGMASGHIRDFQITASGQYGQWAPKLARLHYSGSINAWSTKEPFSWIKVDLLAPMIIHGIKTQGARQKFSSLYISQFIIMYSLDGKKWQTYRGNSTGTLMVFFGNVDSSGIKHNIFNPPIIARYIRLHPTHYSIRSTLRMELMGCDLNSCSMPLGMESKAISDAQITASSYFTNMFATWSPSKARLHLQGRSNAWRPQVNNPKEWLQVDFQKTMKVTGVTTQGVKSLLTSMYVKEFLISSSQDGHQWTLFFQNGKVKVFQGNQDSFTPVVNSLDPPLLTRYLRIHPQSWVHQIALRMEVLGCEAQDLYGAGSPGAETAEQKLISEEDLSPATGHHHHHH

SEQ ID NO: 602 - DNA, 4536 bp, synthetic construct
  misc_feature 1..4536: note = Description of Artificial Sequence: Synthetic polynucleotide
  source 1..4536: mol_type = other DNA
gccaccagaagatactacctgggtgcagtggaactgtcatgggactatatgcaaggcgcgccaggttctcctgctggctcccccacctcaacagaagaggggacaagcgaaagcgctacgcctgagagtggccctggctctgagccagccacctccggctctgaaacccctgcctcgagcagtgatctcggtgagctgcctgtggacgcaagatttcctcctagagtgccaaaatcttttccattcaacacctcagtcgtgtacaaaaagactctgtttgtagaattcacggatcaccttttcaacatcgctaagccaaggccaccctggatgggtctgctaggtcctaccatccaggctgaggtttatgatacagtggtcattacacttaagaacatggcttcccatcctgtcagtcttcatgctgttggtgtatcctactggaaagcttctgagggagctgaatatgatgatcagaccagtcaaagggagaaagaagatgataaagtcttccctggtggaagccatacatatgtctggcaggtcctgaaagagaatggtccaatggcctctgacccactgtgccttacctactcatatctttctcatgtggacctggtaaaagacttgaattcaggcctcattggagccctactagtatgtagagaagggagtctggccaaggaaaagacacagaccttgcacaaatttatactactttttgctgtatttgatgaagggaaaagttggcactcagaaacaaagaactccttgatgcaggatagggatgctgcatctgctcgggcctggcctaaaatgcacacagtcaatggttatgtaaacaggtctctgccaggtctgattggatgccacaggaaatcagtctattggcatgtgattggaatgggcaccactcctgaagtgcactcaatattcctcgaaggtcacacatttcttgtgaggaaccatcgccaggctagcttggaaatctcgccaataactttccttactgctcaaacactcttgatggaccttggacagtttctactgttttgtcatatctcttcccaccaacatgatggcatggaagcttatgtcaaagtagacagctgtccagaggaaccccaactacgaatgaaaaataatgaagaagcggaagactatgatgatgatcttactgattctgaaatggatgtggtcaggtttgatgatgacaactctccttcctttatccaaattcgctcagttgccaagaagcatcctaaaacttgggtacattacattgctgctgaagaggaggactgggactatgctcccttagtcctcgcccccgatgacagaagttataaaagtcaatatttgaacaatggccctcagcggattggtaggaagtacaaaaaagtccgatttatggcatacacagatgaaacctttaagactcgtgaagctattcagcatgaatcaggaatcttgggacctttactttatggggaagttggagacacactgttgattatatttaagaatcaagcaagcagaccatataacatctaccctcacggaatcactgatgtccgtcctttgtattcaaggagattaccaaaaggtgtaaaacatttgaaggattttccaattctgccaggagaaatattcaaatataaatggacagtgactgtagaagatgggccaactaaatcagatcctcggtgcctgacccgctattactctagtttcgttaatatggagagagatctagcttcaggactcattggccctctcctcatctgctacaaagaatctgtagatcaaagaggaaaccagataatgtcagacaagaggaatgtcatcctgttttctgtatttgatgagaaccgaagctggtacctcacagagaatatacaacgctttctccccaatccagctggagtgcagcttgaggatccagagttccaagcctccaacatcatgcacagcatcaatggctatgtttttgatagtttgcagttgtcagtttgtttgcatgaggtggcatactggtacattctaagcattggagcacagactgacttcctttctgtcttcttctctggatataccttcaaacacaaaatggtctatgaagacacactcaccctattcccattctcaggagaaactgtcttcatgtcgatggaaaacccaggtctatggattctggggtgccacaactcagactttcggaacagaggcatgaccgccttactgaaggtttctagttgtgacaagaacactggtgattattacgaggacagttatgaagatatttcagcatacttgctgagtaaaaacaatgccattgaaccaagaagcttctctcaaaacccaccagtcttgaaacgccatcaacgggaaataactcgtactactcttcagtcagatcaagaggaaatcgattatgatgataccatatcagttgaaatgaagaaggaagattttgacatttatgatgaggatgaaaatcagagcccccgcagctttcaaaagaaaacacgacactattttattgctgcagtggagaggctctgggattatgggatgagtagctccccacatgttctaagaaacagggctcagagtggcagtgtccctcagttcaagaaagttgttttccaggaatttactgatggctcctttactcagcccttataccgtggagaactaaatgaacatttgggactcctggggccatatataagagcagaagttgaagataatatcatggtaactttcagaaatcaggcctctcgtccctattccttctattctagccttatttcttatgaggaagatcagaggcaaggagcagaacctagaaaaaactttgtcaagcctaatgaaaccaaaacttacttttggaaagtgcaacatcatatggcacccactaaagatgagtttgactgcaaagcctgggcttatttctctgatgttgacctggaaaaagatgtgcactcaggcctgattggaccccttctggtctgccacactaacacactgaaccctgctcatgggagacaagtgacagtacaggaatttgctctgtttttcaccatctttgatgagaccaaaagctggtacttcactgaaaatatggaaagaaactgcagggctccctgcaatatccagatggaagatcccacttttaaagagaattatcgcttccatgcaatcaatggctacataatggatacactacctggcttagtaatggctcaggatcaaaggattcgatggtatctgctcagcatgggcagcaatgaaaacatccattctattcatttcagtggacatgtgttcactgtacgaaaaaaagaggagtataaaatggcactgtacaatctctatccaggtgtttttgagacagtggaaatgttaccatccaaagctggaatttggcgggtggaatgccttattggcgagcatctacatgctgggatgagcacactttttctggtgtacagcaataagtgtcagactcccctgggaatggcttctggacacattagagattttcagattacagcttcaggacaatatggacagtgggccccaaagctggccagacttcattattccggatcaatcaatgcctggagcaccaaggagcccttttcttggatcaaggtggatctgttggcaccaatgattattcacggcatcaagacccagggtgcccgtcagaagttctccagcctctacatctctcagtttatcatcatgtatagtcttgatgggaagaagtggcagacttatcgaggaaattccactggaaccttaatggtcttctttggcaatgtggattcatctgggataaaacacaatatttttaaccctccaattattgctcgatacatccgtttgcacccaactcattatagcattcgcagcactcttcgcatggagttgatgggctgtgatttaaatagttgcagcatgccattgggaatggagagtaaagcaatatcagatgcacagattactgcttcatcctactttaccaatatgtttgccacctggtctccttcaaaagctcgacttcacctccaagggaggagtaatgcctggagacctcaggtgaataatccaaaagagtggctgcaagtggacttccagaagacaatgaaagtcacaggagtaactactcagggagtaaaatctctgcttaccagcatgtatgtgaaggagttcctcatctccagcagtcaagatggccatcagtggactctcttttttcagaatggcaaagtaaaggtttttcagggaaatcaagactccttcacacctgtggtgaactctctagacccaccgttactgactcgctaccttcgaattcacccccagagttgggtgcaccagattgccctgaggatggaggttctgggctgcgaggcacaggacctctacggcgccggatcacctggggccgaaacggccgaacaaaaactcatctcagaagaggatctgtcacctgcaaccggtcatcatcaccatcaccattga

SEQ ID NO: 603 - protein, 1511 aa, synthetic construct
  REGION 1..1511: note = Description of Artificial Sequence: Synthetic polypeptide
ATRRYYLGAVELSWDYMQSDLGGAPGSPAGSPTSTEEGTSESATPESGPGSEPATSGSETPASSELPVDARFPPRVPKSFPFNTSVVYKKTLFVEFTDHLFNIAKPRPPWMGLLGPTIQAEVYDTVVITLKNMASHPVSLHAVGVSYWKASEGAEYDDQTSQREKEDDKVFPGGSHTYVWQVLKENGPMASDPLCLTYSYLSHVDLVKDLNSGLIGALLVCREGSLAKEKTQTLHKFILLFAVFDEGKSWHSETKNSLMQDRDAASARAWPKMHTVNGYVNRSLPGLIGCHRKSVYWHVIGMGTTPEVHSIFLEGHTFLVRNHRQASLEISPITFLTAQTLLMDLGQFLLFCHISSHQHDGMEAYVKVDSCPEEPQLRMKNNEEAEDYDDDLTDSEMDVVRFDDDNSPSFIQIRSVAKKHPKTWVHYIAAEEEDWDYAPLVLAPDDRSYKSQYLNNGPQRIGRKYKKVRFMAYTDETFKTREAIQHESGILGPLLYGEVGDTLLIIFKNQASRPYNIYPHGITDVRPLYSRRLPKGVKHLKDFPILPGEIFKYKWTVTVEDGPTKSDPRCLTRYYSSFVNMERDLASGLIGPLLICYKESVDQRGNQIMSDKRNVILFSVFDENRSWYLTENIQRFLPNPAGVQLEDPEFQASNIMHSINGYVFDSLQLSVCLHEVAYWYILSIGAQTDFLSVFFSGYTFKHKMVYEDTLTLFPFSGETVFMSMENPGLWILGCHNSDFRNRGMTALLKVSSCDKNTGDYYEDSYEDISAYLLSKNNAIEPRSFSQNPPVLKRHQREITRTTLQSDQEEIDYDDTISVEMKKEDFDIYDEDENQSPRSFQKKTRHYFIAAVERLWDYGMSSSPHVLRNRAQSGSVPQFKKVVFQEFTDGSFTQPLYRGELNEHLGLLGPYIRAEVEDNIMVTFRNQASRPYSFYSSLISYEEDQRQGAEPRKNFVKPNETKTYFWKVQHHMAPTKDEFDCKAWAYFSDVDLEKDVHSGLIGPLLVCHTNTLNPAHGRQVTVQEFALFFTIFDETKSWYFTENMERNCRAPCNIQMEDPTFKENYRFHAINGYIMDTLPGLVMAQDQRIRWYLLSMGSNENIHSIHFSGHVFTVRKKEEYKMALYNLYPGVFETVEMLPSKAGIWRVECLIGEHLHAGMSTLFLVYSNKCQTPLGMASGHIRDFQITASGQYGQWAPKLARLHYSGSINAWSTKEPFSWIKVDLLAPMIIHGIKTQGARQKFSSLYISQFIIMYSLDGKKWQTYRGNSTGTLMVFFGNVDSSGIKHNIFNPPIIARYIRLHPTHYSIRSTLRMELMGCDLNSCSMPLGMESKAISDAQITASSYFTNMFATWSPSKARLHLQGRSNAWRPQVNNPKEWLQVDFQKTMKVTGVTTQGVKSLLTSMYVKEFLISSSQDGHQWTLFFQNGKVKVFQGNQDSFTPVVNSLDPPLLTRYLRIHPQSWVHQIALRMEVLGCEAQDLYGAGSPGAETAEQKLISEEDLSPATGHHHHHH

SEQ ID NO: 604 - DNA, 4536 bp, synthetic construct
  misc_feature 1..4536: note = Description of Artificial Sequence: Synthetic polynucleotide
  source 1..4536: mol_type = other DNA
gccaccagaagatactacctgggtgcagtggaactgtcatgggactatatgcaaagtgatctcggtggcgcgccaggttctcctgctggctcccccacctcaacagaagaggggacaagcgaaagcgctacgcctgagagtggccctggctctgagccagccacctccggctctgaaacccctgcctcgagcgagctgcctgtggacgcaagatttcctcctagagtgccaaaatcttttccattcaacacctcagtcgtgtacaaaaagactctgtttgtagaattcacggatcaccttttcaacatcgctaagccaaggccaccctggatgggtctgctaggtcctaccatccaggctgaggtttatgatacagtggtcattacacttaagaacatggcttcccatcctgtcagtcttcatgctgttggtgtatcctactggaaagcttctgagggagctgaatatgatgatcagaccagtcaaagggagaaagaagatgataaagtcttccctggtggaagccatacatatgtctggcaggtcctgaaagagaatggtccaatggcctctgacccactgtgccttacctactcatatctttctcatgtggacctggtaaaagacttgaattcaggcctcattggagccctactagtatgtagagaagggagtctggccaaggaaaagacacagaccttgcacaaatttatactactttttgctgtatttgatgaagggaaaagttggcactcagaaacaaagaactccttgatgcaggatagggatgctgcatctgctcgggcctggcctaaaatgcacacagtcaatggttatgtaaacaggtctctgccaggtctgattggatgccacaggaaatcagtctattggcatgtgattggaatgggcaccactcctgaagtgcactcaatattcctcgaaggtcacacatttcttgtgaggaaccatcgccaggctagcttggaaatctcgccaataactttccttactgctcaaacactcttgatggaccttggacagtttctactgttttgtcatatctcttcccaccaacatgatggcatggaagcttatgtcaaagtagacagctgtccagaggaaccccaactacgaatgaaaaataatgaagaagcggaagactatgatgatgatcttactgattctgaaatggatgtggtcaggtttgatgatgacaactctccttcctttatccaaattcgctcagttgccaagaagcatcctaaaacttgggtacattacattgctgctgaagaggaggactgggactatgctcccttagtcctcgcccccgatgacagaagttataaaagtcaatatttgaacaatggccctcagcggattggtaggaagtacaaaaaagtccgatttatggcatacacagatgaaacctttaagactcgtgaagctattcagcatgaatcaggaatcttgggacctttactttatggggaagttggagacacactgttgattatatttaagaatcaagcaagcagaccatataacatctaccctcacggaatcactgatgtccgtcctttgtattcaaggagattaccaaaaggtgtaaaacatttgaaggattttccaattctgccaggagaaatattcaaatataaatggacagtgactgtagaagatgggccaactaaatcagatcctcggtgcctgacccgctattactctagtttcgttaatatggagagagatctagcttcaggactcattggccctctcctcatctgctacaaagaatctgtagatcaaagaggaaaccagataatgtcagacaagaggaatgtcatcctgttttctgtatttgatgagaaccgaagctggtacctcacagagaatatacaacgctttctccccaatccagctggagtgcagcttgaggatccagagttccaagcctccaacatcatgcacagcatcaatggctatgtttttgatagtttgcagttgtcagtttgtttgcatgaggtggcatactggtacattctaagcattggagcacagactgacttcctttctgtcttcttctctggatataccttcaaacacaaaatggtctatgaagacacactcaccctattcccattctcaggagaaactgtcttcatgtcgatggaaaacccaggtctatggattctggggtgccacaactcagactttcggaacagaggcatgaccgccttactgaaggtttctagttgtgacaagaacactggtgattattacgaggacagttatgaagatatttcagcatacttgctgagtaaaaacaatgccattgaaccaagaagcttctctcaaaacccaccagtcttgaaacgccatcaacgggaaataactcgtactactcttcagtcagatcaagaggaaatcgattatgatgataccatatcagttgaaatgaagaaggaagattttgacatttatgatgaggatgaaaatcagagcccccgcagctttcaaaagaaaacacgacactattttattgctgcagtggagaggctctgggattatgggatgagtagctccccacatgttctaagaaacagggctcagagtggcagtgtccctcagttcaagaaagttgttttccaggaatttactgatggctcctttactcagcccttataccgtggagaactaaatgaacatttgggactcctggggccatatataagagcagaagttgaagataatatcatggtaactttcagaaatcaggcctctcgtccctattccttctattctagccttatttcttatgaggaagatcagaggcaaggagcagaacctagaaaaaactttgtcaagcctaatgaaaccaaaacttacttttggaaagtgcaacatcatatggcacccactaaagatgagtttgactgcaaagcctgggcttatttctctgatgttgacctggaaaaagatgtgcactcaggcctgattggaccccttctggtctgccacactaacacactgaaccctgctcatgggagacaagtgacagtacaggaatttgctctgtttttcaccatctttgatgagaccaaaagctggtacttcactgaaaatatggaaagaaactgcagggctccctgcaatatccagatggaagatcccacttttaaagagaattatcgcttccatgcaatcaatggctacataatggatacactacctggcttagtaatggctcaggatcaaaggattcgatggtatctgctcagcatgggcagcaatgaaaacatccattctattcatttcagtggacatgtgttcactgtacgaaaaaaagaggagtataaaatggcactgtacaatctctatccaggtgtttttgagacagtggaaatgttaccatccaaagctggaatttggcgggtggaatgccttattggcgagcatctacatgctgggatgagcacactttttctggtgtacagcaataagtgtcagactcccctgggaatggcttctggacacattagagattttcagattacagcttcaggacaatatggacagtgggccccaaagctggccagacttcattattccggatcaatcaatgcctggagcaccaaggagcccttttcttggatcaaggtggatctgttggcaccaatgattattcacggcatcaagacccagggtgcccgtcagaagttctccagcctctacatctctcagtttatcatcatgtatagtcttgatgggaagaagtggcagacttatcgaggaaattccactggaaccttaatggtcttctttggcaatgtggattcatctgggataaaacacaatatttttaaccctccaattattgctcgatacatccgtttgcacccaactcattatagcattcgcagcactcttcgcatggagttgatgggctgtgatttaaatagttgcagcatgccattgggaatggagagtaaagcaatatcagatgcacagattactgcttcatcctactttaccaatatgtttgccacctggtctccttcaaaagctcgacttcacctccaagggaggagtaatgcctggagacctcaggtgaataatccaaaagagtggctgcaagtggacttccagaagacaatgaaagtcacaggagtaactactcagggagtaaaatctctgcttaccagcatgtatgtgaaggagttcctcatctccagcagtcaagatggccatcagtggactctcttttttcagaatggcaaagtaaaggtttttcagggaaatcaagactccttcacacctgtggtgaactctctagacccaccgttactgactcgctaccttcgaattcacccccagagttgggtgcaccagattgccctgaggatggaggttctgggctgcgaggcacaggacctctacggcgccggatcacctggggccgaaacggccgaacaaaaactcatctcagaagaggatctgtcacctgcaaccggtcatcatcaccatcaccattga

SEQ ID NO: 605 - protein, 1511 aa, synthetic construct
  REGION 1..1511: note = Description of Artificial Sequence: Synthetic polypeptide
ATRRYYLGAVELSWDYMQSDLGELPVGAPGSPAGSPTSTEEGTSESATPESGPGSEPATSGSETPASSDARFPPRVPKSFPFNTSVVYKKTLFVEFTDHLFNIAKPRPPWMGLLGPTIQAEVYDTVVITLKNMASHPVSLHAVGVSYWKASEGAEYDDQTSQREKEDDKVFPGGSHTYVWQVLKENGPMASDPLCLTYSYLSHVDLVKDLNSGLIGALLVCREGSLAKEKTQTLHKFILLFAVFDEGKSWHSETKNSLMQDRDAASARAWPKMHTVNGYVNRSLPGLIGCHRKSVYWHVIGMGTTPEVHSIFLEGHTFLVRNHRQASLEISPITFLTAQTLLMDLGQFLLFCHISSHQHDGMEAYVKVDSCPEEPQLRMKNNEEAEDYDDDLTDSEMDVVRFDDDNSPSFIQIRSVAKKHPKTWVHYIAAEEEDWDYAPLVLAPDDRSYKSQYLNNGPQRIGRKYKKVRFMAYTDETFKTREAIQHESGILGPLLYGEVGDTLLIIFKNQASRPYNIYPHGITDVRPLYSRRLPKGVKHLKDFPILPGEIFKYKWTVTVEDGPTKSDPRCLTRYYSSFVNMERDLASGLIGPLLICYKESVDQRGNQIMSDKRNVILFSVFDENRSWYLTENIQRFLPNPAGVQLEDPEFQASNIMHSINGYVFDSLQLSVCLHEVAYWYILSIGAQTDFLSVFFSGYTFKHKMVYEDTLTLFPFSGETVFMSMENPGLWILGCHNSDFRNRGMTALLKVSSCDKNTGDYYEDSYEDISAYLLSKNNAIEPRSFSQNPPVLKRHQREITRTTLQSDQEEIDYDDTISVEMKKEDFDIYDEDENQSPRSFQKKTRHYFIAAVERLWDYGMSSSPHVLRNRAQSGSVPQFKKVVFQEFTDGSFTQPLYRGELNEHLGLLGPYIRAEVEDNIMVTFRNQASRPYSFYSSLISYEEDQRQGAEPRKNFVKPNETKTYFWKVQHHMAPTKDEFDCKAWAYFSDVDLEKDVHSGLIGPLLVCHTNTLNPAHGRQVTVQEFALFFTIFDETKSWYFTENMERNCRAPCNIQMEDPTFKENYRFHAINGYIMDTLPGLVMAQDQRIRWYLLSMGSNENIHSIHFSGHVFTVRKKEEYKMALYNLYPGVFETVEMLPSKAGIWRVECLIGEHLHAGMSTLFLVYSNKCQTPLGMASGHIRDFQITASGQYGQWAPKLARLHYSGSINAWSTKEPFSWIKVDLLAPMIIHGIKTQGARQKFSSLYISQFIIMYSLDGKKWQTYRGNSTGTLMVFFGNVDSSGIKHNIFNPPIIARYIRLHPTHYSIRSTLRMELMGCDLNSCSMPLGMESKAISDAQITASSYFTNMFATWSPSKARLHLQGRSNAWRPQVNNPKEWLQVDFQKTMKVTGVTTQGVKSLLTSMYVKEFLISSSQDGHQWTLFFQNGKVKVFQGNQDSFTPVVNSLDPPLLTRYLRIHPQSWVHQIALRMEVLGCEAQDLYGAGSPGAETAEQKLISEEDLSPATGHHHHHH

SEQ ID NO: 606 - DNA, 4536 bp, synthetic construct
  misc_feature 1..4536: note = Description of Artificial Sequence: Synthetic polynucleotide
  source 1..4536: mol_type = other DNA
gccaccagaagatactacctgggtgcagtggaactgtcatgggactatatgcaaagtgatctcggtgagctgcctgtgggcgcgccaggttctcctgctggctcccccacctcaacagaagaggggacaagcgaaagcgctacgcctgagagtggccctggctctgagccagccacctccggctctgaaacccctgcctcgagcgacgcaagatttcctcctagagtgccaaaatcttttccattcaacacctcagtcgtgtacaaaaagactctgtttgtagaattcacggatcaccttttcaacatcgctaagccaaggccaccctggatgggtctgctaggtcctaccatccaggctgaggtttatgatacagtggtcattacacttaagaacatggcttcccatcctgtcagtcttcatgctgttggtgtatcctactggaaagcttctgagggagctgaatatgatgatcagaccagtcaaagggagaaagaagatgataaagtcttccctggtggaagccatacatatgtctggcaggtcctgaaagagaatggtccaatggcctctgacccactgtgccttacctactcatatctttctcatgtggacctggtaaaagacttgaattcaggcctcattggagccctactagtatgtagagaagggagtctggccaaggaaaagacacagaccttgcacaaatttatactactttttgctgtatttgatgaagggaaaagttggcactcagaaacaaagaactccttgatgcaggatagggatgctgcatctgctcgggcctggcctaaaatgcacacagtcaatggttatgtaaacaggtctctgccaggtctgattggatgccacaggaaatcagtctattggcatgtgattggaatgggcaccactcctgaagtgcactcaatattcctcgaaggtcacacatttcttgtgaggaaccatcgccaggctagcttggaaatctcgccaataactttccttactgctcaaacactcttgatggaccttggacagtttctactgttttgtcatatctcttcccaccaacatgatggcatggaagcttatgtcaaagtagacagctgtccagaggaaccccaactacgaatgaaaaataatgaagaagcggaagactatgatgatgatcttactgattctgaaatggatgtggtcaggtttgatgatgacaactctccttcctttatccaaattcgctcagttgccaagaagcatcctaaaacttgggtacattacattgctgctgaagaggaggactgggactatgctcccttagtcctcgcccccgatgacagaagttataaaagtcaatatttgaacaatggccctcagcggattggtaggaagtacaaaaaagtccgatttatggcatacacagatgaaacctttaagactcgtgaagctattcagcatgaatcaggaatcttgggacctttactttatggggaagttggagacacactgttgattatatttaagaatcaagcaagcagaccatataacatctaccctcacggaatcactgatgtccgtcctttgtattcaaggagattaccaaaaggtgtaaaacatttgaaggattttccaattctgccaggagaaatattcaaatataaatggacagtgactgtagaagatgggccaactaaatcagatcctcggtgcctgacccgctattactctagtttcgttaatatggagagagatctagcttcaggactcattggccctctcctcatctgctacaaagaatctgtagatcaaagaggaaaccagataatgtcagacaagaggaatgtcatcctgttttctgtatttgatgagaaccgaagctggtacctcacagagaatatacaacgctttctccccaatccagctggagtgcagcttgaggatccagagttccaagcctccaacatcatgcacagcatcaatggctatgtttttgatagtttgcagttgtcagtttgtttgcatgaggtggcatactggtacattctaagcattggagcacagactgacttcctttctgtcttcttctctggatataccttcaaacacaaaatggtctatgaagacacactcaccctattcccattctcaggagaaactgtcttcatgtcgatggaaaacccaggtctatggattctggggtgccacaactcagactttcggaacagaggcatgaccgccttactgaaggtttctagttgtgacaagaacactggtgattattacgaggacagttatgaagatatttcagcatacttgctgagtaaaaacaatgccattgaaccaagaagcttctctcaaaacccaccagtcttgaaacgccatcaacgggaaataactcgtactactcttcagtcagatcaagaggaaatcgattatgatgataccatatcagttgaaatgaagaaggaagattttgacatttatgatgaggatgaaaatcagagcccccgcagctttcaaaagaaaacacgacactattttattgctgcagtggagaggctctgggattatgggatgagtagctccccacatgttctaagaaacagggctcagagtggcagtgtccctcagttcaagaaagttgttttccaggaatttactgatggctcctttactcagcccttataccgtggagaactaaatgaacatttgggactcctggggccatatataagagcagaagttgaagataatatcatggtaactttcagaaatcaggcctctcgtccctattccttctattctagccttatttcttatgaggaagatcagaggcaaggagcagaacctagaaaaaactttgtcaagcctaatgaaaccaaaacttacttttggaaagtgcaacatcatatggcacccactaaagatgagtttgactgcaaagcctgggcttatttctctgatgttgacctggaaaaagatgtgcactcaggcctgattggaccccttctggtctgccacactaacacactgaaccctgctcatgggagacaagtgacagtacaggaatttgctctgtttttcaccatctttgatgagaccaaaagctggtacttcactgaaaatatggaaagaaactgcagggctccctgcaatatccagatggaagatcccacttttaaagagaattatcgcttccatgcaatcaatggctacataatggatacactacctggcttagtaatggctcaggatcaaaggattcgatggtatctgctcagcatgggcagcaatgaaaacatccattctattcatttcagtggacatgtgttcactgtacgaaaaaaagaggagtataaaatggcactgtacaatctctatccaggtgtttttgagacagtggaaatgttaccatccaaagctggaatttggcgggtggaatgccttattggcgagcatctacatgctgggatgagcacactttttctggtgtacagcaataagtgtcagactcccctgggaatggcttctggacacattagagattttcagattacagcttcaggacaatatggacagtgggccccaaagctggccagacttcattattccggatcaatcaatgcctggagcaccaaggagcccttttcttggatcaaggtggatctgttggcaccaatgattattcacggcatcaagacccagggtgcccgtcagaagttctccagcctctacatctctcagtttatcatcatgtatagtcttgatgggaagaagtggcagacttatcgaggaaattccactggaaccttaatggtcttctttggcaatgtggattcatctgggataaaacacaatatttttaaccctccaattattgctcgatacatccgtttgcacccaactcattatagcattcgcagcactcttcgcatggagttgatgggctgtgatttaaatagttgcagcatgccattgggaatggagagtaaagcaatatcagatgcacagattactgcttcatcctactttaccaatatgtttgccacctggtctccttcaaaagctcgacttcacctccaagggaggagtaatgcctggagacctcaggtgaataatccaaaagagtggctgcaagtggacttccagaagacaatgaaagtcacaggagtaactactcagggagtaaaatctctgcttaccagcatgtatgtgaaggagttcctcatctccagcagtcaagatggccatcagtggactctcttttttcagaatggcaaagtaaaggtttttcagggaaatcaagactccttcacacctgtggtgaactctctagacccaccgttactgactcgctaccttcgaattcacccccagagttgggtgcaccagattgccctgaggatggaggttctgggctgcgaggcacaggacctctacggcgccggatcacctggggccgaaacggccgaacaaaaactcatctcagaagaggatctgtcacctgcaaccggtcatcatcaccatcaccattga

SEQ ID NO: 607 - protein, 1511 aa, synthetic construct
  REGION 1..1511: note = Description of Artificial Sequence: Synthetic polypeptide
ATRRYYLGAVELSWDYMQSDLGELPVDARFPPRVPKSFPFGAPGSPAGSPTSTEEGTSESATPESGPGSEPATSGSETPASSNTSVVYKKTLFVEFTDHLFNIAKPRPPWMGLLGPTIQAEVYDTVVITLKNMASHPVSLHAVGVSYWKASEGAEYDDQTSQREKEDDKVFPGGSHTYVWQVLKENGPMASDPLCLTYSYLSHVDLVKDLNSGLIGALLVCREGSLAKEKTQTLHKFILLFAVFDEGKSWHSETKNSLMQDRDAASARAWPKMHTVNGYVNRSLPGLIGCHRKSVYWHVIGMGTTPEVHSIFLEGHTFLVRNHRQASLEISPITFLTAQTLLMDLGQFLLFCHISSHQHDGMEAYVKVDSCPEEPQLRMKNNEEAEDYDDDLTDSEMDVVRFDDDNSPSFIQIRSVAKKHPKTWVHYIAAEEEDWDYAPLVLAPDDRSYKSQYLNNGPQRIGRKYKKVRFMAYTDETFKTREAIQHESGILGPLLYGEVGDTLLIIFKNQASRPYNIYPHGITDVRPLYSRRLPKGVKHLKDFPILPGEIFKYKWTVTVEDGPTKSDPRCLTRYYSSFVNMERDLASGLIGPLLICYKESVDQRGNQIMSDKRNVILFSVFDENRSWYLTENIQRFLPNPAGVQLEDPEFQASNIMHSINGYVFDSLQLSVCLHEVAYWYILSIGAQTDFLSVFFSGYTFKHKMVYEDTLTLFPFSGETVFMSMENPGLWILGCHNSDFRNRGMTALLKVSSCDKNTGDYYEDSYEDISAYLLSKNNAIEPRSFSQNPPVLKRHQREITRTTLQSDQEEIDYDDTISVEMKKEDFDIYDEDENQSPRSFQKKTRHYFIAAVERLWDYGMSSSPHVLRNRAQSGSVPQFKKVVFQEFTDGSFTQPLYRGELNEHLGLLGPYIRAEVEDNIMVTFRNQASRPYSFYSSLISYEEDQRQGAEPRKNFVKPNETKTYFWKVQHHMAPTKDEFDCKAWAYFSDVDLEKDVHSGLIGPLLVCHTNTLNPAHGRQVTVQEFALFFTIFDETKSWYFTENMERNCRAPCNIQMEDPTFKENYRFHAINGYIMDTLPGLVMAQDQRIRWYLLSMGSNENIHSIHFSGHVFTVRKKEEYKMALYNLYPGVFETVEMLPSKAGIWRVECLIGEHLHAGMSTLFLVYSNKCQTPLGMASGHIRDFQITASGQYGQWAPKLARLHYSGSINAWSTKEPFSWIKVDLLAPMIIHGIKTQGARQKFSSLYISQFIIMYSLDGKKWQTYRGNSTGTLMVFFGNVDSSGIKHNIFNPPIIARYIRLHPTHYSIRSTLRMELMGCDLNSCSMPLGMESKAISDAQITASSYFTNMFATWSPSKARLHLQGRSNAWRPQVNNPKEWLQVDFQKTMKVTGVTTQGVKSLLTSMYVKEFLISSSQDGHQWTLFFQNGKVKVFQGNQDSFTPVVNSLDPPLLTRYLRIHPQSWVHQIALRMEVLGCEAQDLYGAGSPGAETAEQKLISEEDLSPATGHHHHHH

SEQ ID NO: 608 - DNA, 4536 bp, synthetic construct
  misc_feature 1..4536: note = Description of Artificial Sequence: Synthetic polynucleotide
  source 1..4536: mol_type = other DNA
gccaccagaagatactacctgggtgcagtggaactgtcatgggactatatgcaaagtgatctcggtgagctgcctgtggacgcaagatttcctcctagagtgccaaaatcttttccattcggcgcgccaggttctcctgctggctcccccacctcaacagaagaggggacaagcgaaagcgctacgcctgagagtggccctggctctgagccagccacctccggctctgaaacccctgcctcgagcaacacctcagtcgtgtacaaaaagactctgtttgtagaattcacggatcaccttttcaacatcgctaagccaaggccaccctggatgggtctgctaggtcctaccatccaggctgaggtttatgatacagtggtcattacacttaagaacatggcttcccatcctgtcagtcttcatgctgttggtgtatcctactggaaagcttctgagggagctgaatatgatgatcagaccagtcaaagggagaaagaagatgataaagtcttccctggtggaagccatacatatgtctggcaggtcctgaaagagaatggtccaatggcctctgacccactgtgccttacctactcatatctttctcatgtggacctggtaaaagacttgaattcaggcctcattggagccctactagtatgtagagaagggagtctggccaaggaaaagacacagaccttgcacaaatttatactactttttgctgtatttgatgaagggaaaagttggcactcagaaacaaagaactccttgatgcaggatagggatgctgcatctgctcgggcctggcctaaaatgcacacagtcaatggttatgtaaacaggtctctgccaggtctgattggatgccacaggaaatcagtctattggcatgtgattggaatgggcaccactcctgaagtgcactcaatattcctcgaaggtcacacatttcttgtgaggaaccatcgccaggctagcttggaaatctcgccaataactttccttactgctcaaacactcttgatggaccttggacagtttctactgttttgtcatatctcttcccaccaacatgatggcatggaagcttatgtcaaagtagacagctgtccagaggaaccccaactacgaatgaaaaataatgaagaagcggaagactatgatgatgatcttactgattctgaaatggatgtggtcaggtttgatgatgacaactctccttcctttatccaaattcgctcagttgccaagaagcatcctaaaacttgggtacattacattgctgctgaagaggaggactgggactatgctcccttagtcctcgcccccgatgacagaagttataaaagtcaatatttgaacaatggccctcagcggattggtaggaagtacaaaaaagtccgatttatggcatacacagatgaaacctttaagactcgtgaagctattcagcatgaatcaggaatcttgggacctttactttatggggaagttggagacacactgttgattatatttaagaatcaagcaagcagaccatataacatctaccctcacggaatcactgatgtccgtcctttgtattcaaggagattaccaaaaggtgtaaaacatttgaaggattttccaattctgccaggagaaatattcaaatataaatggacagtgactgtagaagatgggccaactaaatcagatcctcggtgcctgacccgctattactctagtttcgttaatatggagagagatctagcttcaggactcattggccctctcctcatctgctacaaagaatctgtagatcaaagaggaaaccagataatgtcagacaagaggaatgtcatcctgttttctgtatttgatgagaaccgaagctggtacctcacagagaatatacaacgctttctccccaatccagctggagtgcagcttgaggatccagagttccaagcctccaacatcatgcacagcatcaatggctatgtttttgatagtttgcagttgtcagtttgtttgcatgaggtggcatactggtacattctaagcattggagcacagactgacttcctttctgtcttcttctctggatataccttcaaacacaaaatggtctatgaagacacactcaccctattcccattctcaggagaaactgtcttcatgtcgatggaaaacccaggtctatggattctggggtgccacaactcagactttcggaacagaggcatgaccgccttactgaaggtttctagttgtgacaagaacactggtgattattacgaggacagttatgaagatatttcagcatacttgctgagtaaaaacaatgccattgaaccaagaagcttctctcaaaacccaccagtcttgaaacgccatcaacgggaaataactcgtactactcttcagtcagatcaagaggaaatcgattatgatgataccatatcagttgaaatgaagaaggaagattttgacatttatgatgaggatgaaaatcagagcccccgcagctttcaaaagaaaacacgacactattttattgctgcagtggagaggctctgggattatgggatgagtagctccccacatgttctaagaaacagggctcagagtggcagtgtccctcagttcaagaaagttgttttccaggaatttactgatggctcctttactcagcccttataccgtggagaactaaatgaacatttgggactcctggggccatatataagagcagaagttgaagataatatcatggtaactttcagaaatcaggcctctcgtccctattccttctattctagccttatttcttatgaggaagatcagaggcaaggagcagaacctagaaaaaactttgtcaagcctaatgaaaccaaaacttacttttggaaagtgcaacatcatatggcacccactaaagatgagtttgactgcaaagcctgggcttatttctctgatgttgacctggaaaaagatgtgcactcaggcctgattggaccccttctggtctgccacactaacacactgaaccctgctcatgggagacaagtgacagtacaggaatttgctctgtttttcaccatctttgatgagaccaaaagctggtacttcactgaaaatatggaaagaaactgcagggctccctgcaatatccagatggaagatcccacttttaaagagaattatcgcttccatgcaatcaatggctacataatggatacactacctggcttagtaatggctcaggatcaaaggattcgatggtatctgctcagcatgggcagcaatgaaaacatccattctattcatttcagtggacatgtgttcactgtacgaaaaaaagaggagtataaaatggcactgtacaatctctatccaggtgtttttgagacagtggaaatgttaccatccaaagctggaatttggcgggtggaatgccttattggcgagcatctacatgctgggatgagcacactttttctggtgtacagcaataagtgtcagactcccctgggaatggcttctggacacattagagattttcagattacagcttcaggacaatatggacagtgggccccaaagctggccagacttcattattccggatcaatcaatgcctggagcaccaaggagcccttttcttggatcaaggtggatctgttggcaccaatgattattcacggcatcaagacccagggtgcccgtcagaagttctccagcctctacatctctcagtttatcatcatgtatagtcttgatgggaagaagtggcagacttatcgaggaaattccactggaaccttaatggtcttctttggcaatgtggattcatctgggataaaacacaatatttttaaccctccaattattgctcgatacatccgtttgcacccaactcattatagcattcgcagcactcttcgcatggagttgatgggctgtgatttaaatagttgcagcatgccattgggaatggagagtaaagcaatatcagatgcacagattactgcttcatcctactttaccaatatgtttgccacctggtctccttcaaaagctcgacttcacctccaagggaggagtaatgcctggagacctcaggtgaataatccaaaagagtggctgcaagtggacttccagaagacaatgaaagtcacaggagtaactactcagggagtaaaatctctgcttaccagcatgtatgtgaaggagttcctcatctccagcagtcaagatggccatcagtggactctcttttttcagaatggcaaagtaaaggtttttcagggaaatcaagactccttcacacctgtggtgaactctctagacccaccgttactgactcgctaccttcgaattcacccccagagttgggtgcaccagattgccctgaggatggaggttctgggctgcgaggcacaggacctctacggcgccggatcacctggggccgaaacggccgaacaaaaactcatctcagaagaggatctgtcacctgcaaccggtcatcatcaccatcaccattga

SEQ ID NO: 609 - protein, 1511 aa, synthetic construct
  REGION 1..1511: note = Description of Artificial Sequence: Synthetic polypeptide
ATRRYYLGAVELSWDYMQSDLGELPVDARFPPRVPKSFPFNTSVVYKKTLFVEFTDHLFNGAPGSPAGSPTSTEEGTSESATPESGPGSEPATSGSETPASSIAKPRPPWMGLLGPTIQAEVYDTVVITLKNMASHPVSLHAVGVSYWKASEGAEYDDQTSQREKEDDKVFPGGSHTYVWQVLKENGPMASDPLCLTYSYLSHVDLVKDLNSGLIGALLVCREGSLAKEKTQTLHKFILLFAVFDEGKSWHSETKNSLMQDRDAASARAWPKMHTVNGYVNRSLPGLIGCHRKSVYWHVIGMGTTPEVHSIFLEGHTFLVRNHRQASLEISPITFLTAQTLLMDLGQFLLFCHISSHQHDGMEAYVKVDSCPEEPQLRMKNNEEAEDYDDDLTDSEMDVVRFDDDNSPSFIQIRSVAKKHPKTWVHYIAAEEEDWDYAPLVLAPDDRSYKSQYLNNGPQRIGRKYKKVRFMAYTDETFKTREAIQHESGILGPLLYGEVGDTLLIIFKNQASRPYNIYPHGITDVRPLYSRRLPKGVKHLKDFPILPGEIFKYKWTVTVEDGPTKSDPRCLTRYYSSFVNMERDLASGLIGPLLICYKESVDQRGNQIMSDKRNVILFSVFDENRSWYLTENIQRFLPNPAGVQLEDPEFQASNIMHSINGYVFDSLQLSVCLHEVAYWYILSIGAQTDFLSVFFSGYTFKHKMVYEDTLTLFPFSGETVFMSMENPGLWILGCHNSDFRNRGMTALLKVSSCDKNTGDYYEDSYEDISAYLLSKNNAIEPRSFSQNPPVLKRHQREITRTTLQSDQEEIDYDDTISVEMKKEDFDIYDEDENQSPRSFQKKTRHYFIAAVERLWDYGMSSSPHVLRNRAQSGSVPQFKKVVFQEFTDGSFTQPLYRGELNEHLGLLGPYIRAEVEDNIMVTFRNQASRPYSFYSSLISYEEDQRQGAEPRKNFVKPNETKTYFWKVQHHMAPTKDEFDCKAWAYFSDVDLEKDVHSGLIGPLLVCHTNTLNPAHGRQVTVQEFALFFTIFDETKSWYFTENMERNCRAPCNIQMEDPTFKENYRFHAINGYIMDTLPGLVMAQDQRIRWYLLSMGSNENIHSIHFSGHVFTVRKKEEYKMALYNLYPGVFETVEMLPSKAGIWRVECLIGEHLHAGMSTLFLVYSNKCQTPLGMASGHIRDFQITASGQYGQWAPKLARLHYSGSINAWSTKEPFSWIKVDLLAPMIIHGIKTQGARQKFSSLYISQFIIMYSLDGKKWQTYRGNSTGTLMVFFGNVDSSGIKHNIFNPPIIARYIRLHPTHYSIRSTLRMELMGCDLNSCSMPLGMESKAISDAQITASSYFTNMFATWSPSKARLHLQGRSNAWRPQVNNPKEWLQVDFQKTMKVTGVTTQGVKSLLTSMYVKEFLISSSQDGHQWTLFFQNGKVKVFQGNQDSFTPVVNSLDPPLLTRYLRIHPQSWVHQIALRMEVLGCEAQDLYGAGSPGAETAEQKLISEEDLSPATGHHHHHH

SEQ ID NO: 610 - DNA, 4536 bp, synthetic construct
  misc_feature 1..4536: note = Description of Artificial Sequence: Synthetic polynucleotide
  source 1..4536: mol_type = other DNA
gccaccagaagatactacctgggtgcagtggaactgtcatgggactatatgcaaagtgatctcggtgagctgcctgtggacgcaagatttcctcctagagtgccaaaatcttttccattcaacacctcagtcgtgtacaaaaagactctgtttgtagaattcacggatcaccttttcaacggcgcgccaggttctcctgctggctcccccacctcaacagaagaggggacaagcgaaagcgctacgcctgagagtggccctggctctgagccagccacctccggctctgaaacccctgcctcgagcatcgctaagccaaggccaccctggatgggtctgctaggtcctaccatccaggctgaggtttatgatacagtggtcattacacttaagaacatggcttcccatcctgtcagtcttcatgctgttggtgtatcctactggaaagcttctgagggagctgaatatgatgatcagaccagtcaaagggagaaagaagatgataaagtcttccctggtggaagccatacatatgtctggcaggtcctgaaagagaatggtccaatggcctctgacccactgtgccttacctactcatatctttctcatgtggacctggtaaaagacttgaattcaggcctcattggagccctactagtatgtagagaagggagtctggccaaggaaaagacacagaccttgcacaaatttatactactttttgctgtatttgatgaagggaaaagttggcactcagaaacaaagaactccttgatgcaggatagggatgctgcatctgctcgggcctggcctaaaatgcacacagtcaatggttatgtaaacaggtctctgccaggtctgattggatgccacaggaaatcagtctattggcatgtgattggaatgggcaccactcctgaagtgcactcaatattcctcgaaggtcacacatttcttgtgaggaaccatcgccaggctagcttggaaatctcgccaataactttccttactgctcaaacactcttgatggaccttggacagtttctactgttttgtcatatctcttcccaccaacatgatggcatggaagcttatgtcaaagtagacagctgtccagaggaaccccaactacgaatgaaaaataatgaagaagcggaagactatgatgatgatcttactgattctgaaatggatgtggtcaggtttgatgatgacaactctccttcctttatccaaattcgctcagttgccaagaagcatcctaaaacttgggtacattacattgctgctgaagaggaggactgggactatgctcccttagtcctcgcccccgatgacagaagttataaaagtcaatatttgaacaatggccctcagcggattggtaggaagtacaaaaaagtccgatttatggcatacacagatgaaacctttaagactcgtgaagctattcagcatgaatcaggaatcttgggacctttactttatggggaagttggagacacactgttgattatatttaagaatcaagcaagcagaccatataacatctaccctcacggaatcactgatgtccgtcctttgtattcaaggagattaccaaaaggtgtaaaacatttgaaggattttccaattctgccaggagaaatattcaaatataaatggacagtgactgtagaagatgggccaactaaatcagatcctcggtgcctgacccgctattactctagtttcgttaatatggagagagatctagcttcaggactcattggccctctcctcatctgctacaaagaatctgtagatcaaagaggaaaccagataatgtcagacaagaggaatgtcatcctgttttctgtatttgatgagaaccgaagctggtacctcacagagaatatacaacgctttctccccaatccagctggagtgcagcttgaggatccagagttccaagcctccaacatcatgcacagcatcaatggctatgtttttgatagtttgcagttgtcagtttgtttgcatgaggtggcatactggtacattctaagcattggagcacagactgacttcctttctgtcttcttctctggatataccttcaaacacaaaatggtctatgaagacacactcaccctattcccattctcaggagaaactgtcttcatgtcgatggaaaacccaggtctatggattctggggtgccacaactcagactttcggaacagaggcatgaccgccttactgaaggtttctagttgtgacaagaacactggtgattattacgaggacagttatgaagatatttcagcatacttgctgagtaaaaacaatgccattgaaccaagaagcttctctcaaaacccaccagtcttgaaacgccatcaacgggaaataactcgtactactcttcagtcagatcaagaggaaatcgattatgatgataccatatcagttgaaatgaagaaggaagattttgacatttatgatgaggatgaaaatcagagcccccgcagctttcaaaagaaaacacgacactattttattgctgcagtggagaggctctgggattatgggatgagtagctccccacatgttctaagaaacagggctcagagtggcagtgtccctcagttcaagaaagttgttttccaggaatttactgatggctcctttactcagcccttataccgtggagaactaaatgaacatttgggactcctggggccatatataagagcagaagttgaagataatatcatggtaactttcagaaatcaggcctctcgtccctattccttctattctagccttatttcttatgaggaagatcagaggcaaggagcagaacctagaaaaaactttgtcaagcctaatgaaaccaaaacttacttttggaaagtgcaacatcatatggcacccactaaagatgagtttgactgcaaagcctgggcttatttctctgatgttgacctggaaaaagatgtgcactcaggcctgattggaccccttctggtctgccacactaacacactgaaccctgctcatgggagacaagtgacagtacaggaatttgctctgtttttcaccatctttgatgagaccaaaagctggtacttcactgaaaatatggaaagaaactgcagggctccctgcaatatccagatggaagatcccacttttaaagagaattatcgcttccatgcaatcaatggctacataatggatacactacctggcttagtaatggctcaggatcaaaggattcgatggtatctgctcagcatgggcagcaatgaaaacatccattctattcatttcagtggacatgtgttcactgtacgaaaaaaagaggagtataaaatggcactgtacaatctctatccaggtgtttttgagacagtggaaatgttaccatccaaagctggaatttggcgggtggaatgccttattggcgagcatctacatgctgggatgagcacactttttctggtgtacagcaataagtgtcagactcccctgggaatggcttctggacacattagagattttcagattacagcttcaggacaatatggacagtgggccccaaagctggccagacttcattattccggatcaatcaatgcctggagcaccaaggagcccttttcttggatcaaggtggatctgttggcaccaatgattattcacggcatcaagacccagggtgcccgtcagaagttctccagcctctacatctctcagtttatcatcatgtatagtcttgatgggaagaagtggcagacttatcgaggaaattccactggaaccttaatggtcttctttggcaatgtggattcatctgggataaaacacaatatttttaaccctccaattattgctcgatacatccgtttgcacccaactcattatagcattcgcagcactcttcgcatggagttgatgggctgtgatttaaatagttgcagcatgccattgggaatggagagtaaagcaatatcagatgcacagattactgcttcatcctactttaccaatatgtttgccacctggtctccttcaaaagctcgacttcacctccaagggaggagtaatgcctggagacctcaggtgaataatccaaaagagtggctgcaagtggacttccagaagacaatgaaagtcacaggagtaactactcagggagtaaaatctctgcttaccagcatgtatgtgaaggagttcctcatctccagcagtcaagatggccatcagtggactctcttttttcagaatggcaaagtaaaggtttttcagggaaatcaagactccttcacacctgtggtgaactctctagacccaccgttactgactcgctaccttcgaattcacccccagagttgggtgcaccagattgccctgaggatggaggttctgggctgcgaggcacaggacctctacggcgccggatcacctggggccgaaacggccgaacaaaaactcatctcagaagaggatctgtcacctgcaaccggtcatcatcaccatcaccattga

SEQ ID NO: 611 - protein, 1511 aa, synthetic construct
  REGION 1..1511: note = Description of Artificial Sequence: Synthetic polypeptide
ATRRYYLGAVELSWDYMQSDLGELPVDARFPPRVPKSFPFNTSVVYKKTLFVEFTDHLFNIAKPRPPWMGLLGPTIQAEVYDTVVITLKNMASHPVSLHAVGVSYWKASEGAEYDDGAPGSPAGSPTSTEEGTSESATPESGPGSEPATSGSETPASSQTSQREKEDDKVFPGGSHTYVWQVLKENGPMASDPLCLTYSYLSHVDLVKDLNSGLIGALLVCREGSLAKEKTQTLHKFILLFAVFDEGKSWHSETKNSLMQDRDAASARAWPKMHTVNGYVNRSLPGLIGCHRKSVYWHVIGMGTTPEVHSIFLEGHTFLVRNHRQASLEISPITFLTAQTLLMDLGQFLLFCHISSHQHDGMEAYVKVDSCPEEPQLRMKNNEEAEDYDDDLTDSEMDVVRFDDDNSPSFIQIRSVAKKHPKTWVHYIAAEEEDWDYAPLVLAPDDRSYKSQYLNNGPQRIGRKYKKVRFMAYTDETFKTREAIQHESGILGPLLYGEVGDTLLIIFKNQASRPYNIYPHGITDVRPLYSRRLPKGVKHLKDFPILPGEIFKYKWTVTVEDGPTKSDPRCLTRYYSSFVNMERDLASGLIGPLLICYKESVDQRGNQIMSDKRNVILFSVFDENRSWYLTENIQRFLPNPAGVQLEDPEFQASNIMHSINGYVFDSLQLSVCLHEVAYWYILSIGAQTDFLSVFFSGYTFKHKMVYEDTLTLFPFSGETVFMSMENPGLWILGCHNSDFRNRGMTALLKVSSCDKNTGDYYEDSYEDISAYLLSKNNAIEPRSFSQNPPVLKRHQREITRTTLQSDQEEIDYDDTISVEMKKEDFDIYDEDENQSPRSFQKKTRHYFIAAVERLWDYGMSSSPHVLRNRAQSGSVPQFKKVVFQEFTDGSFTQPLYRGELNEHLGLLGPYIRAEVEDNIMVTFRNQASRPYSFYSSLISYEEDQRQGAEPRKNFVKPNETKTYFWKVQHHMAPTKDEFDCKAWAYFSDVDLEKDVHSGLIGPLLVCHTNTLNPAHGRQVTVQEFALFFTIFDETKSWYFTENMERNCRAPCNIQMEDPTFKENYRFHAINGYIMDTLPGLVMAQDQRIRWYLLSMGSNENIHSIHFSGHVFTVRKKEEYKMALYNLYPGVFETVEMLPSKAGIWRVECLIGEHLHAGMSTLFLVYSNKCQTPLGMASGHIRDFQITASGQYGQWAPKLARLHYSGSINAWSTKEPFSWIKVDLLAPMIIHGIKTQGARQKFSSLYISQFIIMYSLDGKKWQTYRGNSTGTLMVFFGNVDSSGIKHNIFNPPIIARYIRLHPTHYSIRSTLRMELMGCDLNSCSMPLGMESKAISDAQITASSYFTNMFATWSPSKARLHLQGRSNAWRPQVNNPKEWLQVDFQKTMKVTGVTTQGVKSLLTSMYVKEFLISSSQDGHQWTLFFQNGKVKVFQGNQDSFTPVVNSLDPPLLTRYLRIHPQSWVHQIALRMEVLGCEAQDLYGAGSPGAETAEQKLISEEDLSPATGHHHHHH

SEQ ID NO: 612 - DNA, 4536 bp, synthetic construct
  misc_feature 1..4536: note = Description of Artificial Sequence: Synthetic polynucleotide
  source 1..4536: mol_type = other DNA
gccaccagaagatactacctgggtgcagtggaactgtcatgggactatatgcaaagtgatctcggtgagctgcctgtggacgcaagatttcctcctagagtgccaaaatcttttccattcaacacctcagtcgtgtacaaaaagactctgtttgtagaattcacggatcaccttttcaacatcgctaagccaaggccaccctggatgggtctgctaggtcctaccatccaggctgaggtttatgatacagtggtcattacacttaagaacatggcttcccatcctgtcagtcttcatgctgttggtgtatcctactggaaagcttctgagggagctgaatatgatgatggcgcgccaggttctcctgctggctcccccacctcaacagaagaggggacaagcgaaagcgctacgcctgagagtggccctggctctgagccagccacctccggctctgaaacccctgcctcgagccagaccagtcaaagggagaaagaagatgataaagtcttccctggtggaagccatacatatgtctggcaggtcctgaaagagaatggtccaatggcctctgacccactgtgccttacctactcatatctttctcatgtggacctggtaaaagacttgaattcaggcctcattggagccctactagtatgtagagaagggagtctggccaaggaaaagacacagaccttgcacaaatttatactactttttgctgtatttgatgaagggaaaagttggcactcagaaacaaagaactccttgatgcaggatagggatgctgcatctgctcgggcctggcctaaaatgcacacagtcaatggttatgtaaacaggtctctgccaggtctgattggatgccacaggaaatcagtctattggcatgtgattggaatgggcaccactcctgaagtgcactcaatattcctcgaaggtcacacatttcttgtgaggaaccatcgccaggctagcttggaaatctcgccaataactttccttactgctcaaacactcttgatggaccttggacagtttctactgttttgtcatatctcttcccaccaacatgatggcatggaagcttatgtcaaagtagacagctgtccagaggaaccccaactacgaatgaaaaataatgaagaagcggaagactatgatgatgatcttactgattctgaaatggatgtggtcaggtttgatgatgacaactctccttcctttatccaaattcgctcagttgccaagaagcatcctaaaacttgggtacattacattgctgctgaagaggaggactgggactatgctcccttagtcctcgcccccgatgacagaagttataaaagtcaatatttgaacaatggccctcagcggattggtaggaagtacaaaaaagtccgatttatggcatacacagatgaaacctttaagactcgtgaagctattcagcatgaatcaggaatcttgggacctttactttatggggaagttggagacacactgttgattatatttaagaatcaagcaagcagaccatataacatctaccctcacggaatcactgatgtccgtcctttgtattcaaggagattaccaaaaggtgtaaaacatttgaaggattttccaattctgccaggagaaatattcaaatataaatggacagtgactgtagaagatgggccaactaaatcagatcctcggtgcctgacccgctattactctagtttcgttaatatggagagagatctagcttcaggactcattggccctctcctcatctgctacaaagaatctgtagatcaaagaggaaaccagataatgtcagacaagaggaatgtcatcctgttttctgtatttgatgagaaccgaagctggtacctcacagagaatatacaacgctttctccccaatccagctggagtgcagcttgaggatccagagttccaagcctccaacatcatgcacagcatcaatggctatgtttttgatagtttgcagttgtcagtttgtttgcatgaggtggcatactggtacattctaagcattggagcacagactgacttcctttctgtcttcttctctggatataccttcaaacacaaaatggtctatgaagacacactcaccctattcccattctcaggagaaactgtcttcatgtcgatggaaaacccaggtctatggattctggggtgccacaactcagactttcggaacagaggcatgaccgccttactgaaggtttctagttgtgacaagaacactggtgattattacgaggacagttatgaagatatttcagcatacttgctgagtaaaaacaatgccattgaaccaagaagcttctctcaaaacccaccagtcttgaaacgccatcaacgggaaataactcgtactactcttcagtcagatcaagaggaaatcgattatgatgataccatatcagttgaaatgaagaaggaagattttgacatttatgatgaggatgaaaatcagagcccccgcagctttcaaaagaaaacacgacactattttattgctgcagtggagaggctctgggattatgggatgagtagctccccacatgttctaagaaacagggctcagagtggcagtgtccctcagttcaagaaagttgttttccaggaatttactgatggctcctttactcagcccttataccgtggagaactaaatgaacatttgggactcctggggccatatataagagcagaagttgaagataatatcatggtaactttcagaaatcaggcctctcgtccctattccttctattctagccttatttcttatgaggaagatcagaggcaaggagcagaacctagaaaaaactttgtcaagcctaatgaaaccaaaacttacttttggaaagtgcaacatcatatggcacccactaaagatgagtttgactgcaaagcctgggcttatttctctgatgttgacctggaaaaagatgtgcactcaggcctgattggaccccttctggtctgccacactaacacactgaaccctgctcatgggagacaagtgacagtacaggaatttgctctgtttttcaccatctttgatgagaccaaaagctggtacttcactgaaaatatggaaagaaactgcagggctccctgcaatatccagatggaagatcccacttttaaagagaattatcgcttccatgcaatcaatggctacataatggatacactacctggcttagtaatggctcaggatcaaaggattcgatggtatctgctcagcatgggcagcaatgaaaacatccattctattcatttcagtggacatgtgttcactgtacgaaaaaaagaggagtataaaatggcactgtacaatctctatccaggtgtttttgagacagtggaaatgttaccatccaaagctggaatttggcgggtggaatgccttattggcgagcatctacatgctgggatgagcacactttttctggtgtacagcaataagtgtcagactcccctgggaatggcttctggacacattagagattttcagattacagcttcaggacaatatggacagtgggccccaaagctggccagacttcattattccggatcaatcaatgcctggagcaccaaggagcccttttcttggatcaaggtggatctgttggcaccaatgattattcacggcatcaagacccagggtgcccgtcagaagttctccagcctctacatctctcagtttatcatcatgtatagtcttgatgggaagaagtggcagacttatcgaggaaattccactggaaccttaatggtcttctttggcaatgtggattcatctgggataaaacacaatatttttaaccctccaattattgctcgatacatccgtttgcacccaactcattatagcattcgcagcactcttcgcatggagttgatgggctgtgatttaaatagttgcagcatgccattgggaatggagagtaaagcaatatcagatgcacagattactgcttcatcctactttaccaatatgtttgccacctggtctccttcaaaagctcgacttcacctccaagggaggagtaatgcctggagacctcaggtgaataatccaaaagagtggctgcaagtggacttccagaagacaatgaaagtcacaggagtaactactcagggagtaaaatctctgcttaccagcatgtatgtgaaggagttcctcatctccagcagtcaagatggccatcagtggactctcttttttcagaatggcaaagtaaaggtttttcagggaaatcaagactccttcacacctgtggtgaactctctagacccaccgttactgactcgctaccttcgaattcacccccagagttgggtgcaccagattgccctgaggatggaggttctgggctgcgaggcacaggacctctacggcgccggatcacctggggccgaaacggccgaacaaaaactcatctcagaagaggatctgtcacctgcaaccggtcatcatcaccatcaccattga

SEQ ID NO: 613 - protein, 1511 aa, synthetic construct
  REGION 1..1511: note = Description of Artificial Sequence: Synthetic polypeptide
ATRRYYLGAVELSWDYMQSDLGELPVDARFPPRVPKSFPFNTSVVYKKTLFVEFTDHLFNIAKPRPPWMGLLGPTIQAEVYDTVVITLKNMASHPVSLHAVGVSYWKASEGAEYDDQTSQREKEDDKVFPGAPGSPAGSPTSTEEGTSESATPESGPGSEPATSGSETPASSGGSHTYVWQVLKENGPMASDPLCLTYSYLSHVDLVKDLNSGLIGALLVCREGSLAKEKTQTLHKFILLFAVFDEGKSWHSETKNSLMQDRDAASARAWPKMHTVNGYVNRSLPGLIGCHRKSVYWHVIGMGTTPEVHSIFLEGHTFLVRNHRQASLEISPITFLTAQTLLMDLGQFLLFCHISSHQHDGMEAYVKVDSCPEEPQLRMKNNEEAEDYDDDLTDSEMDVVRFDDDNSPSFIQIRSVAKKHPKTWVHYIAAEEEDWDYAPLVLAPDDRSYKSQYLNNGPQRIGRKYKKVRFMAYTDETFKTREAIQHESGILGPLLYGEVGDTLLIIFKNQASRPYNIYPHGITDVRPLYSRRLPKGVKHLKDFPILPGEIFKYKWTVTVEDGPTKSDPRCLTRYYSSFVNMERDLASGLIGPLLICYKESVDQRGNQIMSDKRNVILFSVFDENRSWYLTENIQRFLPNPAGVQLEDPEFQASNIMHSINGYVFDSLQLSVCLHEVAYWYILSIGAQTDFLSVFFSGYTFKHKMVYEDTLTLFPFSGETVFMSMENPGLWILGCHNSDFRNRGMTALLKVSSCDKNTGDYYEDSYEDISAYLLSKNNAIEPRSFSQNPPVLKRHQREITRTTLQSDQEEIDYDDTISVEMKKEDFDIYDEDENQSPRSFQKKTRHYFIAAVERLWDYGMSSSPHVLRNRAQSGSVPQFKKVVFQEFTDGSFTQPLYRGELNEHLGLLGPYIRAEVEDNIMVTFRNQASRPYSFYSSLISYEEDQRQGAEPRKNFVKPNETKTYFWKVQHHMAPTKDEFDCKAWAYFSDVDLEKDVHSGLIGPLLVCHTNTLNPAHGRQVTVQEFALFFTIFDETKSWYFTENMERNCRAPCNIQMEDPTFKENYRFHAINGYIMDTLPGLVMAQDQRIRWYLLSMGSNENIHSIHFSGHVFTVRKKEEYKMALYNLYPGVFETVEMLPSKAGIWRVECLIGEHLHAGMSTLFLVYSNKCQTPLGMASGHIRDFQITASGQYGQWAPKLARLHYSGSINAWSTKEPFSWIKVDLLAPMIIHGIKTQGARQKFSSLYISQFIIMYSLDGKKWQTYRGNSTGTLMVFFGNVDSSGIKHNIFNPPIIARYIRLHPTHYSIRSTLRMELMGCDLNSCSMPLGMESKAISDAQITASSYFTNMFATWSPSKARLHLQGRSNAWRPQVNNPKEWLQVDFQKTMKVTGVTTQGVKSLLTSMYVKEFLISSSQDGHQWTLFFQNGKVKVFQGNQDSFTPVVNSLDPPLLTRYLRIHPQSWVHQIALRMEVLGCEAQDLYGAGSPGAETAEQKLISEEDLSPATGHHHHHH

SEQ ID NO: 614 - DNA, 4536 bp, synthetic construct
  misc_feature 1..4536: note = Description of Artificial Sequence: Synthetic polynucleotide
  source 1..4536: mol_type = other DNA
gccaccagaagatactacctgggtgcagtggaactgtcatgggactatatgcaaagtgatctcggtgagctgcctgtggacgcaagatttcctcctagagtgccaaaatcttttccattcaacacctcagtcgtgtacaaaaagactctgtttgtagaattcacggatcaccttttcaacatcgctaagccaaggccaccctggatgggtctgctaggtcctaccatccaggctgaggtttatgatacagtggtcattacacttaagaacatggcttcccatcctgtcagtcttcatgctgttggtgtatcctactggaaagcttctgagggagctgaatatgatgatcagaccagtcaaagggagaaagaagatgataaagtcttccctggcgcgccaggttctcctgctggctcccccacctcaacagaagaggggacaagcgaaagcgctacgcctgagagtggccctggctctgagccagccacctccggctctgaaacccctgcctcgagcggtggaagccatacatatgtctggcaggtcctgaaagagaatggtccaatggcctctgacccactgtgccttacctactcatatctttctcatgtggacctggtaaaagacttgaattcaggcctcattggagccctactagtatgtagagaagggagtctggccaaggaaaagacacagaccttgcacaaatttatactactttttgctgtatttgatgaagggaaaagttggcactcagaaacaaagaactccttgatgcaggatagggatgctgcatctgctcgggcctggcctaaaatgcacacagtcaatggttatgtaaacaggtctctgccaggtctgattggatgccacaggaaatcagtctattggcatgtgattggaatgggcaccactcctgaagtgcactcaatattcctcgaaggtcacacatttcttgtgaggaaccatcgccaggctagcttggaaatctcgccaataactttccttactgctcaaacactcttgatggaccttggacagtttctactgttttgtcatatctcttcccaccaacatgatggcatggaagcttatgtcaaagtagacagctgtccagaggaaccccaactacgaatgaaaaataatgaagaagcggaagactatgatgatgatcttactgattctgaaatggatgtggtcaggtttgatgatgacaactctccttcctttatccaaattcgctcagttgccaagaagcatcctaaaacttgggtacattacattgctgctgaagaggaggactgggactatgctcccttagtcctcgcccccgatgacagaagttataaaagtcaatatttgaacaatggccctcagcggattggtaggaagtacaaaaaagtccgatttatggcatacacagatgaaacctttaagactcgtgaagctattcagcatgaatcaggaatcttgggacctttactttatggggaagttggagacacactgttgattatatttaagaatcaagcaagcagaccatataacatctaccctcacggaatcactgatgtccgtcctttgtattcaaggagattaccaaaaggtgtaaaacatttgaaggattttccaattctgccaggagaaatattcaaatataaatggacagtgactgtagaagatgggccaactaaatcagatcctcggtgcctgacccgctattactctagtttcgttaatatggagagagatctagcttcaggactcattggccctctcctcatctgctacaaagaatctgtagatcaaagaggaaaccagataatgtcagacaagaggaatgtcatcctgttttctgtatttgatgagaaccgaagctggtacctcacagagaatatacaacgctttctccccaatccagctggagtgcagcttgaggatccagagttccaagcctccaacatcatgcacagcatcaatggctatgtttttgatagtttgcagttgtcagtttgtttgcatgaggtggcatactggtacattctaagcattggagcacagactgacttcctttctgtcttcttctctggatataccttcaaacacaaaatggtctatgaagacacactcaccctattcccattctcaggagaaactgtcttcatgtcgatggaaaacccaggtctatggattctggggtgccacaactcagactttcggaacagaggcatgaccgccttactgaaggtttctagttgtgacaagaacactggtgattattacgaggacagttatgaagatatttcagcatacttgctgagtaaaaacaatgccattgaaccaagaagcttctctcaaaacccaccagtcttgaaacgccatcaacgggaaataactcgtactactcttcagtcagatcaagaggaaatcgattatgatgataccatatcagttgaaatgaagaaggaagattttgacatttatgatgaggatgaaaatcagagcccccgcagctttcaaaagaaaacacgacactattttattgctgcagtggagaggctctgggattatgggatgagtagctccccacatgttctaagaaacagggctcagagtggcagtgtccctcagttcaagaaagttgttttccaggaatttactgatggctcctttactcagcccttataccgtggagaactaaatgaacatttgggactcctggggccatatataagagcagaagttgaagataatatcatggtaactttcagaaatcaggcctctcgtccctattccttctattctagccttatttcttatgaggaagatcagaggcaaggagcagaacctagaaaaaactttgtcaagcctaatgaaaccaaaacttacttttggaaagtgcaacatcatatggcacccactaaagatgagtttgactgcaaagcctgggcttatttctctgatgttgacctggaaaaagatgtgcactcaggcctgattggaccccttctggtctgccacactaacacactgaaccctgctcatgggagacaagtgacagtacaggaatttgctctgtttttcaccatctttgatgagaccaaaagctggtacttcactgaaaatatggaaagaaactgcagggctccctgcaatatccagatggaagatcccacttttaaagagaattatcgcttccatgcaatcaatggctacataatggatacactacctggcttagtaatggctcaggatcaaaggattcgatggtatctgctcagcatgggcagcaatgaaaacatccattctattcatttcagtggacatgtgttcactgtacgaaaaaaagaggagtataaaatggcactgtacaatctctatccaggtgtttttgagacagtggaaatgttaccatccaaagctggaatttggcgggtggaatgccttattggcgagcatctacatgctgggatgagcacactttttctggtgtacagcaataagtgtcagactcccctgggaatggcttctggacacattagagattttcagattacagcttcaggacaatatggacagtgggccccaaagctggccagacttcattattccggatcaatcaatgcctggagcaccaaggagcccttttcttggatcaaggtggatctgttggcaccaatgattattcacggcatcaagacccagggtgcccgtcagaagttctccagcctctacatctctcagtttatcatcatgtatagtcttgatgggaagaagtggcagacttatcgaggaaattccactggaaccttaatggtcttctttggcaatgtggattcatctgggataaaacacaatatttttaaccctccaattattgctcgatacatccgtttgcacccaactcattatagcattcgcagcactcttcgcatggagttgatgggctgtgatttaaatagttgcagcatgccattgggaatggagagtaaagcaatatcagatgcacagattactgcttcatcctactttaccaatatgtttgccacctggtctccttcaaaagctcgacttcacctccaagggaggagtaatgcctggagacctcaggtgaataatccaaaagagtggctgcaagtggacttccagaagacaatgaaagtcacaggagtaactactcagggagtaaaatctctgcttaccagcatgtatgtgaaggagttcctcatctccagcagtcaagatggccatcagtggactctcttttttcagaatggcaaagtaaaggtttttcagggaaatcaagactccttcacacctgtggtgaactctctagacccaccgttactgactcgctaccttcgaattcacccccagagttgggtgcaccagattgccctgaggatggaggttctgggctgcgaggcacaggacctctacggcgccggatcacctggggccgaaacggccgaacaaaaactcatctcagaagaggatctgtcacctgcaaccggtcatcatcaccatcaccattga

SEQ ID NO: 615 - protein, 1511 aa, synthetic construct
  REGION 1..1511: note = Description of Artificial Sequence: Synthetic polypeptide
ATRRYYLGAVELSWDYMQSDLGELPVDARFPPRVPKSFPFNTSVVYKKTLFVEFTDHLFNIAKPRPPWMGLLGPTIQAEVYDTVVITLKNMASHPVSLHAVGVSYWKASEGAEYDDQTSQREKEDDKVFPGGSHTYVWQVLKENGPMASDPLCLTYSYLSHVDLVKDLNSGLIGALLVCREGSLAKEKGAPGSPAGSPTSTEEGTSESATPESGPGSEPATSGSETPASSTQTLHKFILLFAVFDEGKSWHSETKNSLMQDRDAASARAWPKMHTVNGYVNRSLPGLIGCHRKSVYWHVIGMGTTPEVHSIFLEGHTFLVRNHRQASLEISPITFLTAQTLLMDLGQFLLFCHISSHQHDGMEAYVKVDSCPEEPQLRMKNNEEAEDYDDDLTDSEMDVVRFDDDNSPSFIQIRSVAKKHPKTWVHYIAAEEEDWDYAPLVLAPDDRSYKSQYLNNGPQRIGRKYKKVRFMAYTDETFKTREAIQHESGILGPLLYGEVGDTLLIIFKNQASRPYNIYPHGITDVRPLYSRRLPKGVKHLKDFPILPGEIFKYKWTVTVEDGPTKSDPRCLTRYYSSFVNMERDLASGLIGPLLICYKESVDQRGNQIMSDKRNVILFSVFDENRSWYLTENIQRFLPNPAGVQLEDPEFQASNIMHSINGYVFDSLQLSVCLHEVAYWYILSIGAQTDFLSVFFSGYTFKHKMVYEDTLTLFPFSGETVFMSMENPGLWILGCHNSDFRNRGMTALLKVSSCDKNTGDYYEDSYEDISAYLLSKNNAIEPRSFSQNPPVLKRHQREITRTTLQSDQEEIDYDDTISVEMKKEDFDIYDEDENQSPRSFQKKTRHYFIAAVERLWDYGMSSSPHVLRNRAQSGSVPQFKKVVFQEFTDGSFTQPLYRGELNEHLGLLGPYIRAEVEDNIMVTFRNQASRPYSFYSSLISYEEDQRQGAEPRKNFVKPNETKTYFWKVQHHMAPTKDEFDCKAWAYFSDVDLEKDVHSGLIGPLLVCHTNTLNPAHGRQVTVQEFALFFTIFDETKSWYFTENMERNCRAPCNIQMEDPTFKENYRFHAINGYIMDTLPGLVMAQDQRIRWYLLSMGSNENIHSIHFSGHVFTVRKKEEYKMALYNLYPGVFETVEMLPSKAGIWRVECLIGEHLHAGMSTLFLVYSNKCQTPLGMASGHIRDFQITASGQYGQWAPKLARLHYSGSINAWSTKEPFSWIKVDLLAPMIIHGIKTQGARQKFSSLYISQFIIMYSLDGKKWQTYRGNSTGTLMVFFGNVDSSGIKHNIFNPPIIARYIRLHPTHYSIRSTLRMELMGCDLNSCSMPLGMESKAISDAQITASSYFTNMFATWSPSKARLHLQGRSNAWRPQVNNPKEWLQVDFQKTMKVTGVTTQGVKSLLTSMYVKEFLISSSQDGHQWTLFFQNGKVKVFQGNQDSFTPVVNSLDPPLLTRYLRIHPQSWVHQIALRMEVLGCEAQDLYGAGSPGAETAEQKLISEEDLSPATGHHHHHH

SEQ ID NO: 616 - DNA, 4536 bp, synthetic construct
  misc_feature 1..4536: note = Description of Artificial Sequence: Synthetic polynucleotide
  source 1..4536: mol_type = other DNA
gccaccagaagatactacctgggtgcagtggaactgtcatgggactatatgcaaagtgatctcggtgagctgcctgtggacgcaagatttcctcctagagtgccaaaatcttttccattcaacacctcagtcgtgtacaaaaagactctgtttgtagaattcacggatcaccttttcaacatcgctaagccaaggccaccctggatgggtctgctaggtcctaccatccaggctgaggtttatgatacagtggtcattacacttaagaacatggcttcccatcctgtcagtcttcatgctgttggtgtatcctactggaaagcttctgagggagctgaatatgatgatcagaccagtcaaagggagaaagaagatgataaagtcttccctggtggaagccatacatatgtctggcaggtcctgaaagagaatggtccaatggcctctgacccactgtgccttacctactcatatctttctcatgtggacctggtaaaagacttgaattcaggcctcattggagccctactagtatgtagagaagggagtctggccaaggaaaagggcgcgccaggttctcctgctggctcccccacctcaacagaagaggggacaagcgaaagcgctacgcctgagagtggccctggctctgagccagccacctccggctctgaaacccctgcctcgagcacacagaccttgcacaaatttatactactttttgctgtatttgatgaagggaaaagttggcactcagaaacaaagaactccttgatgcaggatagggatgctgcatctgctcgggcctggcctaaaatgcacacagtcaatggttatgtaaacaggtctctgccaggtctgattggatgccacaggaaatcagtctattggcatgtgattggaatgggcaccactcctgaagtgcactcaatattcctcgaaggtcacacatttcttgtgaggaaccatcgccaggctagcttggaaatctcgccaataactttccttactgctcaaacactcttgatggaccttggacagtttctactgttttgtcatatctcttcccaccaacatgatggcatggaagcttatgtcaaagtagacagctgtccagaggaaccccaactacgaatgaaaaataatgaagaagcggaagactatgatgatgatcttactgattctgaaatggatgtggtcaggtttgatgatgacaactctccttcctttatccaaattcgctcagttgccaagaagcatcctaaaacttgggtacattacattgctgctgaagaggaggactgggactatgctcccttagtcctcgcccccgatgacagaagttataaaagtcaatatttgaacaatggccctcagcggattggtaggaagtacaaaaaagtccgatttatggcatacacagatgaaacctttaagactcgtgaagctattcagcatgaatcaggaatcttgggacctttactttatggggaagttggagacacactgttgattatatttaagaatcaagcaagcagaccatataacatctaccctcacggaatcactgatgtccgtcctttgtattcaaggagattaccaaaaggtgtaaaacatttgaaggattttccaattctgccaggagaaatattcaaatataaatggacagtgactgtagaagatgggccaactaaatcagatcctcggtgcctgacccgctattactctagtttcgttaatatggagagagatctagcttcaggactcattggccctctcctcatctgctacaaagaatctgtagatcaaagaggaaaccagataatgtcagacaagaggaatgtcatcctgttttctgtatttgatgagaaccgaagctggtacctcacagagaatatacaacgctttctccccaatccagctggagtgcagcttgaggatccagagttccaagcctccaacatcatgcacagcatcaatggctatgtttttgatagtttgcagttgtcagtttgtttgcatgaggtggcatactggtacattctaagcattggagcacagactgacttcctttctgtcttcttctctggatataccttcaaacacaaaatggtctatgaagacacactcaccctattcccattctcaggagaaactgtcttcatgtcgatggaaaacccaggtctatggattctggggtgccacaactcagactttcggaacagaggcatgaccgccttactgaaggtttctagttgtgacaagaacactggtgattattacgaggacagttatgaagatatttcagcatacttgctgagtaaaaacaatgccattgaaccaagaagcttctctcaaaacccaccagtcttgaaacgccatcaacgggaaataactcgtactactcttcagtcagatcaagaggaaatcgattatgatgataccatatcagttgaaatgaagaaggaagattttgacatttatgatgaggatgaaaatcagagcccccgcagctttcaaaagaaaacacgacactattttattgctgcagtggagaggctctgggattatgggatgagtagctccccacatgttctaagaaacagggctcagagtggcagtgtccctcagttcaagaaagttgttttccaggaatttactgatggctcctttactcagcccttataccgtggagaactaaatgaacatttgggactcctggggccatatataagagcagaagttgaagataatatcatggtaactttcagaaatcaggcctctcgtccctattccttctattctagccttatttcttatgaggaagatcagaggcaaggagcagaacctagaaaaaactttgtcaagcctaatgaaaccaaaacttacttttggaaagtgcaacatcatatggcacccactaaagatgagtttgactgcaaagcctgggcttatttctctgatgttgacctggaaaaagatgtgcactcaggcctgattggaccccttctggtctgccacactaacacactgaaccctgctcatgggagacaagtgacagtacaggaatttgctctgtttttcaccatctttgatgagaccaaaagctggtacttcactgaaaatatggaaagaaactgcagggctccctgcaatatccagatggaagatcccacttttaaagagaattatcgcttccatgcaatcaatggctacataatggatacactacctggcttagtaatggctcaggatcaaaggattcgatggtatctgctcagcatgggcagcaatgaaaacatccattctattcatttcagtggacatgtgttcactgtacgaaaaaaagaggagtataaaatggcactgtacaatctctatccaggtgtttttgagacagtggaaatgttaccatccaaagctggaatttggcgggtggaatgccttattggcgagcatctacatgctgggatgagcacactttttctggtgtacagcaataagtgtcagactcccctgggaatggcttctggacacattagagattttcagattacagcttcaggacaatatggacagtgggccccaaagctggccagacttcattattccggatcaatcaatgcctggagcaccaaggagcccttttcttggatcaaggtggatctgttggcaccaatgattattcacggcatcaagacccagggtgcccgtcagaagttctccagcctctacatctctcagtttatcatcatgtatagtcttgatgggaagaagtggcagacttatcgaggaaattccactggaaccttaatggtcttctttggcaatgtggattcatctgggataaaacacaatatttttaaccctccaattattgctcgatacatccgtttgcacccaactcattatagcattcgcagcactcttcgcatggagttgatgggctgtgatttaaatagttgcagcatgccattgggaatggagagtaaagcaatatcagatgcacagattactgcttcatcctactttaccaatatgtttgccacctggtctccttcaaaagctcgacttcacctccaagggaggagtaatgcctggagacctcaggtgaataatccaaaagagtggctgcaagtggacttccagaagacaatgaaagtcacaggagtaactactcagggagtaaaatctctgcttaccagcatgtatgtgaaggagttcctcatctccagcagtcaagatggccatcagtggactctcttttttcagaatggcaaagtaaaggtttttcagggaaatcaagactccttcacacctgtggtgaactctctagacccaccgttactgactcgctaccttcgaattcacccccagagttgggtgcaccagattgccctgaggatggaggttctgggctgcgaggcacaggacctctacggcgccggatcacctggggccgaaacggccgaacaaaaactcatctcagaagaggatctgtcacctgcaaccggtcatcatcaccatcaccattga

SEQ ID NO: 617 - protein, 1511 aa, synthetic construct
  REGION 1..1511: note = Description of Artificial Sequence: Synthetic polypeptide
ATRRYYLGAVELSWDYMQSDLGELPVDARFPPRVPKSFPFNTSVVYKKTLFVEFTDHLFNIAKPRPPWMGLLGPTIQAEVYDTVVITLKNMASHPVSLHAVGVSYWKASEGAEYDDQTSQREKEDDKVFPGGSHTYVWQVLKENGPMASDPLCLTYSYLSHVDLVKDLNSGLIGALLVCREGSLAKEKTQTLHKFILLFAVFDEGKSWHSETKNSLGAPGSPAGSPTSTEEGTSESATPESGPGSEPATSGSETPASSMQDRDAASARAWPKMHTVNGYVNRSLPGLIGCHRKSVYWHVIGMGTTPEVHSIFLEGHTFLVRNHRQASLEISPITFLTAQTLLMDLGQFLLFCHISSHQHDGMEAYVKVDSCPEEPQLRMKNNEEAEDYDDDLTDSEMDVVRFDDDNSPSFIQIRSVAKKHPKTWVHYIAAEEEDWDYAPLVLAPDDRSYKSQYLNNGPQRIGRKYKKVRFMAYTDETFKTREAIQHESGILGPLLYGEVGDTLLIIFKNQASRPYNIYPHGITDVRPLYSRRLPKGVKHLKDFPILPGEIFKYKWTVTVEDGPTKSDPRCLTRYYSSFVNMERDLASGLIGPLLICYKESVDQRGNQIMSDKRNVILFSVFDENRSWYLTENIQRFLPNPAGVQLEDPEFQASNIMHSINGYVFDSLQLSVCLHEVAYWYILSIGAQTDFLSVFFSGYTFKHKMVYEDTLTLFPFSGETVFMSMENPGLWILGCHNSDFRNRGMTALLKVSSCDKNTGDYYEDSYEDISAYLLSKNNAIEPRSFSQNPPVLKRHQREITRTTLQSDQEEIDYDDTISVEMKKEDFDIYDEDENQSPRSFQKKTRHYFIAAVERLWDYGMSSSPHVLRNRAQSGSVPQFKKVVFQEFTDGSFTQPLYRGELNEHLGLLGPYIRAEVEDNIMVTFRNQASRPYSFYSSLISYEEDQRQGAEPRKNFVKPNETKTYFWKVQHHMAPTKDEFDCKAWAYFSDVDLEKDVHSGLIGPLLVCHTNTLNPAHGRQVTVQEFALFFTIFDETKSWYFTENMERNCRAPCNIQMEDPTFKENYRFHAINGYIMDTLPGLVMAQDQRIRWYLLSMGSNENIHSIHFSGHVFTVRKKEEYKMALYNLYPGVFETVEMLPSKAGIWRVECLIGEHLHAGMSTLFLVYSNKCQTPLGMASGHIRDFQITASGQYGQWAPKLARLHYSGSINAWSTKEPFSWIKVDLLAPMIIHGIKTQGARQKFSSLYISQFIIMYSLDGKKWQTYRGNSTGTLMVFFGNVDSSGIKHNIFNPPIIARYIRLHPTHYSIRSTLRMELMGCDLNSCSMPLGMESKAISDAQITASSYFTNMFATWSPSKARLHLQGRSNAWRPQVNNPKEWLQVDFQKTMKVTGVTTQGVKSLLTSMYVKEFLISSSQDGHQWTLFFQNGKVKVFQGNQDSFTPVVNSLDPPLLTRYLRIHPQSWVHQIALRMEVLGCEAQDLYGAGSPGAETAEQKLISEEDLSPATGHHHHHH

SEQ ID NO: 618 - DNA, 4536 bp, synthetic construct
  misc_feature 1..4536: note = Description of Artificial Sequence: Synthetic polynucleotide
  source 1..4536: mol_type = other DNA
gccaccagaagatactacctgggtgcagtggaactgtcatgggactatatgcaaagtgatctcggtgagctgcctgtggacgcaagatttcctcctagagtgccaaaatcttttccattcaacacctcagtcgtgtacaaaaagactctgtttgtagaattcacggatcaccttttcaacatcgctaagccaaggccaccctggatgggtctgctaggtcctaccatccaggctgaggtttatgatacagtggtcattacacttaagaacatggcttcccatcctgtcagtcttcatgctgttggtgtatcctactggaaagcttctgagggagctgaatatgatgatcagaccagtcaaagggagaaagaagatgataaagtcttccctggtggaagccatacatatgtctggcaggtcctgaaagagaatggtccaatggcctctgacccactgtgccttacctactcatatctttctcatgtggacctggtaaaagacttgaattcaggcctcattggagccctactagtatgtagagaagggagtctggccaaggaaaagacacagaccttgcacaaatttatactactttttgctgtatttgatgaagggaaaagttggcactcagaaacaaagaactccttgggcgcgccaggttctcctgctggctcccccacctcaacagaagaggggacaagcgaaagcgctacgcctgagagtggccctggctctgagccagccacctccggctctgaaacccctgcctcgagcatgcaggatagggatgctgcatctgctcgggcctggcctaaaatgcacacagtcaatggttatgtaaacaggtctctgccaggtctgattggatgccacaggaaatcagtctattggcatgtgattggaatgggcaccactcctgaagtgcactcaatattcctcgaaggtcacacatttcttgtgaggaaccatcgccaggctagcttggaaatctcgccaataactttccttactgctcaaacactcttgatggaccttggacagtttctactgttttgtcatatctcttcccaccaacatgatggcatggaagcttatgtcaaagtagacagctgtccagaggaaccccaactacgaatgaaaaataatgaagaagcggaagactatgatgatgatcttactgattctgaaatggatgtggtcaggtttgatgatgacaactctccttcctttatccaaattcgctcagttgccaagaagcatcctaaaacttgggtacattacattgctgctgaagaggaggactgggactatgctcccttagtcctcgcccccgatgacagaagttataaaagtcaatatttgaacaatggccctcagcggattggtaggaagtacaaaaaagtccgatttatggcatacacagatgaaacctttaagactcgtgaagctattcagcatgaatcaggaatcttgggacctttactttatggggaagttggagacacactgttgattatatttaagaatcaagcaagcagaccatataacatctaccctcacggaatcactgatgtccgtcctttgtattcaaggagattaccaaaaggtgtaaaacatttgaaggattttccaattctgccaggagaaatattcaaatataaatggacagtgactgtagaagatgggccaactaaatcagatcctcggtgcctgacccgctattactctagtttcgttaatatggagagagatctagcttcaggactcattggccctctcctcatctgctacaaagaatctgtagatcaaagaggaaaccagataatgtcagacaagaggaatgtcatcctgttttctgtatttgatgagaaccgaagctggtacctcacagagaatatacaacgctttctccccaatccagctggagtgcagcttgaggatccagagttccaagcctccaacatcatgcacagcatcaatggctatgtttttgatagtttgcagttgtcagtttgtttgcatgaggtggcatactggtacattctaagcattggagcacagactgacttcctttctgtcttcttctctggatataccttcaaacacaaaatggtctatgaagacacactcaccctattcccattctcaggagaaactgtcttcatgtcgatggaaaacccaggtctatggattctggggtgccacaactcagactttcggaacagaggcatgaccgccttactgaaggtttctagttgtgacaagaacactggtgattattacgaggacagttatgaagatatttcagcatacttgctgagtaaaaacaatgccattgaaccaagaagcttctctcaaaacccaccagtcttgaaacgccatcaacgggaaataactcgtactactcttcagtcagatcaagaggaaatcgattatgatgataccatatcagttgaaatgaagaaggaagattttgacatttatgatgaggatgaaaatcagagcccccgcagctttcaaaagaaaacacgacactattttattgctgcagtggagaggctctgggattatgggatgagtagctccccacatgttctaagaaacagggctcagagtggcagtgtccctcagttcaagaaagttgttttccaggaatttactgatggctcctttactcagcccttataccgtggagaactaaatgaacatttgggactcctggggccatatataagagcagaagttgaagataatatcatggtaactttcagaaatcaggcctctcgtccctattccttctattctagccttatttcttatgaggaagatcagaggcaaggagcagaacctagaaaaaactttgtcaagcctaatgaaaccaaaacttacttttggaaagtgcaacatcatatggcacccactaaagatgagtttgactgcaaagcctgggcttatttctctgatgttgacctggaaaaagatgtgcactcaggcctgattggaccccttctggtctgccacactaacacactgaaccctgctcatgggagacaagtgacagtacaggaatttgctctgtttttcaccatctttgatgagaccaaaagctggtacttcactgaaaatatggaaagaaactgcagggctccctgcaatatccagatggaagatcccacttttaaagagaattatcgcttccatgcaatcaatggctacataatggatacactacctggcttagtaatggctcaggatcaaaggattcgatggtatctgctcagcatgggcagcaatgaaaacatccattctattcatttcagtggacatgtgttcactgtacgaaaaaaagaggagtataaaatggcactgtacaatctctatccaggtgtttttgagacagtggaaatgttaccatccaaagctggaatttggcgggtggaatgccttattggcgagcatctacatgctgggatgagcacactttttctggtgtacagcaataagtgtcagactcccctgggaatggcttctggacacattagagattttcagattacagcttcaggacaatatggacagtgggccccaaagctggccagacttcattattccggatcaatcaatgcctggagcaccaaggagcccttttcttggatcaaggtggatctgttggcaccaatgattattcacggcatcaagacccagggtgcccgtcagaagttctccagcctctacatctctcagtttatcatcatgtatagtcttgatgggaagaagtggcagacttatcgaggaaattccactggaaccttaatggtcttctttggcaatgtggattcatctgggataaaacacaatatttttaaccctccaattattgctcgatacatccgtttgcacccaactcattatagcattcgcagcactcttcgcatggagttgatgggctgtgatttaaatagttgcagcatgccattgggaatggagagtaaagcaatatcagatgcacagattactgcttcatcctactttaccaatatgtttgccacctggtctccttcaaaagctcgacttcacctccaagggaggagtaatgcctggagacctcaggtgaataatccaaaagagtggctgcaagtggacttccagaagacaatgaaagtcacaggagtaactactcagggagtaaaatctctgcttaccagcatgtatgtgaaggagttcctcatctccagcagtcaagatggccatcagtggactctcttttttcagaatggcaaagtaaaggtttttcagggaaatcaagactccttcacacctgtggtgaactctctagacccaccgttactgactcgctaccttcgaattcacccccagagttgggtgcaccagattgccctgaggatggaggttctgggctgcgaggcacaggacctctacggcgccggatcacctggggccgaaacggccgaacaaaaactcatctcagaagaggatctgtcacctgcaaccggtcatcatcaccatcaccattga

SEQ ID NO: 619 - protein, 1511 aa, synthetic construct
  REGION 1..1511: note = Description of Artificial Sequence: Synthetic polypeptide
ATRRYYLGAVELSWDYMQSDLGELPVDARFPPRVPKSFPFNTSVVYKKTLFVEFTDHLFNIAKPRPPWMGLLGPTIQAEVYDTVVITLKNMASHPVSLHAVGVSYWKASEGAEYDDQTSQREKEDDKVFPGGSHTYVWQVLKENGPMASDPLCLTYSYLSHVDLVKDLNSGLIGALLVCREGSLAKEKTQTLHKFILLFAVFDEGKSWHSETKNSLMQDRDAASARAWPKGAPGSPAGSPTSTEEGTSESATPESGPGSEPATSGSETPASSMHTVNGYVNRSLPGLIGCHRKSVYWHVIGMGTTPEVHSIFLEGHTFLVRNHRQASLEISPITFLTAQTLLMDLGQFLLFCHISSHQHDGMEAYVKVDSCPEEPQLRMKNNEEAEDYDDDLTDSEMDVVRFDDDNSPSFIQIRSVAKKHPKTWVHYIAAEEEDWDYAPLVLAPDDRSYKSQYLNNGPQRIGRKYKKVRFMAYTDETFKTREAIQHESGILGPLLYGEVGDTLLIIFKNQASRPYNIYPHGITDVRPLYSRRLPKGVKHLKDFPILPGEIFKYKWTVTVEDGPTKSDPRCLTRYYSSFVNMERDLASGLIGPLLICYKESVDQRGNQIMSDKRNVILFSVFDENRSWYLTENIQRFLPNPAGVQLEDPEFQASNIMHSINGYVFDSLQLSVCLHEVAYWYILSIGAQTDFLSVFFSGYTFKHKMVYEDTLTLFPFSGETVFMSMENPGLWILGCHNSDFRNRGMTALLKVSSCDKNTGDYYEDSYEDISAYLLSKNNAIEPRSFSQNPPVLKRHQREITRTTLQSDQEEIDYDDTISVEMKKEDFDIYDEDENQSPRSFQKKTRHYFIAAVERLWDYGMSSSPHVLRNRAQSGSVPQFKKVVFQEFTDGSFTQPLYRGELNEHLGLLGPYIRAEVEDNIMVTFRNQASRPYSFYSSLISYEEDQRQGAEPRKNFVKPNETKTYFWKVQHHMAPTKDEFDCKAWAYFSDVDLEKDVHSGLIGPLLVCHTNTLNPAHGRQVTVQEFALFFTIFDETKSWYFTENMERNCRAPCNIQMEDPTFKENYRFHAINGYIMDTLPGLVMAQDQRIRWYLLSMGSNENIHSIHFSGHVFTVRKKEEYKMALYNLYPGVFETVEMLPSKAGIWRVECLIGEHLHAGMSTLFLVYSNKCQTPLGMASGHIRDFQITASGQYGQWAPKLARLHYSGSINAWSTKEPFSWIKVDLLAPMIIHGIKTQGARQKFSSLYISQFIIMYSLDGKKWQTYRGNSTGTLMVFFGNVDSSGIKHNIFNPPIIARYIRLHPTHYSIRSTLRMELMGCDLNSCSMPLGMESKAISDAQITASSYFTNMFATWSPSKARLHLQGRSNAWRPQVNNPKEWLQVDFQKTMKVTGVTTQGVKSLLTSMYVKEFLISSSQDGHQWTLFFQNGKVKVFQGNQDSFTPVVNSLDPPLLTRYLRIHPQSWVHQIALRMEVLGCEAQDLYGAGSPGAETAEQKLISEEDLSPATGHHHHHH

SEQ ID NO: 620 - DNA, 4536 bp, synthetic construct
  misc_feature 1..4536: note = Description of Artificial Sequence: Synthetic polynucleotide
  source 1..4536: mol_type = other DNA
gccaccagaagatactacctgggtgcagtggaactgtcatgggactatatgcaaagtgatctcggtgagctgcctgtggacgcaagatttcctcctagagtgccaaaatcttttccattcaacacctcagtcgtgtacaaaaagactctgtttgtagaattcacggatcaccttttcaacatcgctaagccaaggccaccctggatgggtctgctaggtcctaccatccaggctgaggtttatgatacagtggtcattacacttaagaacatggcttcccatcctgtcagtcttcatgctgttggtgtatcctactggaaagcttctgagggagctgaatatgatgatcagaccagtcaaagggagaaagaagatgataaagtcttccctggtggaagccatacatatgtctggcaggtcctgaaagagaatggtccaatggcctctgacccactgtgccttacctactcatatctttctcatgtggacctggtaaaagacttgaattcaggcctcattggagccctactagtatgtagagaagggagtctggccaaggaaaagacacagaccttgcacaaatttatactactttttgctgtatttgatgaagggaaaagttggcactcagaaacaaagaactccttgatgcaggatagggatgctgcatctgctcgggcctggcctaaaggcgcgccaggttctcctgctggctcccccacctcaacagaagaggggacaagcgaaagcgctacgcctgagagtggccctggctctgagccagccacctccggctctgaaacccctgcctcgagcatgcacacagtcaatggttatgtaaacaggtctctgccaggtctgattggatgccacaggaaatcagtctattggcatgtgattggaatgggcaccactcctgaagtgcactcaatattcctcgaaggtcacacatttcttgtgaggaaccatcgccaggctagcttggaaatctcgccaataactttccttactgctcaaacactcttgatggaccttggacagtttctactgttttgtcatatctcttcccaccaacatgatggcatggaagcttatgtcaaagtagacagctgtccagaggaaccccaactacgaatgaaaaataatgaagaagcggaagactatgatgatgatcttactgattctgaaatggatgtggtcaggtttgatgatgacaactctccttcctttatccaaattcgctcagttgccaagaagcatcctaaaacttgggtacattacattgctgctgaagaggaggactgggactatgctcccttagtcctcgcccccgatgacagaagttataaaagtcaatatttgaacaatggccctcagcggattggtaggaagtacaaaaaagtccgatttatggcatacacagatgaaacctttaagactcgtgaagctattcagcatgaatcaggaatcttgggacctttactttatggggaagttggagacacactgttgattatatttaagaatcaagcaagcagaccatataacatctaccctcacggaatcactgatgtccgtcctttgtattcaaggagattaccaaaaggtgtaaaacatttgaaggattttccaattctgccaggagaaatattcaaatataaatggacagtgactgtagaagatgggccaactaaatcagatcctcggtgcctgacccgctattactctagtttcgttaatatggagagagatctagcttcaggactcattggccctctcctcatctgctacaaagaatctgtagatcaaagaggaaaccagataatgtcagacaagaggaatgtcatcctgttttctgtatttgatgagaaccgaagctggtacctcacagagaatatacaacgctttctccccaatccagctggagtgcagcttgaggatccagagttccaagcctccaacatcatgcacagcatcaatggctatgtttttgatagtttgcagttgtcagtttgtttgcatgaggtggcatactggtacattctaagcattggagcacagactgacttcctttctgtcttcttctctggatataccttcaaacacaaaatggtctatgaagacacactcaccctattcccattctcaggagaaactgtcttcatgtcgatggaaaacccaggtctatggattctggggtgccacaactcagactttcggaacagaggcatgaccgccttactgaaggtttctagttgtgacaagaacactggtgattattacgaggacagttatgaagatatttcagcatacttgctgagtaaaaacaatgccattgaaccaagaagcttctctcaaaacccaccagtcttgaaacgccatcaacgggaaataactcgtactactcttcagtcagatcaagaggaaatcgattatgatgataccatatcagttgaaatgaagaaggaagattttgacatttatgatgaggatgaaaatcagagcccccgcagctttcaaaagaaaacacgacactattttattgctgcagtggagaggctctgggattatgggatgagtagctccccacatgttctaagaaacagggctcagagtggcagtgtccctcagttcaagaaagttgttttccaggaatttactgatggctcctttactcagcccttataccgtggagaactaaatgaacatttgggactcctggggccatatataagagcagaagttgaagataatatcatggtaactttcagaaatcaggcctctcgtccctattccttctattctagccttatttcttatgaggaagatcagaggcaaggagcagaacctagaaaaaactttgtcaagcctaatgaaaccaaaacttacttttggaaagtgcaacatcatatggcacccactaaagatgagtttgactgcaaagcctgggcttatttctctgatgttgacctggaaaaagatgtgcactcaggcctgattggaccccttctggtctgccacactaacacactgaaccctgctcatgggagacaagtgacagtacaggaatttgctctgtttttcaccatctttgatgagaccaaaagctggtacttcactgaaaatatggaaagaaactgcagggctccctgcaatatccagatggaagatcccacttttaaagagaattatcgcttccatgcaatcaatggctacataatggatacactacctggcttagtaatggctcaggatcaaaggattcgatggtatctgctcagcatgggcagcaatgaaaacatccattctattcatttcagtggacatgtgttcactgtacgaaaaaaagaggagtataaaatggcactgtacaatctctatccaggtgtttttgagacagtggaaatgttaccatccaaagctggaatttggcgggtggaatgccttattggcgagcatctacatgctgggatgagcacactttttctggtgtacagcaataagtgtcagactcccctgggaatggcttctggacacattagagattttcagattacagcttcaggacaatatggacagtgggccccaaagctggccagacttcattattccggatcaatcaatgcctggagcaccaaggagcccttttcttggatcaaggtggatctgttggcaccaatgattattcacggcatcaagacccagggtgcccgtcagaagttctccagcctctacatctctcagtttatcatcatgtatagtcttgatgggaagaagtggcagacttatcgaggaaattccactggaaccttaatggtcttctttggcaatgtggattcatctgggataaaacacaatatttttaaccctccaattattgctcgatacatccgtttgcacccaactcattatagcattcgcagcactcttcgcatggagttgatgggctgtgatttaaatagttgcagcatgccattgggaatggagagtaaagcaatatcagatgcacagattactgcttcatcctactttaccaatatgtttgccacctggtctccttcaaaagctcgacttcacctccaagggaggagtaatgcctggagacctcaggtgaataatccaaaagagtggctgcaagtggacttccagaagacaatgaaagtcacaggagtaactactcagggagtaaaatctctgcttaccagcatgtatgtgaaggagttcctcatctccagcagtcaagatggccatcagtggactctcttttttcagaatggcaaagtaaaggtttttcagggaaatcaagactccttcacacctgtggtgaactctctagacccaccgttactgactcgctaccttcgaattcacccccagagttgggtgcaccagattgccctgaggatggaggttctgggctgcgaggcacaggacctctacggcgccggatcacctggggccgaaacggccgaacaaaaactcatctcagaagaggatctgtcacctgcaaccggtcatcatcaccatcaccattga

SEQ ID NO: 621 - protein, 1514 aa, synthetic construct
  REGION 1..1514: note = Description of Artificial Sequence: Synthetic polypeptide
ATRRYYLGAVELSWDYMQSDLGELPVDARFPPRVPKSFPFNTSVVYKKTLFVEFTDHLFNIAKPRPPWMGLLGPTIQAEVYDTVVITLKNMASHPVSLHAVGVSYWKASEGAEYDDQTSQREKEDDKVFPGGSHTYVWQVLKENGPMASDPLCLTYSYLSHVDLVKDLNSGLIGALLVCREGSLAKEKTQTLHKFILLFAVFDEGKSWHSETKNSLMQDRDAASARAWPKMHTVNGYVNRSLPGLIGCHRKSVYWHVIGMGTTPEVHSIFLEGHTFLVRNHRQASLEISPITFLTAQTLLMDLGQFLLFCHISSHQHDGMEAYVKVDSCPEEPGAPGSPAGSPTSTEEGTSESATPESGPGSEPATSGSETPASSVQLQLRMKNNEEAEDYDDDLTDSEMDVVRFDDDNSPSFIQIRSVAKKHPKTWVHYIAAEEEDWDYAPLVLAPDDRSYKSQYLNNGPQRIGRKYKKVRFMAYTDETFKTREAIQHESGILGPLLYGEVGDTLLIIFKNQASRPYNIYPHGITDVRPLYSRRLPKGVKHLKDFPILPGEIFKYKWTVTVEDGPTKSDPRCLTRYYSSFVNMERDLASGLIGPLLICYKESVDQRGNQIMSDKRNVILFSVFDENRSWYLTENIQRFLPNPAGVQLEDPEFQASNIMHSINGYVFDSLQLSVCLHEVAYWYILSIGAQTDFLSVFFSGYTFKHKMVYEDTLTLFPFSGETVFMSMENPGLWILGCHNSDFRNRGMTALLKVSSCDKNTGDYYEDSYEDISAYLLSKNNAIEPRSFSQNPPVLKRHQREITRTTLQSDQEEIDYDDTISVEMKKEDFDIYDEDENQSPRSFQKKTRHYFIAAVERLWDYGMSSSPHVLRNRAQSGSVPQFKKVVFQEFTDGSFTQPLYRGELNEHLGLLGPYIRAEVEDNIMVTFRNQASRPYSFYSSLISYEEDQRQGAEPRKNFVKPNETKTYFWKVQHHMAPTKDEFDCKAWAYFSDVDLEKDVHSGLIGPLLVCHTNTLNPAHGRQVTVQEFALFFTIFDETKSWYFTENMERNCRAPCNIQMEDPTFKENYRFHAINGYIMDTLPGLVMAQDQRIRWYLLSMGSNENIHSIHFSGHVFTVRKKEEYKMALYNLYPGVFETVEMLPSKAGIWRVECLIGEHLHAGMSTLFLVYSNKCQTPLGMASGHIRDFQITASGQYGQWAPKLARLHYSGSINAWSTKEPFSWIKVDLLAPMIIHGIKTQGARQKFSSLYISQFIIMYSLDGKKWQTYRGNSTGTLMVFFGNVDSSGIKHNIFNPPIIARYIRLHPTHYSIRSTLRMELMGCDLNSCSMPLGMESKAISDAQITASSYFTNMFATWSPSKARLHLQGRSNAWRPQVNNPKEWLQVDFQKTMKVTGVTTQGVKSLLTSMYVKEFLISSSQDGHQWTLFFQNGKVKVFQGNQDSFTPVVNSLDPPLLTRYLRIHPQSWVHQIALRMEVLGCEAQDLYGAGSPGAETAEQKLISEEDLSPATGHHHHHH

SEQ ID NO: 622 - DNA, 4545 bp, synthetic construct
  misc_feature 1..4545: note = Description of Artificial Sequence: Synthetic polynucleotide
  source 1..4545: mol_type = other DNA
gccaccagaagatactacctgggtgcagtggaactgtcatgggactatatgcaaagtgatctcggtgagctgcctgtggacgcaagatttcctcctagagtgccaaaatcttttccattcaacacctcagtcgtgtacaaaaagactctgtttgtagaattcacggatcaccttttcaacatcgctaagccaaggccaccctggatgggtctgctaggtcctaccatccaggctgaggtttatgatacagtggtcattacacttaagaacatggcttcccatcctgtcagtcttcatgctgttggtgtatcctactggaaagcttctgagggagctgaatatgatgatcagaccagtcaaagggagaaagaagatgataaagtcttccctggtggaagccatacatatgtctggcaggtcctgaaagagaatggtccaatggcctctgacccactgtgccttacctactcatatctttctcatgtggacctggtaaaagacttgaattcaggcctcattggagccctactagtatgtagagaagggagtctggccaaggaaaagacacagaccttgcacaaatttatactactttttgctgtatttgatgaagggaaaagttggcactcagaaacaaagaactccttgatgcaggatagggatgctgcatctgctcgggcctggcctaaaatgcacacagtcaatggttatgtaaacaggtctctgccaggtctgattggatgccacaggaaatcagtctattggcatgtgattggaatgggcaccactcctgaagtgcactcaatattcctcgaaggtcacacatttcttgtgaggaaccatcgccaggctagcttggaaatctcgccaataactttccttactgctcaaacactcttgatggaccttggacagtttctactgttttgtcatatctcttcccaccaacatgatggcatggaagcttatgtcaaagtagacagctgtccagaggaacccggcgcgccaggttctcctgctggctcccccacctcaacagaagaggggacaagcgaaagcgctacgcctgagagtggccctggctctgagccagccacctccggctctgaaacccctgcctcgagcgtgcaacttcaactacgaatgaaaaataatgaagaagcggaagactatgatgatgatcttactgattctgaaatggatgtggtcaggtttgatgatgacaactctccttcctttatccaaattcgctcagttgccaagaagcatcctaaaacttgggtacattacattgctgctgaagaggaggactgggactatgctcccttagtcctcgcccccgatgacagaagttataaaagtcaatatttgaacaatggccctcagcggattggtaggaagtacaaaaaagtccgatttatggcatacacagatgaaacctttaagactcgtgaagctattcagcatgaatcaggaatcttgggacctttactttatggggaagttggagacacactgttgattatatttaagaatcaagcaagcagaccatataacatctaccctcacggaatcactgatgtccgtcctttgtattcaaggagattaccaaaaggtgtaaaacatttgaaggattttccaattctgccaggagaaatattcaaatataaatggacagtgactgtagaagatgggccaactaaatcagatcctcggtgcctgacccgctattactctagtttcgttaatatggagagagatctagcttcaggactcattggccctctcctcatctgctacaaagaatctgtagatcaaagaggaaaccagataatgtcagacaagaggaatgtcatcctgttttctgtatttgatgagaaccgaagctggtacctcacagagaatatacaacgctttctccccaatccagctggagtgcagcttgaggatccagagttccaagcctccaacatcatgcacagcatcaatggctatgtttttgatagtttgcagttgtcagtttgtttgcatgaggtggcatactggtacattctaagcattggagcacagactgacttcctttctgtcttcttctctggatataccttcaaacacaaaatggtctatgaagacacactcaccctattcccattctcaggagaaactgtcttcatgtcgatggaaaacccaggtctatggattctggggtgccacaactcagactttcggaacagaggcatgaccgccttactgaaggtttctagttgtgacaagaacactggtgattattacgaggacagttatgaagatatttcagcatacttgctgagtaaaaacaatgccattgaaccaagaagcttctctcaaaacccaccagtcttgaaacgccatcaacgggaaataactcgtactactcttcagtcagatcaagaggaaatcgattatgatgataccatatcagttgaaatgaagaaggaagattttgacatttatgatgaggatgaaaatcagagcccccgcagctttcaaaagaaaacacgacactattttattgctgcagtggagaggctctgggattatgggatgagtagctccccacatgttctaagaaacagggctcagagtggcagtgtccctcagttcaagaaagttgttttccaggaatttactgatggctcctttactcagcccttataccgtggagaactaaatgaacatttgggactcctggggccatatataagagcagaagttgaagataatatcatggtaactttcagaaatcaggcctctcgtccctattccttctattctagccttatttcttatgaggaagatcagaggcaaggagcagaacctagaaaaaactttgtcaagcctaatgaaaccaaaacttacttttggaaagtgcaacatcatatggcacccactaaagatgagtttgactgcaaagcctgggcttatttctctgatgttgacctggaaaaagatgtgcactcaggcctgattggaccccttctggtctgccacactaacacactgaaccctgctcatgggagacaagtgacagtacaggaatttgctctgtttttcaccatctttgatgagaccaaaagctggtacttcactgaaaatatggaaagaaactgcagggctccctgcaatatccagatggaagatcccacttttaaagagaattatcgcttccatgcaatcaatggctacataatggatacactacctggcttagtaatggctcaggatcaaaggattcgatggtatctgctcagcatgggcagcaatgaaaacatccattctattcatttcagtggacatgtgttcactgtacgaaaaaaagaggagtataaaatggcactgtacaatctctatccaggtgtttttgagacagtggaaatgttaccatccaaagctggaatttggcgggtggaatgccttattggcgagcatctacatgctgggatgagcacactttttctggtgtacagcaataagtgtcagactcccctgggaatggcttctggacacattagagattttcagattacagcttcaggacaatatggacagtgggccccaaagctggccagacttcattattccggatcaatcaatgcctggagcaccaaggagcccttttcttggatcaaggtggatctgttggcaccaatgattattcacggcatcaagacccagggtgcccgtcagaagttctccagcctctacatctctcagtttatcatcatgtatagtcttgatgggaagaagtggcagacttatcgaggaaattccactggaaccttaatggtcttctttggcaatgtggattcatctgggataaaacacaatatttttaaccctccaattattgctcgatacatccgtttgcacccaactcattatagcattcgcagcactcttcgcatggagttgatgggctgtgatttaaatagttgcagcatgccattgggaatggagagtaaagcaatatcagatgcacagattactgcttcatcctactttaccaatatgtttgccacctggtctccttcaaaagctcgacttcacctccaagggaggagtaatgcctggagacctcaggtgaataatccaaaagagtggctgcaagtggacttccagaagacaatgaaagtcacaggagtaactactcagggagtaaaatctctgcttaccagcatgtatgtgaaggagttcctcatctccagcagtcaagatggccatcagtggactctcttttttcagaatggcaaagtaaaggtttttcagggaaatcaagactccttcacacctgtggtgaactctctagacccaccgttactgactcgctaccttcgaattcacccccagagttgggtgcaccagattgccctgaggatggaggttctgggctgcgaggcacaggacctctacggcgccggatcacctggggccgaaacggccgaacaaaaactcatctcagaagaggatctgtcacctgcaaccggtcatcatcaccatcaccattga

SEQ ID NO: 623 - protein, 1514 aa, synthetic construct
  REGION 1..1514: note = Description of Artificial Sequence: Synthetic polypeptide
ATRRYYLGAVELSWDYMQSDLGELPVDARFPPRVPKSFPFNTSVVYKKTLFVEFTDHLFNIAKPRPPWMGLLGPTIQAEVYDTVVITLKNMASHPVSLHAVGVSYWKASEGAEYDDQTSQREKEDDKVFPGGSHTYVWQVLKENGPMASDPLCLTYSYLSHVDLVKDLNSGLIGALLVCREGSLAKEKTQTLHKFILLFAVFDEGKSWHSETKNSLMQDRDAASARAWPKMHTVNGYVNRSLPGLIGCHRKSVYWHVIGMGTTPEVHSIFLEGHTFLVRNHRQASLEISPITFLTAQTLLMDLGQFLLFCHISSHQHDGMEAYVKVDSCPEEPQLRMKNNEEAEDYDDDLTDSEMDVVRFDDDNSPSFIQIRSVASVAGAPGSPAGSPTSTEEGTSESATPESGPGSEPATSGSETPASSKKHPKTWVHYIAAEEEDWDYAPLVLAPDDRSYKSQYLNNGPQRIGRKYKKVRFMAYTDETFKTREAIQHESGILGPLLYGEVGDTLLIIFKNQASRPYNIYPHGITDVRPLYSRRLPKGVKHLKDFPILPGEIFKYKWTVTVEDGPTKSDPRCLTRYYSSFVNMERDLASGLIGPLLICYKESVDQRGNQIMSDKRNVILFSVFDENRSWYLTENIQRFLPNPAGVQLEDPEFQASNIMHSINGYVFDSLQLSVCLHEVAYWYILSIGAQTDFLSVFFSGYTFKHKMVYEDTLTLFPFSGETVFMSMENPGLWILGCHNSDFRNRGMTALLKVSSCDKNTGDYYEDSYEDISAYLLSKNNAIEPRSFSQNPPVLKRHQREITRTTLQSDQEEIDYDDTISVEMKKEDFDIYDEDENQSPRSFQKKTRHYFIAAVERLWDYGMSSSPHVLRNRAQSGSVPQFKKVVFQEFTDGSFTQPLYRGELNEHLGLLGPYIRAEVEDNIMVTFRNQASRPYSFYSSLISYEEDQRQGAEPRKNFVKPNETKTYFWKVQHHMAPTKDEFDCKAWAYFSDVDLEKDVHSGLIGPLLVCHTNTLNPAHGRQVTVQEFALFFTIFDETKSWYFTENMERNCRAPCNIQMEDPTFKENYRFHAINGYIMDTLPGLVMAQDQRIRWYLLSMGSNENIHSIHFSGHVFTVRKKEEYKMALYNLYPGVFETVEMLPSKAGIWRVECLIGEHLHAGMSTLFLVYSNKCQTPLGMASGHIRDFQITASGQYGQWAPKLARLHYSGSINAWSTKEPFSWIKVDLLAPMIIHGIKTQGARQKFSSLYISQFIIMYSLDGKKWQTYRGNSTGTLMVFFGNVDSSGIKHNIFNPPIIARYIRLHPTHYSIRSTLRMELMGCDLNSCSMPLGMESKAISDAQITASSYFTNMFATWSPSKARLHLQGRSNAWRPQVNNPKEWLQVDFQKTMKVTGVTTQGVKSLLTSMYVKEFLISSSQDGHQWTLFFQNGKVKVFQGNQDSFTPVVNSLDPPLLTRYLRIHPQSWVHQIALRMEVLGCEAQDLYGAGSPGAETAEQKLISEEDLSPATGHHHHHH

SEQ ID NO: 624 - DNA, 4545 bp, synthetic construct
  misc_feature 1..4545: note = Description of Artificial Sequence: Synthetic polynucleotide
  source 1..4545: mol_type = other DNA
gccaccagaagatactacctgggtgcagtggaactgtcatgggactatatgcaaagtgatctcggtgagctgcctgtggacgcaagatttcctcctagagtgccaaaatcttttccattcaacacctcagtcgtgtacaaaaagactctgtttgtagaattcacggatcaccttttcaacatcgctaagccaaggccaccctggatgggtctgctaggtcctaccatccaggctgaggtttatgatacagtggtcattacacttaagaacatggcttcccatcctgtcagtcttcatgctgttggtgtatcctactggaaagcttctgagggagctgaatatgatgatcagaccagtcaaagggagaaagaagatgataaagtcttccctggtggaagccatacatatgtctggcaggtcctgaaagagaatggtccaatggcctctgacccactgtgccttacctactcatatctttctcatgtggacctggtaaaagacttgaattcaggcctcattggagccctactagtatgtagagaagggagtctggccaaggaaaagacacagaccttgcacaaatttatactactttttgctgtatttgatgaagggaaaagttggcactcagaaacaaagaactccttgatgcaggatagggatgctgcatctgctcgggcctggcctaaaatgcacacagtcaatggttatgtaaacaggtctctgccaggtctgattggatgccacaggaaatcagtctattggcatgtgattggaatgggcaccactcctgaagtgcactcaatattcctcgaaggtcacacatttcttgtgaggaaccatcgccaggctagcttggaaatctcgccaataactttccttactgctcaaacactcttgatggaccttggacagtttctactgttttgtcatatctcttcccaccaacatgatggcatggaagcttatgtcaaagtagacagctgtccagaggaaccccaactacgaatgaaaaataatgaagaagcggaagactatgatgatgatcttactgattctgaaatggatgtggtcaggtttgatgatgacaactctccttcctttatccaaattcgctcagttgcctctgtagcaggcgcgccaggttctcctgctggctcccccacctcaacagaagaggggacaagcgaaagcgctacgcctgagagtggccctggctctgagccagccacctccggctctgaaacccctgcctcgagcaagaagcatcctaaaacttgggtacattacattgctgctgaagaggaggactgggactatgctcccttagtcctcgcccccgatgacagaagttataaaagtcaatatttgaacaatggccctcagcggattggtaggaagtacaaaaaagtccgatttatggcatacacagatgaaacctttaagactcgtgaagctattcagcatgaatcaggaatcttgggacctttactttatggggaagttggagacacactgttgattatatttaagaatcaagcaagcagaccatataacatctaccctcacggaatcactgatgtccgtcctttgtattcaaggagattaccaaaaggtgtaaaacatttgaaggattttccaattctgccaggagaaatattcaaatataaatggacagtgactgtagaagatgggccaactaaatcagatcctcggtgcctgacccgctattactctagtttcgttaatatggagagagatctagcttcaggactcattggccctctcctcatctgctacaaagaatctgtagatcaaagaggaaaccagataatgtcagacaagaggaatgtcatcctgttttctgtatttgatgagaaccgaagctggtacctcacagagaatatacaacgctttctccccaatccagctggagtgcagcttgaggatccagagttccaagcctccaacatcatgcacagcatcaatggctatgtttttgatagtttgcagttgtcagtttgtttgcatgaggtggcatactggtacattctaagcattggagcacagactgacttcctttctgtcttcttctctggatataccttcaaacacaaaatggtctatgaagacacactcaccctattcccattctcaggagaaactgtcttcatgtcgatggaaaacccaggtctatggattctggggtgccacaactcagactttcggaacagaggcatgaccgccttactgaaggtttctagttgtgacaagaacactggtgattattacgaggacagttatgaagatatttcagcatacttgctgagtaaaaacaatgccattgaaccaagaagcttctctcaaaacccaccagtcttgaaacgccatcaacgggaaataactcgtactactcttcagtcagatcaagaggaaatcgattatgatgataccatatcagttgaaatgaagaaggaagattttgacatttatgatgaggatgaaaatcagagcccccgcagctttcaaaagaaaacacgacactattttattgctgcagtggagaggctctgggattatgggatgagtagctccccacatgttctaagaaacagggctcagagtggcagtgtccctcagttcaagaaagttgttttccaggaatttactgatggctcctttactcagcccttataccgtggagaactaaatgaacatttgggactcctggggccatatataagagcagaagttgaagataatatcatggtaactttcagaaatcaggcctctcgtccctattccttctattctagccttatttcttatgaggaagatcagaggcaaggagcagaacctagaaaaaactttgtcaagcctaatgaaaccaaaacttacttttggaaagtgcaacatcatatggcacccactaaagatgagtttgactgcaaagcctgggcttatttctctgatgttgacctggaaaaagatgtgcactcaggcctgattggaccccttctggtctgccacactaacacactgaaccctgctcatgggagacaagtgacagtacaggaatttgctctgtttttcaccatctttgatgagaccaaaagctggtacttcactgaaaatatggaaagaaactgcagggctccctgcaatatccagatggaagatcccacttttaaagagaattatcgcttccatgcaatcaatggctacataatggatacactacctggcttagtaatggctcaggatcaaaggattcgatggtatctgctcagcatgggcagcaatgaaaacatccattctattcatttcagtggacatgtgttcactgtacgaaaaaaagaggagtataaaatggcactgtacaatctctatccaggtgtttttgagacagtggaaatgttaccatccaaagctggaatttggcgggtggaatgccttattggcgagcatctacatgctgggatgagcacactttttctggtgtacagcaataagtgtcagactcccctgggaatggcttctggacacattagagattttcagattacagcttcaggacaatatggacagtgggccccaaagctggccagacttcattattccggatcaatcaatgcctggagcaccaaggagcccttttcttggatcaaggtggatctgttggcaccaatgattattcacggcatcaagacccagggtgcccgtcagaagttctccagcctctacatctctcagtttatcatcatgtatagtcttgatgggaagaagtggcagacttatcgaggaaattccactggaaccttaatggtcttctttggcaatgtggattcatctgggataaaacacaatatttttaaccctccaattattgctcgatacatccgtttgcacccaactcattatagcattcgcagcactcttcgcatggagttgatgggctgtgatttaaatagttgcagcatgccattgggaatggagagtaaagcaatatcagatgcacagattactgcttcatcctactttaccaatatgtttgccacctggtctccttcaaaagctcgacttcacctccaagggaggagtaatgcctggagacctcaggtgaataatccaaaagagtggctgcaagtggacttccagaagacaatgaaagtcacaggagtaactactcagggagtaaaatctctgcttaccagcatgtatgtgaaggagttcctcatctccagcagtcaagatggccatcagtggactctcttttttcagaatggcaaagtaaaggtttttcagggaaatcaagactccttcacacctgtggtgaactctctagacccaccgttactgactcgctaccttcgaattcacccccagagttgggtgcaccagattgccctgaggatggaggttctgggctgcgaggcacaggacctctacggcgccggatcacctggggccgaaacggccgaacaaaaactcatctcagaagaggatctgtcacctgcaaccggtcatcatcaccatcaccattga

SEQ ID NO: 625 - protein, 1511 aa, synthetic construct
  REGION 1..1511: note = Description of Artificial Sequence: Synthetic polypeptide
ATRRYYLGAVELSWDYMQSDLGELPVDARFPPRVPKSFPFNTSVVYKKTLFVEFTDHLFNIAKPRPPWMGLLGPTIQAEVYDTVVITLKNMASHPVSLHAVGVSYWKASEGAEYDDQTSQREKEDDKVFPGGSHTYVWQVLKENGPMASDPLCLTYSYLSHVDLVKDLNSGLIGALLVCREGSLAKEKTQTLHKFILLFAVFDEGKSWHSETKNSLMQDRDAASARAWPKMHTVNGYVNRSLPGLIGCHRKSVYWHVIGMGTTPEVHSIFLEGHTFLVRNHRQASLEISPITFLTAQTLLMDLGQFLLFCHISSHQHDGMEAYVKVDSCPEEPQLRMKNNEEAEDYDDDLTDSEMDVVRFDDDNSPSFIQIRSVAKKHPKTWVHYIAAEEEDWDYAPLVLAPDGAPGSPAGSPTSTEEGTSESATPESGPGSEPATSGSETPASSDRSYKSQYLNNGPQRIGRKYKKVRFMAYTDETFKTREAIQHESGILGPLLYGEVGDTLLIIFKNQASRPYNIYPHGITDVRPLYSRRLPKGVKHLKDFPILPGEIFKYKWTVTVEDGPTKSDPRCLTRYYSSFVNMERDLASGLIGPLLICYKESVDQRGNQIMSDKRNVILFSVFDENRSWYLTENIQRFLPNPAGVQLEDPEFQASNIMHSINGYVFDSLQLSVCLHEVAYWYILSIGAQTDFLSVFFSGYTFKHKMVYEDTLTLFPFSGETVFMSMENPGLWILGCHNSDFRNRGMTALLKVSSCDKNTGDYYEDSYEDISAYLLSKNNAIEPRSFSQNPPVLKRHQREITRTTLQSDQEEIDYDDTISVEMKKEDFDIYDEDENQSPRSFQKKTRHYFIAAVERLWDYGMSSSPHVLRNRAQSGSVPQFKKVVFQEFTDGSFTQPLYRGELNEHLGLLGPYIRAEVEDNIMVTFRNQASRPYSFYSSLISYEEDQRQGAEPRKNFVKPNETKTYFWKVQHHMAPTKDEFDCKAWAYFSDVDLEKDVHSGLIGPLLVCHTNTLNPAHGRQVTVQEFALFFTIFDETKSWYFTENMERNCRAPCNIQMEDPTFKENYRFHAINGYIMDTLPGLVMAQDQRIRWYLLSMGSNENIHSIHFSGHVFTVRKKEEYKMALYNLYPGVFETVEMLPSKAGIWRVECLIGEHLHAGMSTLFLVYSNKCQTPLGMASGHIRDFQITASGQYGQWAPKLARLHYSGSINAWSTKEPFSWIKVDLLAPMIIHGIKTQGARQKFSSLYISQFIIMYSLDGKKWQTYRGNSTGTLMVFFGNVDSSGIKHNIFNPPIIARYIRLHPTHYSIRSTLRMELMGCDLNSCSMPLGMESKAISDAQITASSYFTNMFATWSPSKARLHLQGRSNAWRPQVNNPKEWLQVDFQKTMKVTGVTTQGVKSLLTSMYVKEFLISSSQDGHQWTLFFQNGKVKVFQGNQDSFTPVVNSLDPPLLTRYLRIHPQSWVHQIALRMEVLGCEAQDLYGAGSPGAETAEQKLISEEDLSPATGHHHHHH

SEQ ID NO: 626 - DNA, 4536 bp, synthetic construct
  misc_feature 1..4536: note = Description of Artificial Sequence: Synthetic polynucleotide
  source 1..4536: mol_type = other DNA
gccaccagaagatactacctgggtgcagtggaactgtcatgggactatatgcaaagtgatctcggtgagctgcctgtggacgcaagatttcctcctagagtgccaaaatcttttccattcaacacctcagtcgtgtacaaaaagactctgtttgtagaattcacggatcaccttttcaacatcgctaagccaaggccaccctggatgggtctgctaggtcctaccatccaggctgaggtttatgatacagtggtcattacacttaagaacatggcttcccatcctgtcagtcttcatgctgttggtgtatcctactggaaagcttctgagggagctgaatatgatgatcagaccagtcaaagggagaaagaagatgataaagtcttccctggtggaagccatacatatgtctggcaggtcctgaaagagaatggtccaatggcctctgacccactgtgccttacctactcatatctttctcatgtggacctggtaaaagacttgaattcaggcctcattggagccctactagtatgtagagaagggagtctggccaaggaaaagacacagaccttgcacaaatttatactactttttgctgtatttgatgaagggaaaagttggcactcagaaacaaagaactccttgatgcaggatagggatgctgcatctgctcgggcctggcctaaaatgcacacagtcaatggttatgtaaacaggtctctgccaggtctgattggatgccacaggaaatcagtctattggcatgtgattggaatgggcaccactcctgaagtgcactcaatattcctcgaaggtcacacatttcttgtgaggaaccatcgccaggctagcttggaaatctcgccaataactttccttactgctcaaacactcttgatggaccttggacagtttctactgttttgtcatatctcttcccaccaacatgatggcatggaagcttatgtcaaagtagacagctgtccagaggaaccccaactacgaatgaaaaataatgaagaagcggaagactatgatgatgatcttactgattctgaaatggatgtggtcaggtttgatgatgacaactctccttcctttatccaaattcgctcagttgccaagaagcatcctaaaacttgggtacattacattgctgctgaagaggaggactgggactatgctcccttagtcctcgcccccgatggcgcgccaggttctcctgctggctcccccacctcaacagaagaggggacaagcgaaagcgctacgcctgagagtggccctggctctgagccagccacctccggctctgaaacccctgcctcgagcgacagaagttataaaagtcaatatttgaacaatggccctcagcggattggtaggaagtacaaaaaagtccgatttatggcatacacagatgaaacctttaagactcgtgaagctattcagcatgaatcaggaatcttgggacctttactttatggggaagttggagacacactgttgattatatttaagaatcaagcaagcagaccatataacatctaccctcacggaatcactgatgtccgtcctttgtattcaaggagattaccaaaaggtgtaaaacatttgaaggattttccaattctgccaggagaaatattcaaatataaatggacagtgactgtagaagatgggccaactaaatcagatcctcggtgcctgacccgctattactctagtttcgttaatatggagagagatctagcttcaggactcattggccctctcctcatctgctacaaagaatctgtagatcaaagaggaaaccagataatgtcagacaagaggaatgtcatcctgttttctgtatttgatgagaaccgaagctggtacctcacagagaatatacaacgctttctccccaatccagctggagtgcagcttgaggatccagagttccaagcctccaacatcatgcacagcatcaatggctatgtttttgatagtttgcagttgtcagtttgtttgcatgaggtggcatactggtacattctaagcattggagcacagactgacttcctttctgtcttcttctctggatataccttcaaacacaaaatggtctatgaagacacactcaccctattcccattctcaggagaaactgtcttcatgtcgatggaaaacccaggtctatggattctggggtgccacaactcagactttcggaacagaggcatgaccgccttactgaaggtttctagttgtgacaagaacactggtgattattacgaggacagttatgaagatatttcagcatacttgctgagtaaaaacaatgccattgaaccaagaagcttctctcaaaacccaccagtcttgaaacgccatcaacgggaaataactcgtactactcttcagtcagatcaagaggaaatcgattatgatgataccatatcagttgaaatgaagaaggaagattttgacatttatgatgaggatgaaaatcagagcccccgcagctttcaaaagaaaacacgacactattttattgctgcagtggagaggctctgggattatgggatgagtagctccccacatgttctaagaaacagggctcagagtggcagtgtccctcagttcaagaaagttgttttccaggaatttactgatggctcctttactcagcccttataccgtggagaactaaatgaacatttgggactcctggggccatatataagagcagaagttgaagataatatcatggtaactttcagaaatcaggcctctcgtccctattccttctattctagccttatttcttatgaggaagatcagaggcaaggagcagaacctagaaaaaactttgtcaagcctaatgaaaccaaaacttacttttggaaagtgcaacatcatatggcacccactaaagatgagtttgactgcaaagcctgggcttatttctctgatgttgacctggaaaaagatgtgcactcaggcctgattggaccccttctggtctgccacactaacacactgaaccctgctcatgggagacaagtgacagtacaggaatttgctctgtttttcaccatctttgatgagaccaaaagctggtacttcactgaaaatatggaaagaaactgcagggctccctgcaatatccagatggaagatcccacttttaaagagaattatcgcttccatgcaatcaatggctacataatggatacactacctggcttagtaatggctcaggatcaaaggattcgatggtatctgctcagcatgggcagcaatgaaaacatccattctattcatttcagtggacatgtgttcactgtacgaaaaaaagaggagtataaaatggcactgtacaatctctatccaggtgtttttgagacagtggaaatgttaccatccaaagctggaatttggcgggtggaatgccttattggcgagcatctacatgctgggatgagcacactttttctggtgtacagcaataagtgtcagactcccctgggaatggcttctggacacattagagattttcagattacagcttcaggacaatatggacagtgggccccaaagctggccagacttcattattccggatcaatcaatgcctggagcaccaaggagcccttttcttggatcaaggtggatctgttggcaccaatgattattcacggcatcaagacccagggtgcccgtcagaagttctccagcctctacatctctcagtttatcatcatgtatagtcttgatgggaagaagtggcagacttatcgaggaaattccactggaaccttaatggtcttctttggcaatgtggattcatctgggataaaacacaatatttttaaccctccaattattgctcgatacatccgtttgcacccaactcattatagcattcgcagcactcttcgcatggagttgatgggctgtgatttaaatagttgcagcatgccattgggaatggagagtaaagcaatatcagatgcacagattactgcttcatcctactttaccaatatgtttgccacctggtctccttcaaaagctcgacttcacctccaagggaggagtaatgcctggagacctcaggtgaataatccaaaagagtggctgcaagtggacttccagaagacaatgaaagtcacaggagtaactactcagggagtaaaatctctgcttaccagcatgtatgtgaaggagttcctcatctccagcagtcaagatggccatcagtggactctcttttttcagaatggcaaagtaaaggtttttcagggaaatcaagactccttcacacctgtggtgaactctctagacccaccgttactgactcgctaccttcgaattcacccccagagttgggtgcaccagattgccctgaggatggaggttctgggctgcgaggcacaggacctctacggcgccggatcacctggggccgaaacggccgaacaaaaactcatctcagaagaggatctgtcacctgcaaccggtcatcatcaccatcaccattga

SEQ ID NO: 627 - protein, 1511 aa, synthetic construct
  REGION 1..1511: note = Description of Artificial Sequence: Synthetic polypeptide
ATRRYYLGAVELSWDYMQSDLGELPVDARFPPRVPKSFPFNTSVVYKKTLFVEFTDHLFNIAKPRPPWMGLLGPTIQAEVYDTVVITLKNMASHPVSLHAVGVSYWKASEGAEYDDQTSQREKEDDKVFPGGSHTYVWQVLKENGPMASDPLCLTYSYLSHVDLVKDLNSGLIGALLVCREGSLAKEKTQTLHKFILLFAVFDEGKSWHSETKNSLMQDRDAASARAWPKMHTVNGYVNRSLPGLIGCHRKSVYWHVIGMGTTPEVHSIFLEGHTFLVRNHRQASLEISPITFLTAQTLLMDLGQFLLFCHISSHQHDGMEAYVKVDSCPEEPQLRMKNNEEAEDYDDDLTDSEMDVVRFDDDNSPSFIQIRSVAKKHPKTWVHYIAAEEEDWDYAPLVLAPDDRSYKSQYLNNGPQRIGRKYKKVRFMAYTDETFKTREAIGAPGSPAGSPTSTEEGTSESATPESGPGSEPATSGSETPASSQHESGILGPLLYGEVGDTLLIIFKNQASRPYNIYPHGITDVRPLYSRRLPKGVKHLKDFPILPGEIFKYKWTVTVEDGPTKSDPRCLTRYYSSFVNMERDLASGLIGPLLICYKESVDQRGNQIMSDKRNVILFSVFDENRSWYLTENIQRFLPNPAGVQLEDPEFQASNIMHSINGYVFDSLQLSVCLHEVAYWYILSIGAQTDFLSVFFSGYTFKHKMVYEDTLTLFPFSGETVFMSMENPGLWILGCHNSDFRNRGMTALLKVSSCDKNTGDYYEDSYEDISAYLLSKNNAIEPRSFSQNPPVLKRHQREITRTTLQSDQEEIDYDDTISVEMKKEDFDIYDEDENQSPRSFQKKTRHYFIAAVERLWDYGMSSSPHVLRNRAQSGSVPQFKKVVFQEFTDGSFTQPLYRGELNEHLGLLGPYIRAEVEDNIMVTFRNQASRPYSFYSSLISYEEDQRQGAEPRKNFVKPNETKTYFWKVQHHMAPTKDEFDCKAWAYFSDVDLEKDVHSGLIGPLLVCHTNTLNPAHGRQVTVQEFALFFTIFDETKSWYFTENMERNCRAPCNIQMEDPTFKENYRFHAINGYIMDTLPGLVMAQDQRIRWYLLSMGSNENIHSIHFSGHVFTVRKKEEYKMALYNLYPGVFETVEMLPSKAGIWRVECLIGEHLHAGMSTLFLVYSNKCQTPLGMASGHIRDFQITASGQYGQWAPKLARLHYSGSINAWSTKEPFSWIKVDLLAPMIIHGIKTQGARQKFSSLYISQFIIMYSLDGKKWQTYRGNSTGTLMVFFGNVDSSGIKHNIFNPPIIARYIRLHPTHYSIRSTLRMELMGCDLNSCSMPLGMESKAISDAQITASSYFTNMFATWSPSKARLHLQGRSNAWRPQVNNPKEWLQVDFQKTMKVTGVTTQGVKSLLTSMYVKEFLISSSQDGHQWTLFFQNGKVKVFQGNQDSFTPVVNSLDPPLLTRYLRIHPQSWVHQIALRMEVLGCEAQDLYGAGSPGAETAEQKLISEEDLSPATGHHHHHH

SEQ ID NO: 628 - DNA, 4536 bp, synthetic construct
  misc_feature 1..4536: note = Description of Artificial Sequence: Synthetic polynucleotide
  source 1..4536: mol_type = other DNA
gccaccagaagatactacctgggtgcagtggaactgtcatgggactatatgcaaagtgatctcggtgagctgcctgtggacgcaagatttcctcctagagtgccaaaatcttttccattcaacacctcagtcgtgtacaaaaagactctgtttgtagaattcacggatcaccttttcaacatcgctaagccaaggccaccctggatgggtctgctaggtcctaccatccaggctgaggtttatgatacagtggtcattacacttaagaacatggcttcccatcctgtcagtcttcatgctgttggtgtatcctactggaaagcttctgagggagctgaatatgatgatcagaccagtcaaagggagaaagaagatgataaagtcttccctggtggaagccatacatatgtctggcaggtcctgaaagagaatggtccaatggcctctgacccactgtgccttacctactcatatctttctcatgtggacctggtaaaagacttgaattcaggcctcattggagccctactagtatgtagagaagggagtctggccaaggaaaagacacagaccttgcacaaatttatactactttttgctgtatttgatgaagggaaaagttggcactcagaaacaaagaactccttgatgcaggatagggatgctgcatctgctcgggcctggcctaaaatgcacacagtcaatggttatgtaaacaggtctctgccaggtctgattggatgccacaggaaatcagtctattggcatgtgattggaatgggcaccactcctgaagtgcactcaatattcctcgaaggtcacacatttcttgtgaggaaccatcgccaggctagcttggaaatctcgccaataactttccttactgctcaaacactcttgatggaccttggacagtttctactgttttgtcatatctcttcccaccaacatgatggcatggaagcttatgtcaaagtagacagctgtccagaggaaccccaactacgaatgaaaaataatgaagaagcggaagactatgatgatgatcttactgattctgaaatggatgtggtcaggtttgatgatgacaactctccttcctttatccaaattcgctcagttgccaagaagcatcctaaaacttgggtacattacattgctgctgaagaggaggactgggactatgctcccttagtcctcgcccccgatgacagaagttataaaagtcaatatttgaacaatggccctcagcggattggtaggaagtacaaaaaagtccgatttatggcatacacagatgaaacctttaagactcgtgaagctattggcgcgccaggttctcctgctggctcccccacctcaacagaagaggggacaagcgaaagcgctacgcctgagagtggccctggctctgagccagccacctccggctctgaaacccctgcctcgagccagcatgaatcaggaatcttgggacctttactttatggggaagttggagacacactgttgattatatttaagaatcaagcaagcagaccatataacatctaccctcacggaatcactgatgtccgtcctttgtattcaaggagattaccaaaaggtgtaaaacatttgaaggattttccaattctgccaggagaaatattcaaatataaatggacagtgactgtagaagatgggccaactaaatcagatcctcggtgcctgacccgctattactctagtttcgttaatatggagagagatctagcttcaggactcattggccctctcctcatctgctacaaagaatctgtagatcaaagaggaaaccagataatgtcagacaagaggaatgtcatcctgttttctgtatttgatgagaaccgaagctggtacctcacagagaatatacaacgctttctccccaatccagctggagtgcagcttgaggatccagagttccaagcctccaacatcatgcacagcatcaatggctatgtttttgatagtttgcagttgtcagtttgtttgcatgaggtggcatactggtacattctaagcattggagcacagactgacttcctttctgtcttcttctctggatataccttcaaacacaaaatggtctatgaagacacactcaccctattcccattctcaggagaaactgtcttcatgtcgatggaaaacccaggtctatggattctggggtgccacaactcagactttcggaacagaggcatgaccgccttactgaaggtttctagttgtgacaagaacactggtgattattacgaggacagttatgaagatatttcagcatacttgctgagtaaaaacaatgccattgaaccaagaagcttctctcaaaacccaccagtcttgaaacgccatcaacgggaaataactcgtactactcttcagtcagatcaagaggaaatcgattatgatgataccatatcagttgaaatgaagaaggaagattttgacatttatgatgaggatgaaaatcagagcccccgcagctttcaaaagaaaacacgacactattttattgctgcagtggagaggctctgggattatgggatgagtagctccccacatgttctaagaaacagggctcagagtggcagtgtccctcagttcaagaaagttgttttccaggaatttactgatggctcctttactcagcccttataccgtggagaactaaatgaacatttgggactcctggggccatatataagagcagaagttgaagataatatcatggtaactttcagaaatcaggcctctcgtccctattccttctattctagccttatttcttatgaggaagatcagaggcaaggagcagaacctagaaaaaactttgtcaagcctaatgaaaccaaaacttacttttggaaagtgcaacatcatatggcacccactaaagatgagtttgactgcaaagcctgggcttatttctctgatgttgacctggaaaaagatgtgcactcaggcctgattggaccccttctggtctgccacactaacacactgaaccctgctcatgggagacaagtgacagtacaggaatttgctctgtttttcaccatctttgatgagaccaaaagctggtacttcactgaaaatatggaaagaaactgcagggctccctgcaatatccagatggaagatcccacttttaaagagaattatcgcttccatgcaatcaatggctacataatggatacactacctggcttagtaatggctcaggatcaaaggattcgatggtatctgctcagcatgggcagcaatgaaaacatccattctattcatttcagtggacatgtgttcactgtacgaaaaaaagaggagtataaaatggcactgtacaatctctatccaggtgtttttgagacagtggaaatgttaccatccaaagctggaatttggcgggtggaatgccttattggcgagcatctacatgctgggatgagcacactttttctggtgtacagcaataagtgtcagactcccctgggaatggcttctggacacattagagattttcagattacagcttcaggacaatatggacagtgggccccaaagctggccagacttcattattccggatcaatcaatgcctggagcaccaaggagcccttttcttggatcaaggtggatctgttggcaccaatgattattcacggcatcaagacccagggtgcccgtcagaagttctccagcctctacatctctcagtttatcatcatgtatagtcttgatgggaagaagtggcagacttatcgaggaaattccactggaaccttaatggtcttctttggcaatgtggattcatctgggataaaacacaatatttttaaccctccaattattgctcgatacatccgtttgcacccaactcattatagcattcgcagcactcttcgcatggagttgatgggctgtgatttaaatagttgcagcatgccattgggaatggagagtaaagcaatatcagatgcacagattactgcttcatcctactttaccaatatgtttgccacctggtctccttcaaaagctcgacttcacctccaagggaggagtaatgcctggagacctcaggtgaataatccaaaagagtggctgcaagtggacttccagaagacaatgaaagtcacaggagtaactactcagggagtaaaatctctgcttaccagcatgtatgtgaaggagttcctcatctccagcagtcaagatggccatcagtggactctcttttttcagaatggcaaagtaaaggtttttcagggaaatcaagactccttcacacctgtggtgaactctctagacccaccgttactgactcgctaccttcgaattcacccccagagttgggtgcaccagattgccctgaggatggaggttctgggctgcgaggcacaggacctctacggcgccggatcacctggggccgaaacggccgaacaaaaactcatctcagaagaggatctgtcacctgcaaccggtcatcatcaccatcaccattga

SEQ ID NO: 629 - protein, 1514 aa, synthetic construct
  REGION 1..1514: note = Description of Artificial Sequence: Synthetic polypeptide
ATRRYYLGAVELSWDYMQSDLGELPVDARFPPRVPKSFPFNTSVVYKKTLFVEFTDHLFNIAKPRPPWMGLLGPTIQAEVYDTVVITLKNMASHPVSLHAVGVSYWKASEGAEYDDQTSQREKEDDKVFPGGSHTYVWQVLKENGPMASDPLCLTYSYLSHVDLVKDLNSGLIGALLVCREGSLAKEKTQTLHKFILLFAVFDEGKSWHSETKNSLMQDRDAASARAWPKMHTVNGYVNRSLPGLIGCHRKSVYWHVIGMGTTPEVHSIFLEGHTFLVRNHRQASLEISPITFLTAQTLLMDLGQFLLFCHISSHQHDGMEAYVKVDSCPEEPQLRMKNNEEAEDYDDDLTDSEMDVVRFDDDNSPSFIQIRSVAKKHPKTWVHYIAAEEEDWDYAPLVLAPDDRSYKSQYLNNGPQRIGRKYKKVRFMAYTDETFKTREAIQHESGILGPLLYGEVGDTLLIIFKNQASRPYNIYPHGITDVRPLYSRRLPKGAPGSPAGSPTSTEEGTSESATPESGPGSEPATSGSETPASSLPKGVKHLKDFPILPGEIFKYKWTVTVEDGPTKSDPRCLTRYYSSFVNMERDLASGLIGPLLICYKESVDQRGNQIMSDKRNVILFSVFDENRSWYLTENIQRFLPNPAGVQLEDPEFQASNIMHSINGYVFDSLQLSVCLHEVAYWYILSIGAQTDFLSVFFSGYTFKHKMVYEDTLTLFPFSGETVFMSMENPGLWILGCHNSDFRNRGMTALLKVSSCDKNTGDYYEDSYEDISAYLLSKNNAIEPRSFSQNPPVLKRHQREITRTTLQSDQEEIDYDDTISVEMKKEDFDIYDEDENQSPRSFQKKTRHYFIAAVERLWDYGMSSSPHVLRNRAQSGSVPQFKKVVFQEFTDGSFTQPLYRGELNEHLGLLGPYIRAEVEDNIMVTFRNQASRPYSFYSSLISYEEDQRQGAEPRKNFVKPNETKTYFWKVQHHMAPTKDEFDCKAWAYFSDVDLEKDVHSGLIGPLLVCHTNTLNPAHGRQVTVQEFALFFTIFDETKSWYFTENMERNCRAPCNIQMEDPTFKENYRFHAINGYIMDTLPGLVMAQDQRIRWYLLSMGSNENIHSIHFSGHVFTVRKKEEYKMALYNLYPGVFETVEMLPSKAGIWRVECLIGEHLHAGMSTLFLVYSNKCQTPLGMASGHIRDFQITASGQYGQWAPKLARLHYSGSINAWSTKEPFSWIKVDLLAPMIIHGIKTQGARQKFSSLYISQFIIMYSLDGKKWQTYRGNSTGTLMVFFGNVDSSGIKHNIFNPPIIARYIRLHPTHYSIRSTLRMELMGCDLNSCSMPLGMESKAISDAQITASSYFTNMFATWSPSKARLHLQGRSNAWRPQVNNPKEWLQVDFQKTMKVTGVTTQGVKSLLTSMYVKEFLISSSQDGHQWTLFFQNGKVKVFQGNQDSFTPVVNSLDPPLLTRYLRIHPQSWVHQIALRMEVLGCEAQDLYGAGSPGAETAEQKLISEEDLSPATGHHHHHH

SEQ ID NO: 630 - DNA, 4545 bp, synthetic construct
  misc_feature 1..4545: note = Description of Artificial Sequence: Synthetic polynucleotide
  source 1..4545: mol_type = other DNA
gccaccagaagatactacctgggtgcagtggaactgtcatgggactatatgcaaagtgatctcggtgagctgcctgtggacgcaagatttcctcctagagtgccaaaatcttttccattcaacacctcagtcgtgtacaaaaagactctgtttgtagaattcacggatcaccttttcaacatcgctaagccaaggccaccctggatgggtctgctaggtcctaccatccaggctgaggtttatgatacagtggtcattacacttaagaacatggcttcccatcctgtcagtcttcatgctgttggtgtatcctactggaaagcttctgagggagctgaatatgatgatcagaccagtcaaagggagaaagaagatgataaagtcttccctggtggaagccatacatatgtctggcaggtcctgaaagagaatggtccaatggcctctgacccactgtgccttacctactcatatctttctcatgtggacctggtaaaagacttgaattcaggcctcattggagccctactagtatgtagagaagggagtctggccaaggaaaagacacagaccttgcacaaatttatactactttttgctgtatttgatgaagggaaaagttggcactcagaaacaaagaactccttgatgcaggatagggatgctgcatctgctcgggcctggcctaaaatgcacacagtcaatggttatgtaaacaggtctctgccaggtctgattggatgccacaggaaatcagtctattggcatgtgattggaatgggcaccactcctgaagtgcactcaatattcctcgaaggtcacacatttcttgtgaggaaccatcgccaggctagcttggaaatctcgccaataactttccttactgctcaaacactcttgatggaccttggacagtttctactgttttgtcatatctcttcccaccaacatgatggcatggaagcttatgtcaaagtagacagctgtccagaggaaccccaactacgaatgaaaaataatgaagaagcggaagactatgatgatgatcttactgattctgaaatggatgtggtcaggtttgatgatgacaactctccttcctttatccaaattcgctcagttgccaagaagcatcctaaaacttgggtacattacattgctgctgaagaggaggactgggactatgctcccttagtcctcgcccccgatgacagaagttataaaagtcaatatttgaacaatggccctcagcggattggtaggaagtacaaaaaagtccgatttatggcatacacagatgaaacctttaagactcgtgaagctattcagcatgaatcaggaatcttgggacctttactttatggggaagttggagacacactgttgattatatttaagaatcaagcaagcagaccatataacatctaccctcacggaatcactgatgtccgtcctttgtattcaaggagactccctaaaggcgcgccaggttctcctgctggctcccccacctcaacagaagaggggacaagcgaaagcgctacgcctgagagtggccctggctctgagccagccacctccggctctgaaacccctgcctcgagcttaccaaaaggtgtaaaacatttgaaggattttccaattctgccaggagaaatattcaaatataaatggacagtgactgtagaagatgggccaactaaatcagatcctcggtgcctgacccgctattactctagtttcgttaatatggagagagatctagcttcaggactcattggccctctcctcatctgctacaaagaatctgtagatcaaagaggaaaccagataatgtcagacaagaggaatgtcatcctgttttctgtatttgatgagaaccgaagctggtacctcacagagaatatacaacgctttctccccaatccagctggagtgcagcttgaggatccagagttccaagcctccaacatcatgcacagcatcaatggctatgtttttgatagtttgcagttgtcagtttgtttgcatgaggtggcatactggtacattctaagcattggagcacagactgacttcctttctgtcttcttctctggatataccttcaaacacaaaatggtctatgaagacacactcaccctattcccattctcaggagaaactgtcttcatgtcgatggaaaacccaggtctatggattctggggtgccacaactcagactttcggaacagaggcatgaccgccttactgaaggtttctagttgtgacaagaacactggtgattattacgaggacagttatgaagatatttcagcatacttgctgagtaaaaacaatgccattgaaccaagaagcttctctcaaaacccaccagtcttgaaacgccatcaacgggaaataactcgtactactcttcagtcagatcaagaggaaatcgattatgatgataccatatcagttgaaatgaagaaggaagattttgacatttatgatgaggatgaaaatcagagcccccgcagctttcaaaagaaaacacgacactattttattgctgcagtggagaggctctgggattatgggatgagtagctccccacatgttctaagaaacagggctcagagtggcagtgtccctcagttcaagaaagttgttttccaggaatttactgatggctcctttactcagcccttataccgtggagaactaaatgaacatttgggactcctggggccatatataagagcagaagttgaagataatatcatggtaactttcagaaatcaggcctctcgtccctattccttctattctagccttatttcttatgaggaagatcagaggcaaggagcagaacctagaaaaaactttgtcaagcctaatgaaaccaaaacttacttttggaaagtgcaacatcatatggcacccactaaagatgagtttgactgcaaagcctgggcttatttctctgatgttgacctggaaaaagatgtgcactcaggcctgattggaccccttctggtctgccacactaacacactgaaccctgctcatgggagacaagtgacagtacaggaatttgctctgtttttcaccatctttgatgagaccaaaagctggtacttcactgaaaatatggaaagaaactgcagggctccctgcaatatccagatggaagatcccacttttaaagagaattatcgcttccatgcaatcaatggctacataatggatacactacctggcttagtaatggctcaggatcaaaggattcgatggtatctgctcagcatgggcagcaatgaaaacatccattctattcatttcagtggacatgtgttcactgtacgaaaaaaagaggagtataaaatggcactgtacaatctctatccaggtgtttttgagacagtggaaatgttaccatccaaagctggaatttggcgggtggaatgccttattggcgagcatctacatgctgggatgagcacactttttctggtgtacagcaataagtgtcagactcccctgggaatggcttctggacacattagagattttcagattacagcttcaggacaatatggacagtgggccccaaagctggccagacttcattattccggatcaatcaatgcctggagcaccaaggagcccttttcttggatcaaggtggatctgttggcaccaatgattattcacggcatcaagacccagggtgcccgtcagaagttctccagcctctacatctctcagtttatcatcatgtatagtcttgatgggaagaagtggcagacttatcgaggaaattccactggaaccttaatggtcttctttggcaatgtggattcatctgggataaaacacaatatttttaaccctccaattattgctcgatacatccgtttgcacccaactcattatagcattcgcagcactcttcgcatggagttgatgggctgtgatttaaatagttgcagcatgccattgggaatggagagtaaagcaatatcagatgcacagattactgcttcatcctactttaccaatatgtttgccacctggtctccttcaaaagctcgacttcacctccaagggaggagtaatgcctggagacctcaggtgaataatccaaaagagtggctgcaagtggacttccagaagacaatgaaagtcacaggagtaactactcagggagtaaaatctctgcttaccagcatgtatgtgaaggagttcctcatctccagcagtcaagatggccatcagtggactctcttttttcagaatggcaaagtaaaggtttttcagggaaatcaagactccttcacacctgtggtgaactctctagacccaccgttactgactcgctaccttcgaattcacccccagagttgggtgcaccagattgccctgaggatggaggttctgggctgcgaggcacaggacctctacggcgccggatcacctggggccgaaacggccgaacaaaaactcatctcagaagaggatctgtcacctgcaaccggtcatcatcaccatcaccattga

SEQ ID NO: 631 - protein, 1511 aa, synthetic construct
  REGION 1..1511: note = Description of Artificial Sequence: Synthetic polypeptide
ATRRYYLGAVELSWDYMQSDLGELPVDARFPPRVPKSFPFNTSVVYKKTLFVEFTDHLFNIAKPRPPWMGLLGPTIQAEVYDTVVITLKNMASHPVSLHAVGVSYWKASEGAEYDDQTSQREKEDDKVFPGGSHTYVWQVLKENGPMASDPLCLTYSYLSHVDLVKDLNSGLIGALLVCREGSLAKEKTQTLHKFILLFAVFDEGKSWHSETKNSLMQDRDAASARAWPKMHTVNGYVNRSLPGLIGCHRKSVYWHVIGMGTTPEVHSIFLEGHTFLVRNHRQASLEISPITFLTAQTLLMDLGQFLLFCHISSHQHDGMEAYVKVDSCPEEPQLRMKNNEEAEDYDDDLTDSEMDVVRFDDDNSPSFIQIRSVAKKHPKTWVHYIAAEEEDWDYAPLVLAPDDRSYKSQYLNNGPQRIGRKYKKVRFMAYTDETFKTREAIQHESGILGPLLYGEVGDTLLIIFKNQASRPYNIYPHGITDVRPLYSRRLPKGVKHLKDFPILPGEIFKYKWTVTVEGAPGSPAGSPTSTEEGTSESATPESGPGSEPATSGSETPASSDGPTKSDPRCLTRYYSSFVNMERDLASGLIGPLLICYKESVDQRGNQIMSDKRNVILFSVFDENRSWYLTENIQRFLPNPAGVQLEDPEFQASNIMHSINGYVFDSLQLSVCLHEVAYWYILSIGAQTDFLSVFFSGYTFKHKMVYEDTLTLFPFSGETVFMSMENPGLWILGCHNSDFRNRGMTALLKVSSCDKNTGDYYEDSYEDISAYLLSKNNAIEPRSFSQNPPVLKRHQREITRTTLQSDQEEIDYDDTISVEMKKEDFDIYDEDENQSPRSFQKKTRHYFIAAVERLWDYGMSSSPHVLRNRAQSGSVPQFKKVVFQEFTDGSFTQPLYRGELNEHLGLLGPYIRAEVEDNIMVTFRNQASRPYSFYSSLISYEEDQRQGAEPRKNFVKPNETKTYFWKVQHHMAPTKDEFDCKAWAYFSDVDLEKDVHSGLIGPLLVCHTNTLNPAHGRQVTVQEFALFFTIFDETKSWYFTENMERNCRAPCNIQMEDPTFKENYRFHAINGYIMDTLPGLVMAQDQRIRWYLLSMGSNENIHSIHFSGHVFTVRKKEEYKMALYNLYPGVFETVEMLPSKAGIWRVECLIGEHLHAGMSTLFLVYSNKCQTPLGMASGHIRDFQITASGQYGQWAPKLARLHYSGSINAWSTKEPFSWIKVDLLAPMIIHGIKTQGARQKFSSLYISQFIIMYSLDGKKWQTYRGNSTGTLMVFFGNVDSSGIKHNIFNPPIIARYIRLHPTHYSIRSTLRMELMGCDLNSCSMPLGMESKAISDAQITASSYFTNMFATWSPSKARLHLQGRSNAWRPQVNNPKEWLQVDFQKTMKVTGVTTQGVKSLLTSMYVKEFLISSSQDGHQWTLFFQNGKVKVFQGNQDSFTPVVNSLDPPLLTRYLRIHPQSWVHQIALRMEVLGCEAQDLYGAGSPGAETAEQKLISEEDLSPATGHHHHHH

SEQ ID NO: 632 - DNA, 4536 bp, synthetic construct
  misc_feature 1..4536: note = Description of Artificial Sequence: Synthetic polynucleotide
  source 1..4536: mol_type = other DNA
gccaccagaagatactacctgggtgcagtggaactgtcatgggactatatgcaaagtgatctcggtgagctgcctgtggacgcaagatttcctcctagagtgccaaaatcttttccattcaacacctcagtcgtgtacaaaaagactctgtttgtagaattcacggatcaccttttcaacatcgctaagccaaggccaccctggatgggtctgctaggtcctaccatccaggctgaggtttatgatacagtggtcattacacttaagaacatggcttcccatcctgtcagtcttcatgctgttggtgtatcctactggaaagcttctgagggagctgaatatgatgatcagaccagtcaaagggagaaagaagatgataaagtcttccctggtggaagccatacatatgtctggcaggtcctgaaagagaatggtccaatggcctctgacccactgtgccttacctactcatatctttctcatgtggacctggtaaaagacttgaattcaggcctcattggagccctactagtatgtagagaagggagtctggccaaggaaaagacacagaccttgcacaaatttatactactttttgctgtatttgatgaagggaaaagttggcactcagaaacaaagaactccttgatgcaggatagggatgctgcatctgctcgggcctggcctaaaatgcacacagtcaatggttatgtaaacaggtctctgccaggtctgattggatgccacaggaaatcagtctattggcatgtgattggaatgggcaccactcctgaagtgcactcaatattcctcgaaggtcacacatttcttgtgaggaaccatcgccaggctagcttggaaatctcgccaataactttccttactgctcaaacactcttgatggaccttggacagtttctactgttttgtcatatctcttcccaccaacatgatggcatggaagcttatgtcaaagtagacagctgtccagaggaaccccaactacgaatgaaaaataatgaagaagcggaagactatgatgatgatcttactgattctgaaatggatgtggtcaggtttgatgatgacaactctccttcctttatccaaattcgctcagttgccaagaagcatcctaaaacttgggtacattacattgctgctgaagaggaggactgggactatgctcccttagtcctcgcccccgatgacagaagttataaaagtcaatatttgaacaatggccctcagcggattggtaggaagtacaaaaaagtccgatttatggcatacacagatgaaacctttaagactcgtgaagctattcagcatgaatcaggaatcttgggacctttactttatggggaagttggagacacactgttgattatatttaagaatcaagcaagcagaccatataacatctaccctcacggaatcactgatgtccgtcctttgtattcaaggagattaccaaaaggtgtaaaacatttgaaggattttccaattctgccaggagaaatattcaaatataaatggacagtgactgtagaaggcgcgccaggttctcctgctggctcccccacctcaacagaagaggggacaagcgaaagcgctacgcctgagagtggccctggctctgagccagccacctccggctctgaaacccctgcctcgagcgatgggccaactaaatcagatcctcggtgcctgacccgctattactctagtttcgttaatatggagagagatctagcttcaggactcattggccctctcctcatctgctacaaagaatctgtagatcaaagaggaaaccagataatgtcagacaagaggaatgtcatcctgttttctgtatttgatgagaaccgaagctggtacctcacagagaatatacaacgctttctccccaatccagctggagtgcagcttgaggatccagagttccaagcctccaacatcatgcacagcatcaatggctatgtttttgatagtttgcagttgtcagtttgtttgcatgaggtggcatactggtacattctaagcattggagcacagactgacttcctttctgtcttcttctctggatataccttcaaacacaaaatggtctatgaagacacactcaccctattcccattctcaggagaaactgtcttcatgtcgatggaaaacccaggtctatggattctggggtgccacaactcagactttcggaacagaggcatgaccgccttactgaaggtttctagttgtgacaagaacactggtgattattacgaggacagttatgaagatatttcagcatacttgctgagtaaaaacaatgccattgaaccaagaagcttctctcaaaacccaccagtcttgaaacgccatcaacgggaaataactcgtactactcttcagtcagatcaagaggaaatcgattatgatgataccatatcagttgaaatgaagaaggaagattttgacatttatgatgaggatgaaaatcagagcccccgcagctttcaaaagaaaacacgacactattttattgctgcagtggagaggctctgggattatgggatgagtagctccccacatgttctaagaaacagggctcagagtggcagtgtccctcagttcaagaaagttgttttccaggaatttactgatggctcctttactcagcccttataccgtggagaactaaatgaacatttgggactcctggggccatatataagagcagaagttgaagataatatcatggtaactttcagaaatcaggcctctcgtccctattccttctattctagccttatttcttatgaggaagatcagaggcaaggagcagaacctagaaaaaactttgtcaagcctaatgaaaccaaaacttacttttggaaagtgcaacatcatatggcacccactaaagatgagtttgactgcaaagcctgggcttatttctctgatgttgacctggaaaaagatgtgcactcaggcctgattggaccccttctggtctgccacactaacacactgaaccctgctcatgggagacaagtgacagtacaggaatttgctctgtttttcaccatctttgatgagaccaaaagctggtacttcactgaaaatatggaaagaaactgcagggctccctgcaatatccagatggaagatcccacttttaaagagaattatcgcttccatgcaatcaatggctacataatggatacactacctggcttagtaatggctcaggatcaaaggattcgatggtatctgctcagcatgggcagcaatgaaaacatccattctattcatttcagtggacatgtgttcactgtacgaaaaaaagaggagtataaaatggcactgtacaatctctatccaggtgtttttgagacagtggaaatgttaccatccaaagctggaatttggcgggtggaatgccttattggcgagcatctacatgctgggatgagcacactttttctggtgtacagcaataagtgtcagactcccctgggaatggcttctggacacattagagattttcagattacagcttcaggacaatatggacagtgggccccaaagctggccagacttcattattccggatcaatcaatgcctggagcaccaaggagcccttttcttggatcaaggtggatctgttggcaccaatgattattcacggcatcaagacccagggtgcccgtcagaagttctccagcctctacatctctcagtttatcatcatgtatagtcttgatgggaagaagtggcagacttatcgaggaaattccactggaaccttaatggtcttctttggcaatgtggattcatctgggataaaacacaatatttttaaccctccaattattgctcgatacatccgtttgcacccaactcattatagcattcgcagcactcttcgcatggagttgatgggctgtgatttaaatagttgcagcatgccattgggaatggagagtaaagcaatatcagatgcacagattactgcttcatcctactttaccaatatgtttgccacctggtctccttcaaaagctcgacttcacctccaagggaggagtaatgcctggagacctcaggtgaataatccaaaagagtggctgcaagtggacttccagaagacaatgaaagtcacaggagtaactactcagggagtaaaatctctgcttaccagcatgtatgtgaaggagttcctcatctccagcagtcaagatggccatcagtggactctcttttttcagaatggcaaagtaaaggtttttcagggaaatcaagactccttcacacctgtggtgaactctctagacccaccgttactgactcgctaccttcgaattcacccccagagttgggtgcaccagattgccctgaggatggaggttctgggctgcgaggcacaggacctctacggcgccggatcacctggggccgaaacggccgaacaaaaactcatctcagaagaggatctgtcacctgcaaccggtcatcatcaccatcaccattga

SEQ ID NO: 633 - protein, 1511 aa, synthetic construct
  REGION 1..1511: note = Description of Artificial Sequence: Synthetic polypeptide
ATRRYYLGAVELSWDYMQSDLGELPVDARFPPRVPKSFPFNTSVVYKKTLFVEFTDHLFNIAKPRPPWMGLLGPTIQAEVYDTVVITLKNMASHPVSLHAVGVSYWKASEGAEYDDQTSQREKEDDKVFPGGSHTYVWQVLKENGPMASDPLCLTYSYLSHVDLVKDLNSGLIGALLVCREGSLAKEKTQTLHKFILLFAVFDEGKSWHSETKNSLMQDRDAASARAWPKMHTVNGYVNRSLPGLIGCHRKSVYWHVIGMGTTPEVHSIFLEGHTFLVRNHRQASLEISPITFLTAQTLLMDLGQFLLFCHISSHQHDGMEAYVKVDSCPEEPQLRMKNNEEAEDYDDDLTDSEMDVVRFDDDNSPSFIQIRSVAKKHPKTWVHYIAAEEEDWDYAPLVLAPDDRSYKSQYLNNGPQRIGRKYKKVRFMAYTDETFKTREAIQHESGILGPLLYGEVGDTLLIIFKNQASRPYNIYPHGITDVRPLYSRRLPKGVKHLKDFPILPGEIFKYKWTVTVEDGPTKSDPRCLTRYYSSFVNMERDLASGLIGPLLICYKESVDQRGNQIMSDKRNVILFSVFDENRSWYLTENIQRFLPNPAGAPGSPAGSPTSTEEGTSESATPESGPGSEPATSGSETPASSGVQLEDPEFQASNIMHSINGYVFDSLQLSVCLHEVAYWYILSIGAQTDFLSVFFSGYTFKHKMVYEDTLTLFPFSGETVFMSMENPGLWILGCHNSDFRNRGMTALLKVSSCDKNTGDYYEDSYEDISAYLLSKNNAIEPRSFSQNPPVLKRHQREITRTTLQSDQEEIDYDDTISVEMKKEDFDIYDEDENQSPRSFQKKTRHYFIAAVERLWDYGMSSSPHVLRNRAQSGSVPQFKKVVFQEFTDGSFTQPLYRGELNEHLGLLGPYIRAEVEDNIMVTFRNQASRPYSFYSSLISYEEDQRQGAEPRKNFVKPNETKTYFWKVQHHMAPTKDEFDCKAWAYFSDVDLEKDVHSGLIGPLLVCHTNTLNPAHGRQVTVQEFALFFTIFDETKSWYFTENMERNCRAPCNIQMEDPTFKENYRFHAINGYIMDTLPGLVMAQDQRIRWYLLSMGSNENIHSIHFSGHVFTVRKKEEYKMALYNLYPGVFETVEMLPSKAGIWRVECLIGEHLHAGMSTLFLVYSNKCQTPLGMASGHIRDFQITASGQYGQWAPKLARLHYSGSINAWSTKEPFSWIKVDLLAPMIIHGIKTQGARQKFSSLYISQFIIMYSLDGKKWQTYRGNSTGTLMVFFGNVDSSGIKHNIFNPPIIARYIRLHPTHYSIRSTLRMELMGCDLNSCSMPLGMESKAISDAQITASSYFTNMFATWSPSKARLHLQGRSNAWRPQVNNPKEWLQVDFQKTMKVTGVTTQGVKSLLTSMYVKEFLISSSQDGHQWTLFFQNGKVKVFQGNQDSFTPVVNSLDPPLLTRYLRIHPQSWVHQIALRMEVLGCEAQDLYGAGSPGAETAEQKLISEEDLSPATGHHHHHH

SEQ ID NO: 634 - DNA, 4536 bp, synthetic construct
  misc_feature 1..4536: note = Description of Artificial Sequence: Synthetic polynucleotide
  source 1..4536: mol_type = other DNA
gccaccagaagatactacctgggtgcagtggaactgtcatgggactatatgcaaagtgatctcggtgagctgcctgtggacgcaagatttcctcctagagtgccaaaatcttttccattcaacacctcagtcgtgtacaaaaagactctgtttgtagaattcacggatcaccttttcaacatcgctaagccaaggccaccctggatgggtctgctaggtcctaccatccaggctgaggtttatgatacagtggtcattacacttaagaacatggcttcccatcctgtcagtcttcatgctgttggtgtatcctactggaaagcttctgagggagctgaatatgatgatcagaccagtcaaagggagaaagaagatgataaagtcttccctggtggaagccatacatatgtctggcaggtcctgaaagagaatggtccaatggcctctgacccactgtgccttacctactcatatctttctcatgtggacctggtaaaagacttgaattcaggcctcattggagccctactagtatgtagagaagggagtctggccaaggaaaagacacagaccttgcacaaatttatactactttttgctgtatttgatgaagggaaaagttggcactcagaaacaaagaactccttgatgcaggatagggatgctgcatctgctcgggcctggcctaaaatgcacacagtcaatggttatgtaaacaggtctctgccaggtctgattggatgccacaggaaatcagtctattggcatgtgattggaatgggcaccactcctgaagtgcactcaatattcctcgaaggtcacacatttcttgtgaggaaccatcgccaggctagcttggaaatctcgccaataactttccttactgctcaaacactcttgatggaccttggacagtttctactgttttgtcatatctcttcccaccaacatgatggcatggaagcttatgtcaaagtagacagctgtccagaggaaccccaactacgaatgaaaaataatgaagaagcggaagactatgatgatgatcttactgattctgaaatggatgtggtcaggtttgatgatgacaactctccttcctttatccaaattcgctcagttgccaagaagcatcctaaaacttgggtacattacattgctgctgaagaggaggactgggactatgctcccttagtcctcgcccccgatgacagaagttataaaagtcaatatttgaacaatggccctcagcggattggtaggaagtacaaaaaagtccgatttatggcatacacagatgaaacctttaagactcgtgaagctattcagcatgaatcaggaatcttgggacctttactttatggggaagttggagacacactgttgattatatttaagaatcaagcaagcagaccatataacatctaccctcacggaatcactgatgtccgtcctttgtattcaaggagattaccaaaaggtgtaaaacatttgaaggattttccaattctgccaggagaaatattcaaatataaatggacagtgactgtagaagatgggccaactaaatcagatcctcggtgcctgacccgctattactctagtttcgttaatatggagagagatctagcttcaggactcattggccctctcctcatctgctacaaagaatctgtagatcaaagaggaaaccagataatgtcagacaagaggaatgtcatcctgttttctgtatttgatgagaaccgaagctggtacctcacagagaatatacaacgctttctccccaatccagctggcgcgccaggttctcctgctggctcccccacctcaacagaagaggggacaagcgaaagcgctacgcctgagagtggccctggctctgagccagccacctccggctctgaaacccctgcctcgagcggagtgcagcttgaggatccagagttccaagcctccaacatcatgcacagcatcaatggctatgtttttgatagtttgcagttgtcagtttgtttgcatgaggtggcatactggtacattctaagcattggagcacagactgacttcctttctgtcttcttctctggatataccttcaaacacaaaatggtctatgaagacacactcaccctattcccattctcaggagaaactgtcttcatgtcgatggaaaacccaggtctatggattctggggtgccacaactcagactttcggaacagaggcatgaccgccttactgaaggtttctagttgtgacaagaacactggtgattattacgaggacagttatgaagatatttcagcatacttgctgagtaaaaacaatgccattgaaccaagaagcttctctcaaaacccaccagtcttgaaacgccatcaacgggaaataactcgtactactcttcagtcagatcaagaggaaatcgattatgatgataccatatcagttgaaatgaagaaggaagattttgacatttatgatgaggatgaaaatcagagcccccgcagctttcaaaagaaaacacgacactattttattgctgcagtggagaggctctgggattatgggatgagtagctccccacatgttctaagaaacagggctcagagtggcagtgtccctcagttcaagaaagttgttttccaggaatttactgatggctcctttactcagcccttataccgtggagaactaaatgaacatttgggactcctggggccatatataagagcagaagttgaagataatatcatggtaactttcagaaatcaggcctctcgtccctattccttctattctagccttatttcttatgaggaagatcagaggcaaggagcagaacctagaaaaaactttgtcaagcctaatgaaaccaaaacttacttttggaaagtgcaacatcatatggcacccactaaagatgagtttgactgcaaagcctgggcttatttctctgatgttgacctggaaaaagatgtgcactcaggcctgattggaccccttctggtctgccacactaacacactgaaccctgctcatgggagacaagtgacagtacaggaatttgctctgtttttcaccatctttgatgagaccaaaagctggtacttcactgaaaatatggaaagaaactgcagggctccctgcaatatccagatggaagatcccacttttaaagagaattatcgcttccatgcaatcaatggctacataatggatacactacctggcttagtaatggctcaggatcaaaggattcgatggtatctgctcagcatgggcagcaatgaaaacatccattctattcatttcagtggacatgtgttcactgtacgaaaaaaagaggagtataaaatggcactgtacaatctctatccaggtgtttttgagacagtggaaatgttaccatccaaagctggaatttggcgggtggaatgccttattggcgagcatctacatgctgggatgagcacactttttctggtgtacagcaataagtgtcagactcccctgggaatggcttctggacacattagagattttcagattacagcttcaggacaatatggacagtgggccccaaagctggccagacttcattattccggatcaatcaatgcctggagcaccaaggagcccttttcttggatcaaggtggatctgttggcaccaatgattattcacggcatcaagacccagggtgcccgtcagaagttctccagcctctacatctctcagtttatcatcatgtatagtcttgatgggaagaagtggcagacttatcgaggaaattccactggaaccttaatggtcttctttggcaatgtggattcatctgggataaaacacaatatttttaaccctccaattattgctcgatacatccgtttgcacccaactcattatagcattcgcagcactcttcgcatggagttgatgggctgtgatttaaatagttgcagcatgccattgggaatggagagtaaagcaatatcagatgcacagattactgcttcatcctactttaccaatatgtttgccacctggtctccttcaaaagctcgacttcacctccaagggaggagtaatgcctggagacctcaggtgaataatccaaaagagtggctgcaagtggacttccagaagacaatgaaagtcacaggagtaactactcagggagtaaaatctctgcttaccagcatgtatgtgaaggagttcctcatctccagcagtcaagatggccatcagtggactctcttttttcagaatggcaaagtaaaggtttttcagggaaatcaagactccttcacacctgtggtgaactctctagacccaccgttactgactcgctaccttcgaattcacccccagagttgggtgcaccagattgccctgaggatggaggttctgggctgcgaggcacaggacctctacggcgccggatcacctggggccgaaacggccgaacaaaaactcatctcagaagaggatctgtcacctgcaaccggtcatcatcaccatcaccattga

SEQ ID NO: 635 - protein, 1511 aa, synthetic construct
  REGION 1..1511: note = Description of Artificial Sequence: Synthetic polypeptide
ATRRYYLGAVELSWDYMQSDLGELPVDARFPPRVPKSFPFNTSVVYKKTLFVEFTDHLFNIAKPRPPWMGLLGPTIQAEVYDTVVITLKNMASHPVSLHAVGVSYWKASEGAEYDDQTSQREKEDDKVFPGGSHTYVWQVLKENGPMASDPLCLTYSYLSHVDLVKDLNSGLIGALLVCREGSLAKEKTQTLHKFILLFAVFDEGKSWHSETKNSLMQDRDAASARAWPKMHTVNGYVNRSLPGLIGCHRKSVYWHVIGMGTTPEVHSIFLEGHTFLVRNHRQASLEISPITFLTAQTLLMDLGQFLLFCHISSHQHDGMEAYVKVDSCPEEPQLRMKNNEEAEDYDDDLTDSEMDVVRFDDDNSPSFIQIRSVAKKHPKTWVHYIAAEEEDWDYAPLVLAPDDRSYKSQYLNNGPQRIGRKYKKVRFMAYTDETFKTREAIQHESGILGPLLYGEVGDTLLIIFKNQASRPYNIYPHGITDVRPLYSRRLPKGVKHLKDFPILPGEIFKYKWTVTVEDGPTKSDPRCLTRYYSSFVNMERDLASGLIGPLLICYKESVDQRGNQIMSDKRNVILFSVFDENRSWYLTENIQRFLPNPAGVQLEDPEFQASNIMHSINGYVFDSLQLSVCLHEVAYWYILSIGAQTDFLSVFFSGYTFKHKMVYEDTLTLFPFSGETVFMSMENPGLWILGCHNSDFRNRGMTALLKVSSCDKGAPGSPAGSPTSTEEGTSESATPESGPGSEPATSGSETPASSNTGDYYEDSYEDISAYLLSKNNAIEPRSFSQNPPVLKRHQREITRTTLQSDQEEIDYDDTISVEMKKEDFDIYDEDENQSPRSFQKKTRHYFIAAVERLWDYGMSSSPHVLRNRAQSGSVPQFKKVVFQEFTDGSFTQPLYRGELNEHLGLLGPYIRAEVEDNIMVTFRNQASRPYSFYSSLISYEEDQRQGAEPRKNFVKPNETKTYFWKVQHHMAPTKDEFDCKAWAYFSDVDLEKDVHSGLIGPLLVCHTNTLNPAHGRQVTVQEFALFFTIFDETKSWYFTENMERNCRAPCNIQMEDPTFKENYRFHAINGYIMDTLPGLVMAQDQRIRWYLLSMGSNENIHSIHFSGHVFTVRKKEEYKMALYNLYPGVFETVEMLPSKAGIWRVECLIGEHLHAGMSTLFLVYSNKCQTPLGMASGHIRDFQITASGQYGQWAPKLARLHYSGSINAWSTKEPFSWIKVDLLAPMIIHGIKTQGARQKFSSLYISQFIIMYSLDGKKWQTYRGNSTGTLMVFFGNVDSSGIKHNIFNPPIIARYIRLHPTHYSIRSTLRMELMGCDLNSCSMPLGMESKAISDAQITASSYFTNMFATWSPSKARLHLQGRSNAWRPQVNNPKEWLQVDFQKTMKVTGVTTQGVKSLLTSMYVKEFLISSSQDGHQWTLFFQNGKVKVFQGNQDSFTPVVNSLDPPLLTRYLRIHPQSWVHQIALRMEVLGCEAQDLYGAGSPGAETAEQKLISEEDLSPATGHHHHHH

SEQ ID NO: 636 - DNA, 4536 bp, synthetic construct
  misc_feature 1..4536: note = Description of Artificial Sequence: Synthetic polynucleotide
  source 1..4536: mol_type = other DNA
gccaccagaagatactacctgggtgcagtggaactgtcatgggactatatgcaaagtgatctcggtgagctgcctgtggacgcaagatttcctcctagagtgccaaaatcttttccattcaacacctcagtcgtgtacaaaaagactctgtttgtagaattcacggatcaccttttcaacatcgctaagccaaggccaccctggatgggtctgctaggtcctaccatccaggctgaggtttatgatacagtggtcattacacttaagaacatggcttcccatcctgtcagtcttcatgctgttggtgtatcctactggaaagcttctgagggagctgaatatgatgatcagaccagtcaaagggagaaagaagatgataaagtcttccctggtggaagccatacatatgtctggcaggtcctgaaagagaatggtccaatggcctctgacccactgtgccttacctactcatatctttctcatgtggacctggtaaaagacttgaattcaggcctcattggagccctactagtatgtagagaagggagtctggccaaggaaaagacacagaccttgcacaaatttatactactttttgctgtatttgatgaagggaaaagttggcactcagaaacaaagaactccttgatgcaggatagggatgctgcatctgctcgggcctggcctaaaatgcacacagtcaatggttatgtaaacaggtctctgccaggtctgattggatgccacaggaaatcagtctattggcatgtgattggaatgggcaccactcctgaagtgcactcaatattcctcgaaggtcacacatttcttgtgaggaaccatcgccaggctagcttggaaatctcgccaataactttccttactgctcaaacactcttgatggaccttggacagtttctactgttttgtcatatctcttcccaccaacatgatggcatggaagcttatgtcaaagtagacagctgtccagaggaaccccaactacgaatgaaaaataatgaagaagcggaagactatgatgatgatcttactgattctgaaatggatgtggtcaggtttgatgatgacaactctccttcctttatccaaattcgctcagttgccaagaagcatcctaaaacttgggtacattacattgctgctgaagaggaggactgggactatgctcccttagtcctcgcccccgatgacagaagttataaaagtcaatatttgaacaatggccctcagcggattggtaggaagtacaaaaaagtccgatttatggcatacacagatgaaacctttaagactcgtgaagctattcagcatgaatcaggaatcttgggacctttactttatggggaagttggagacacactgttgattatatttaagaatcaagcaagcagaccatataacatctaccctcacggaatcactgatgtccgtcctttgtattcaaggagattaccaaaaggtgtaaaacatttgaaggattttccaattctgccaggagaaatattcaaatataaatggacagtgactgtagaagatgggccaactaaatcagatcctcggtgcctgacccgctattactctagtttcgttaatatggagagagatctagcttcaggactcattggccctctcctcatctgctacaaagaatctgtagatcaaagaggaaaccagataatgtcagacaagaggaatgtcatcctgttttctgtatttgatgagaaccgaagctggtacctcacagagaatatacaacgctttctccccaatccagctggagtgcagcttgaggatccagagttccaagcctccaacatcatgcacagcatcaatggctatgtttttgatagtttgcagttgtcagtttgtttgcatgaggtggcatactggtacattctaagcattggagcacagactgacttcctttctgtcttcttctctggatataccttcaaacacaaaatggtctatgaagacacactcaccctattcccattctcaggagaaactgtcttcatgtcgatggaaaacccaggtctatggattctggggtgccacaactcagactttcggaacagaggcatgaccgccttactgaaggtttctagttgtgacaagggcgcgccaggttctcctgctggctcccccacctcaacagaagaggggacaagcgaaagcgctacgcctgagagtggccctggctctgagccagccacctccggctctgaaacccctgcctcgagcaacactggtgattattacgaggacagttatgaagatatttcagcatacttgctgagtaaaaacaatgccattgaaccaagaagcttctctcaaaacccaccagtcttgaaacgccatcaacgggaaataactcgtactactcttcagtcagatcaagaggaaatcgattatgatgataccatatcagttgaaatgaagaaggaagattttgacatttatgatgaggatgaaaatcagagcccccgcagctttcaaaagaaaacacgacactattttattgctgcagtggagaggctctgggattatgggatgagtagctccccacatgttctaagaaacagggctcagagtggcagtgtccctcagttcaagaaagttgttttccaggaatttactgatggctcctttactcagcccttataccgtggagaactaaatgaacatttgggactcctggggccatatataagagcagaagttgaagataatatcatggtaactttcagaaatcaggcctctcgtccctattccttctattctagccttatttcttatgaggaagatcagaggcaaggagcagaacctagaaaaaactttgtcaagcctaatgaaaccaaaacttacttttggaaagtgcaacatcatatggcacccactaaagatgagtttgactgcaaagcctgggcttatttctctgatgttgacctggaaaaagatgtgcactcaggcctgattggaccccttctggtctgccacactaacacactgaaccctgctcatgggagacaagtgacagtacaggaatttgctctgtttttcaccatctttgatgagaccaaaagctggtacttcactgaaaatatggaaagaaactgcagggctccctgcaatatccagatggaagatcccacttttaaagagaattatcgcttccatgcaatcaatggctacataatggatacactacctggcttagtaatggctcaggatcaaaggattcgatggtatctgctcagcatgggcagcaatgaaaacatccattctattcatttcagtggacatgtgttcactgtacgaaaaaaagaggagtataaaatggcactgtacaatctctatccaggtgtttttgagacagtggaaatgttaccatccaaagctggaatttggcgggtggaatgccttattggcgagcatctacatgctgggatgagcacactttttctggtgtacagcaataagtgtcagactcccctgggaatggcttctggacacattagagattttcagattacagcttcaggacaatatggacagtgggccccaaagctggccagacttcattattccggatcaatcaatgcctggagcaccaaggagcccttttcttggatcaaggtggatctgttggcaccaatgattattcacggcatcaagacccagggtgcccgtcagaagttctccagcctctacatctctcagtttatcatcatgtatagtcttgatgggaagaagtggcagacttatcgaggaaattccactggaaccttaatggtcttctttggcaatgtggattcatctgggataaaacacaatatttttaaccctccaattattgctcgatacatccgtttgcacccaactcattatagcattcgcagcactcttcgcatggagttgatgggctgtgatttaaatagttgcagcatgccattgggaatggagagtaaagcaatatcagatgcacagattactgcttcatcctactttaccaatatgtttgccacctggtctccttcaaaagctcgacttcacctccaagggaggagtaatgcctggagacctcaggtgaataatccaaaagagtggctgcaagtggacttccagaagacaatgaaagtcacaggagtaactactcagggagtaaaatctctgcttaccagcatgtatgtgaaggagttcctcatctccagcagtcaagatggccatcagtggactctcttttttcagaatggcaaagtaaaggtttttcagggaaatcaagactccttcacacctgtggtgaactctctagacccaccgttactgactcgctaccttcgaattcacccccagagttgggtgcaccagattgccctgaggatggaggttctgggctgcgaggcacaggacctctacggcgccggatcacctggggccgaaacggccgaacaaaaactcatctcagaagaggatctgtcacctgcaaccggtcatcatcaccatcaccattga

SEQ ID NO: 637 - protein, 1511 aa, synthetic construct
  REGION 1..1511: note = Description of Artificial Sequence: Synthetic polypeptide
ATRRYYLGAVELSWDYMQSDLGELPVDARFPPRVPKSFPFNTSVVYKKTLFVEFTDHLFNIAKPRPPWMGLLGPTIQAEVYDTVVITLKNMASHPVSLHAVGVSYWKASEGAEYDDQTSQREKEDDKVFPGGSHTYVWQVLKENGPMASDPLCLTYSYLSHVDLVKDLNSGLIGALLVCREGSLAKEKTQTLHKFILLFAVFDEGKSWHSETKNSLMQDRDAASARAWPKMHTVNGYVNRSLPGLIGCHRKSVYWHVIGMGTTPEVHSIFLEGHTFLVRNHRQASLEISPITFLTAQTLLMDLGQFLLFCHISSHQHDGMEAYVKVDSCPEEPQLRMKNNEEAEDYDDDLTDSEMDVVRFDDDNSPSFIQIRSVAKKHPKTWVHYIAAEEEDWDYAPLVLAPDDRSYKSQYLNNGPQRIGRKYKKVRFMAYTDETFKTREAIQHESGILGPLLYGEVGDTLLIIFKNQASRPYNIYPHGITDVRPLYSRRLPKGVKHLKDFPILPGEIFKYKWTVTVEDGPTKSDPRCLTRYYSSFVNMERDLASGLIGPLLICYKESVDQRGNQIMSDKRNVILFSVFDENRSWYLTENIQRFLPNPAGVQLEDPEFQASNIMHSINGYVFDSLQLSVCLHEVAYWYILSIGAQTDFLSVFFSGYTFKHKMVYEDTLTLFPFSGETVFMSMENPGLWILGCHNSDFRNRGMTALLKVSSCDKNTGDYYEDSYEDISAYLLSKNNAIEPRSFSQNGAPGSPAGSPTSTEEGTSESATPESGPGSEPATSGSETPASSPPVLKRHQREITRTTLQSDQEEIDYDDTISVEMKKEDFDIYDEDENQSPRSFQKKTRHYFIAAVERLWDYGMSSSPHVLRNRAQSGSVPQFKKVVFQEFTDGSFTQPLYRGELNEHLGLLGPYIRAEVEDNIMVTFRNQASRPYSFYSSLISYEEDQRQGAEPRKNFVKPNETKTYFWKVQHHMAPTKDEFDCKAWAYFSDVDLEKDVHSGLIGPLLVCHTNTLNPAHGRQVTVQEFALFFTIFDETKSWYFTENMERNCRAPCNIQMEDPTFKENYRFHAINGYIMDTLPGLVMAQDQRIRWYLLSMGSNENIHSIHFSGHVFTVRKKEEYKMALYNLYPGVFETVEMLPSKAGIWRVECLIGEHLHAGMSTLFLVYSNKCQTPLGMASGHIRDFQITASGQYGQWAPKLARLHYSGSINAWSTKEPFSWIKVDLLAPMIIHGIKTQGARQKFSSLYISQFIIMYSLDGKKWQTYRGNSTGTLMVFFGNVDSSGIKHNIFNPPIIARYIRLHPTHYSIRSTLRMELMGCDLNSCSMPLGMESKAISDAQITASSYFTNMFATWSPSKARLHLQGRSNAWRPQVNNPKEWLQVDFQKTMKVTGVTTQGVKSLLTSMYVKEFLISSSQDGHQWTLFFQNGKVKVFQGNQDSFTPVVNSLDPPLLTRYLRIHPQSWVHQIALRMEVLGCEAQDLYGAGSPGAETAEQKLISEEDLSPATGHHHHHH

SEQ ID NO: 638 - DNA, 4536 bp, synthetic construct
  misc_feature 1..4536: note = Description of Artificial Sequence: Synthetic polynucleotide
  source 1..4536: mol_type = other DNA
gccaccagaagatactacctgggtgcagtggaactgtcatgggactatatgcaaagtgatctcggtgagctgcctgtggacgcaagatttcctcctagagtgccaaaatcttttccattcaacacctcagtcgtgtacaaaaagactctgtttgtagaattcacggatcaccttttcaacatcgctaagccaaggccaccctggatgggtctgctaggtcctaccatccaggctgaggtttatgatacagtggtcattacacttaagaacatggcttcccatcctgtcagtcttcatgctgttggtgtatcctactggaaagcttctgagggagctgaatatgatgatcagaccagtcaaagggagaaagaagatgataaagtcttccctggtggaagccatacatatgtctggcaggtcctgaaagagaatggtccaatggcctctgacccactgtgccttacctactcatatctttctcatgtggacctggtaaaagacttgaattcaggcctcattggagccctactagtatgtagagaagggagtctggccaaggaaaagacacagaccttgcacaaatttatactactttttgctgtatttgatgaagggaaaagttggcactcagaaacaaagaactccttgatgcaggatagggatgctgcatctgctcgggcctggcctaaaatgcacacagtcaatggttatgtaaacaggtctctgccaggtctgattggatgccacaggaaatcagtctattggcatgtgattggaatgggcaccactcctgaagtgcactcaatattcctcgaaggtcacacatttcttgtgaggaaccatcgccaggctagcttggaaatctcgccaataactttccttactgctcaaacactcttgatggaccttggacagtttctactgttttgtcatatctcttcccaccaacatgatggcatggaagcttatgtcaaagtagacagctgtccagaggaaccccaactacgaatgaaaaataatgaagaagcggaagactatgatgatgatcttactgattctgaaatggatgtggtcaggtttgatgatgacaactctccttcctttatccaaattcgctcagttgccaagaagcatcctaaaacttgggtacattacattgctgctgaagaggaggactgggactatgctcccttagtcctcgcccccgatgacagaagttataaaagtcaatatttgaacaatggccctcagcggattggtaggaagtacaaaaaagtccgatttatggcatacacagatgaaacctttaagactcgtgaagctattcagcatgaatcaggaatcttgggacctttactttatggggaagttggagacacactgttgattatatttaagaatcaagcaagcagaccatataacatctaccctcacggaatcactgatgtccgtcctttgtattcaaggagattaccaaaaggtgtaaaacatttgaaggattttccaattctgccaggagaaatattcaaatataaatggacagtgactgtagaagatgggccaactaaatcagatcctcggtgcctgacccgctattactctagtttcgttaatatggagagagatctagcttcaggactcattggccctctcctcatctgctacaaagaatctgtagatcaaagaggaaaccagataatgtcagacaagaggaatgtcatcctgttttctgtatttgatgagaaccgaagctggtacctcacagagaatatacaacgctttctccccaatccagctggagtgcagcttgaggatccagagttccaagcctccaacatcatgcacagcatcaatggctatgtttttgatagtttgcagttgtcagtttgtttgcatgaggtggcatactggtacattctaagcattggagcacagactgacttcctttctgtcttcttctctggatataccttcaaacacaaaatggtctatgaagacacactcaccctattcccattctcaggagaaactgtcttcatgtcgatggaaaacccaggtctatggattctggggtgccacaactcagactttcggaacagaggcatgaccgccttactgaaggtttctagttgtgacaagaacactggtgattattacgaggacagttatgaagatatttcagcatacttgctgagtaaaaacaatgccattgaaccaagaagcttctctcaaaacggcgcgccaggttctcctgctggctcccccacctcaacagaagaggggacaagcgaaagcgctacgcctgagagtggccctggctctgagccagccacctccggctctgaaacccctgcctcgagcccaccagtcttgaaacgccatcaacgggaaataactcgtactactcttcagtcagatcaagaggaaatcgattatgatgataccatatcagttgaaatgaagaaggaagattttgacatttatgatgaggatgaaaatcagagcccccgcagctttcaaaagaaaacacgacactattttattgctgcagtggagaggctctgggattatgggatgagtagctccccacatgttctaagaaacagggctcagagtggcagtgtccctcagttcaagaaagttgttttccaggaatttactgatggctcctttactcagcccttataccgtggagaactaaatgaacatttgggactcctggggccatatataagagcagaagttgaagataatatcatggtaactttcagaaatcaggcctctcgtccctattccttctattctagccttatttcttatgaggaagatcagaggcaaggagcagaacctagaaaaaactttgtcaagcctaatgaaaccaaaacttacttttggaaagtgcaacatcatatggcacccactaaagatgagtttgactgcaaagcctgggcttatttctctgatgttgacctggaaaaagatgtgcactcaggcctgattggaccccttctggtctgccacactaacacactgaaccctgctcatgggagacaagtgacagtacaggaatttgctctgtttttcaccatctttgatgagaccaaaagctggtacttcactgaaaatatggaaagaaactgcagggctccctgcaatatccagatggaagatcccacttttaaagagaattatcgcttccatgcaatcaatggctacataatggatacactacctggcttagtaatggctcaggatcaaaggattcgatggtatctgctcagcatgggcagcaatgaaaacatccattctattcatttcagtggacatgtgttcactgtacgaaaaaaagaggagtataaaatggcactgtacaatctctatccaggtgtttttgagacagtggaaatgttaccatccaaagctggaatttggcgggtggaatgccttattggcgagcatctacatgctgggatgagcacactttttctggtgtacagcaataagtgtcagactcccctgggaatggcttctggacacattagagattttcagattacagcttcaggacaatatggacagtgggccccaaagctggccagacttcattattccggatcaatcaatgcctggagcaccaaggagcccttttcttggatcaaggtggatctgttggcaccaatgattattcacggcatcaagacccagggtgcccgtcagaagttctccagcctctacatctctcagtttatcatcatgtatagtcttgatgggaagaagtggcagacttatcgaggaaattccactggaaccttaatggtcttctttggcaatgtggattcatctgggataaaacacaatatttttaaccctccaattattgctcgatacatccgtttgcacccaactcattatagcattcgcagcactcttcgcatggagttgatgggctgtgatttaaatagttgcagcatgccattgggaatggagagtaaagcaatatcagatgcacagattactgcttcatcctactttaccaatatgtttgccacctggtctccttcaaaagctcgacttcacctccaagggaggagtaatgcctggagacctcaggtgaataatccaaaagagtggctgcaagtggacttccagaagacaatgaaagtcacaggagtaactactcagggagtaaaatctctgcttaccagcatgtatgtgaaggagttcctcatctccagcagtcaagatggccatcagtggactctcttttttcagaatggcaaagtaaaggtttttcagggaaatcaagactccttcacacctgtggtgaactctctagacccaccgttactgactcgctaccttcgaattcacccccagagttgggtgcaccagattgccctgaggatggaggttctgggctgcgaggcacaggacctctacggcgccggatcacctggggccgaaacggccgaacaaaaactcatctcagaagaggatctgtcacctgcaaccggtcatcatcaccatcaccattga

SEQ ID NO: 639 - protein, 1511 aa, synthetic construct
  REGION 1..1511: note = Description of Artificial Sequence: Synthetic polypeptide
ATRRYYLGAVELSWDYMQSDLGELPVDARFPPRVPKSFPFNTSVVYKKTLFVEFTDHLFNIAKPRPPWMGLLGPTIQAEVYDTVVITLKNMASHPVSLHAVGVSYWKASEGAEYDDQTSQREKEDDKVFPGGSHTYVWQVLKENGPMASDPLCLTYSYLSHVDLVKDLNSGLIGALLVCREGSLAKEKTQTLHKFILLFAVFDEGKSWHSETKNSLMQDRDAASARAWPKMHTVNGYVNRSLPGLIGCHRKSVYWHVIGMGTTPEVHSIFLEGHTFLVRNHRQASLEISPITFLTAQTLLMDLGQFLLFCHISSHQHDGMEAYVKVDSCPEEPQLRMKNNEEAEDYDDDLTDSEMDVVRFDDDNSPSFIQIRSVAKKHPKTWVHYIAAEEEDWDYAPLVLAPDDRSYKSQYLNNGPQRIGRKYKKVRFMAYTDETFKTREAIQHESGILGPLLYGEVGDTLLIIFKNQASRPYNIYPHGITDVRPLYSRRLPKGVKHLKDFPILPGEIFKYKWTVTVEDGPTKSDPRCLTRYYSSFVNMERDLASGLIGPLLICYKESVDQRGNQIMSDKRNVILFSVFDENRSWYLTENIQRFLPNPAGVQLEDPEFQASNIMHSINGYVFDSLQLSVCLHEVAYWYILSIGAQTDFLSVFFSGYTFKHKMVYEDTLTLFPFSGETVFMSMENPGLWILGCHNSDFRNRGMTALLKVSSCDKNTGDYYEDSYEDISAYLLSKNNAIEPRSFSQNGAPGSPAGSPTSTEEGTSESATPESGPGSEPATSGSETPASSPPVLKRHQAEITRTTLQSDQEEIDYDDTISVEMKKEDFDIYDEDENQSPRSFQKKTRHYFIAAVERLWDYGMSSSPHVLRNRAQSGSVPQFKKVVFQEFTDGSFTQPLYRGELNEHLGLLGPYIRAEVEDNIMVTFRNQASRPYSFYSSLISYEEDQRQGAEPRKNFVKPNETKTYFWKVQHHMAPTKDEFDCKAWAYFSDVDLEKDVHSGLIGPLLVCHTNTLNPAHGRQVTVQEFALFFTIFDETKSWYFTENMERNCRAPCNIQMEDPTFKENYRFHAINGYIMDTLPGLVMAQDQRIRWYLLSMGSNENIHSIHFSGHVFTVRKKEEYKMALYNLYPGVFETVEMLPSKAGIWRVECLIGEHLHAGMSTLFLVYSNKCQTPLGMASGHIRDFQITASGQYGQWAPKLARLHYSGSINAWSTKEPFSWIKVDLLAPMIIHGIKTQGARQKFSSLYISQFIIMYSLDGKKWQTYRGNSTGTLMVFFGNVDSSGIKHNIFNPPIIARYIRLHPTHYSIRSTLRMELMGCDLNSCSMPLGMESKAISDAQITASSYFTNMFATWSPSKARLHLQGRSNAWRPQVNNPKEWLQVDFQKTMKVTGVTTQGVKSLLTSMYVKEFLISSSQDGHQWTLFFQNGKVKVFQGNQDSFTPVVNSLDPPLLTRYLRIHPQSWVHQIALRMEVLGCEAQDLYGAGSPGAETAEQKLISEEDLSPATGHHHHHH

SEQ ID NO: 640 - DNA, 4536 bp, synthetic construct
  misc_feature 1..4536: note = Description of Artificial Sequence: Synthetic polynucleotide
  source 1..4536: mol_type = other DNA
gccaccagaagatactacctgggtgcagtggaactgtcatgggactatatgcaaagtgatctcggtgagctgcctgtggacgcaagatttcctcctagagtgccaaaatcttttccattcaacacctcagtcgtgtacaaaaagactctgtttgtagaattcacggatcaccttttcaacatcgctaagccaaggccaccctggatgggtctgctaggtcctaccatccaggctgaggtttatgatacagtggtcattacacttaagaacatggcttcccatcctgtcagtcttcatgctgttggtgtatcctactggaaagcttctgagggagctgaatatgatgatcagaccagtcaaagggagaaagaagatgataaagtcttccctggtggaagccatacatatgtctggcaggtcctgaaagagaatggtccaatggcctctgacccactgtgccttacctactcatatctttctcatgtggacctggtaaaagacttgaattcaggcctcattggagccctactagtatgtagagaagggagtctggccaaggaaaagacacagaccttgcacaaatttatactactttttgctgtatttgatgaagggaaaagttggcactcagaaacaaagaactccttgatgcaggatagggatgctgcatctgctcgggcctggcctaaaatgcacacagtcaatggttatgtaaacaggtctctgccaggtctgattggatgccacaggaaatcagtctattggcatgtgattggaatgggcaccactcctgaagtgcactcaatattcctcgaaggtcacacatttcttgtgaggaaccatcgccaggctagcttggaaatctcgccaataactttccttactgctcaaacactcttgatggaccttggacagtttctactgttttgtcatatctcttcccaccaacatgatggcatggaagcttatgtcaaagtagacagctgtccagaggaaccccaactacgaatgaaaaataatgaagaagcggaagactatgatgatgatcttactgattctgaaatggatgtggtcaggtttgatgatgacaactctccttcctttatccaaattcgctcagttgccaagaagcatcctaaaacttgggtacattacattgctgctgaagaggaggactgggactatgctcccttagtcctcgcccccgatgacagaagttataaaagtcaatatttgaacaatggccctcagcggattggtaggaagtacaaaaaagtccgatttatggcatacacagatgaaacctttaagactcgtgaagctattcagcatgaatcaggaatcttgggacctttactttatggggaagttggagacacactgttgattatatttaagaatcaagcaagcagaccatataacatctaccctcacggaatcactgatgtccgtcctttgtattcaaggagattaccaaaaggtgtaaaacatttgaaggattttccaattctgccaggagaaatattcaaatataaatggacagtgactgtagaagatgggccaactaaatcagatcctcggtgcctgacccgctattactctagtttcgttaatatggagagagatctagcttcaggactcattggccctctcctcatctgctacaaagaatctgtagatcaaagaggaaaccagataatgtcagacaagaggaatgtcatcctgttttctgtatttgatgagaaccgaagctggtacctcacagagaatatacaacgctttctccccaatccagctggagtgcagcttgaggatccagagttccaagcctccaacatcatgcacagcatcaatggctatgtttttgatagtttgcagttgtcagtttgtttgcatgaggtggcatactggtacattctaagcattggagcacagactgacttcctttctgtcttcttctctggatataccttcaaacacaaaatggtctatgaagacacactcaccctattcccattctcaggagaaactgtcttcatgtcgatggaaaacccaggtctatggattctggggtgccacaactcagactttcggaacagaggcatgaccgccttactgaaggtttctagttgtgacaagaacactggtgattattacgaggacagttatgaagatatttcagcatacttgctgagtaaaaacaatgccattgaaccaagaagcttctctcaaaacggcgcgccaggttctcctgctggctcccccacctcaacagaagaggggacaagcgaaagcgctacgcctgagagtggccctggctctgagccagccacctccggctctgaaacccctgcctcgagcccaccagtcttgaaacgccatcaagctgaaataactcgtactactcttcagtcagatcaagaggaaatcgattatgatgataccatatcagttgaaatgaagaaggaagattttgacatttatgatgaggatgaaaatcagagcccccgcagctttcaaaagaaaacacgacactattttattgctgcagtggagaggctctgggattatgggatgagtagctccccacatgttctaagaaacagggctcagagtggcagtgtccctcagttcaagaaagttgttttccaggaatttactgatggctcctttactcagcccttataccgtggagaactaaatgaacatttgggactcctggggccatatataagagcagaagttgaagataatatcatggtaactttcagaaatcaggcctctcgtccctattccttctattctagccttatttcttatgaggaagatcagaggcaaggagcagaacctagaaaaaactttgtcaagcctaatgaaaccaaaacttacttttggaaagtgcaacatcatatggcacccactaaagatgagtttgactgcaaagcctgggcttatttctctgatgttgacctggaaaaagatgtgcactcaggcctgattggaccccttctggtctgccacactaacacactgaaccctgctcatgggagacaagtgacagtacaggaatttgctctgtttttcaccatctttgatgagaccaaaagctggtacttcactgaaaatatggaaagaaactgcagggctccctgcaatatccagatggaagatcccacttttaaagagaattatcgcttccatgcaatcaatggctacataatggatacactacctggcttagtaatggctcaggatcaaaggattcgatggtatctgctcagcatgggcagcaatgaaaacatccattctattcatttcagtggacatgtgttcactgtacgaaaaaaagaggagtataaaatggcactgtacaatctctatccaggtgtttttgagacagtggaaatgttaccatccaaagctggaatttggcgggtggaatgccttattggcgagcatctacatgctgggatgagcacactttttctggtgtacagcaataagtgtcagactcccctgggaatggcttctggacacattagagattttcagattacagcttcaggacaatatggacagtgggccccaaagctggccagacttcattattccggatcaatcaatgcctggagcaccaaggagcccttttcttggatcaaggtggatctgttggcaccaatgattattcacggcatcaagacccagggtgcccgtcagaagttctccagcctctacatctctcagtttatcatcatgtatagtcttgatgggaagaagtggcagacttatcgaggaaattccactggaaccttaatggtcttctttggcaatgtggattcatctgggataaaacacaatatttttaaccctccaattattgctcgatacatccgtttgcacccaactcattatagcattcgcagcactcttcgcatggagttgatgggctgtgatttaaatagttgcagcatgccattgggaatggagagtaaagcaatatcagatgcacagattactgcttcatcctactttaccaatatgtttgccacctggtctccttcaaaagctcgacttcacctccaagggaggagtaatgcctggagacctcaggtgaataatccaaaagagtggctgcaagtggacttccagaagacaatgaaagtcacaggagtaactactcagggagtaaaatctctgcttaccagcatgtatgtgaaggagttcctcatctccagcagtcaagatggccatcagtggactctcttttttcagaatggcaaagtaaaggtttttcagggaaatcaagactccttcacacctgtggtgaactctctagacccaccgttactgactcgctaccttcgaattcacccccagagttgggtgcaccagattgccctgaggatggaggttctgggctgcgaggcacaggacctctacggcgccggatcacctggggccgaaacggccgaacaaaaactcatctcagaagaggatctgtcacctgcaaccggtcatcatcaccatcaccattga

SEQ ID NO: 641 - protein, 1763 aa, synthetic construct
  REGION 1..1763: note = Description of Artificial Sequence: Synthetic polypeptide
ATRRYYLGAVELSWDYMQSDLGELPVDARFPPRVPKSFPFNTSVVYKKTLFVEFTDHLFNIAKPRPPWMGLLGPTIQAEVYDTVVITLKNMASHPVSLHAVGVSYWKASEGAEYDDQTSQREKEDDKVFPGGSHTYVWQVLKENGPMASDPLCLTYSYLSHVDLVKDLNSGLIGALLVCREGSLAKEKTQTLHKFILLFAVFDEGKSWHSETKNSLMQDRDAASARAWPKMHTVNGYVNRSLPGLIGCHRKSVYWHVIGMGTTPEVHSIFLEGHTFLVRNHRQASLEISPITFLTAQTLLMDLGQFLLFCHISSHQHDGMEAYVKVDSCPEEPQLRMKNNEEAEDYDDDLTDSEMDVVRFDDDNSPSFIQIRSVAKKHPKTWVHYIAAEEEDWDYAPLVLAPDDRSYKSQYLNNGPQRIGRKYKKVRFMAYTDETFKTREAIQHESGILGPLLYGEVGDTLLIIFKNQASRPYNIYPHGITDVRPLYSRRLPKGVKHLKDFPILPGEIFKYKWTVTVEDGPTKSDPRCLTRYYSSFVNMERDLASGLIGPLLICYKESVDQRGNQIMSDKRNVILFSVFDENRSWYLTENIQRFLPNPAGVQLEDPEFQASNIMHSINGYVFDSLQLSVCLHEVAYWYILSIGAQTDFLSVFFSGYTFKHKMVYEDTLTLFPFSGETVFMSMENPGLWILGCHNSDFRNRGMTALLKVSSCDKNTGDYYEDSYEDISAYLLSKNNAIEPRSFSQNGAPGTSESATPESGPGSEPATSGSETPGTSESATPESGPGSEPATSGSETPGTSESATPESGPGTSTEPSEGSAPGSPAGSPTSTEEGTSESATPESGPGSEPATSGSETPGTSESATPESGPGSPAGSPTSTEEGSPAGSPTSTEEGTSTEPSEGSAPGTSESATPESGPGTSESATPESGPGTSESATPESGPGSEPATSGSETPGSEPATSGSETPGSPAGSPTSTEEGTSTEPSEGSAPGTSTEPSEGSAPGSEPATSGSETPGTSESATPESGPGTSTEPSEGSAPASSPPVLKRHQREITRTTLQSDQEEIDYDDTISVEMKKEDFDIYDEDENQSPRSFQKKTRHYFIAAVERLWDYGMSSSPHVLRNRAQSGSVPQFKKVVFQEFTDGSFTQPLYRGELNEHLGLLGPYIRAEVEDNIMVTFRNQASRPYSFYSSLISYEEDQRQGAEPRKNFVKPNETKTYFWKVQHHMAPTKDEFDCKAWAYFSDVDLEKDVHSGLIGPLLVCHTNTLNPAHGRQVTVQEFALFFTIFDETKSWYFTENMERNCRAPCNIQMEDPTFKENYRFHAINGYIMDTLPGLVMAQDQRIRWYLLSMGSNENIHSIHFSGHVFTVRKKEEYKMALYNLYPGVFETVEMLPSKAGIWRVECLIGEHLHAGMSTLFLVYSNKCQTPLGMASGHIRDFQITASGQYGQWAPKLARLHYSGSINAWSTKEPFSWIKVDLLAPMIIHGIKTQGARQKFSSLYISQFIIMYSLDGKKWQTYRGNSTGTLMVFFGNVDSSGIKHNIFNPPIIARYIRLHPTHYSIRSTLRMELMGCDLNSCSMPLGMESKAISDAQITASSYFTNMFATWSPSKARLHLQGRSNAWRPQVNNPKEWLQVDFQKTMKVTGVTTQGVKSLLTSMYVKEFLISSSQDGHQWTLFFQNGKVKVFQGNQDSFTPVVNSLDPPLLTRYLRIHPQSWVHQIALRMEVLGCEAQDLYGAGSPGAETAEQKLISEEDLSPATGHHHHHH

SEQ ID NO: 642 - DNA, 5292 bp, synthetic construct
  misc_feature 1..5292: note = Description of Artificial Sequence: Synthetic polynucleotide
  source 1..5292: mol_type = other DNA
gccaccagaagatactacctgggtgcagtggaactgtcatgggactatatgcaaagtgatctcggtgagctgcctgtggacgcaagatttcctcctagagtgccaaaatcttttccattcaacacctcagtcgtgtacaaaaagactctgtttgtagaattcacggatcaccttttcaacatcgctaagccaaggccaccctggatgggtctgctaggtcctaccatccaggctgaggtttatgatacagtggtcattacacttaagaacatggcttcccatcctgtcagtcttcatgctgttggtgtatcctactggaaagcttctgagggagctgaatatgatgatcagaccagtcaaagggagaaagaagatgataaagtcttccctggtggaagccatacatatgtctggcaggtcctgaaagagaatggtccaatggcctctgacccactgtgccttacctactcatatctttctcatgtggacctggtaaaagacttgaattcaggcctcattggagccctactagtatgtagagaagggagtctggccaaggaaaagacacagaccttgcacaaatttatactactttttgctgtatttgatgaagggaaaagttggcactcagaaacaaagaactccttgatgcaggatagggatgctgcatctgctcgggcctggcctaaaatgcacacagtcaatggttatgtaaacaggtctctgccaggtctgattggatgccacaggaaatcagtctattggcatgtgattggaatgggcaccactcctgaagtgcactcaatattcctcgaaggtcacacatttcttgtgaggaaccatcgccaggctagcttggaaatctcgccaataactttccttactgctcaaacactcttgatggaccttggacagtttctactgttttgtcatatctcttcccaccaacatgatggcatggaagcttatgtcaaagtagacagctgtccagaggaaccccaactacgaatgaaaaataatgaagaagcggaagactatgatgatgatcttactgattctgaaatggatgtggtcaggtttgatgatgacaactctccttcctttatccaaattcgctcagttgccaagaagcatcctaaaacttgggtacattacattgctgctgaagaggaggactgggactatgctcccttagtcctcgcccccgatgacagaagttataaaagtcaatatttgaacaatggccctcagcggattggtaggaagtacaaaaaagtccgatttatggcatacacagatgaaacctttaagactcgtgaagctattcagcatgaatcaggaatcttgggacctttactttatggggaagttggagacacactgttgattatatttaagaatcaagcaagcagaccatataacatctaccctcacggaatcactgatgtccgtcctttgtattcaaggagattaccaaaaggtgtaaaacatttgaaggattttccaattctgccaggagaaatattcaaatataaatggacagtgactgtagaagatgggccaactaaatcagatcctcggtgcctgacccgctattactctagtttcgttaatatggagagagatctagcttcaggactcattggccctctcctcatctgctacaaagaatctgtagatcaaagaggaaaccagataatgtcagacaagaggaatgtcatcctgttttctgtatttgatgagaaccgaagctggtacctcacagagaatatacaacgctttctccccaatccagctggagtgcagcttgaggatccagagttccaagcctccaacatcatgcacagcatcaatggctatgtttttgatagtttgcagttgtcagtttgtttgcatgaggtggcatactggtacattctaagcattggagcacagactgacttcctttctgtcttcttctctggatataccttcaaacacaaaatggtctatgaagacacactcaccctattcccattctcaggagaaactgtcttcatgtcgatggaaaacccaggtctatggattctggggtgccacaactcagactttcggaacagaggcatgaccgccttactgaaggtttctagttgtgacaagaacactggtgattattacgaggacagttatgaagatatttcagcatacttgctgagtaaaaacaatgccattgaaccaagaagcttctctcaaaacggcgcgccaggtacctcagagtctgctacccccgagtcagggccaggatcagagccagccacctccgggtctgagacacccgggacttccgagagtgccacccctgagtccggacccgggtccgagcccgccacttccggctccgaaactcccggcacaagcgagagcgctaccccagagtcaggaccaggaacatctacagagccctctgaaggctccgctccagggtccccagccggcagtcccactagcaccgaggagggaacctctgaaagcgccacacccgaatcagggccagggtctgagcctgctaccagcggcagcgagacaccaggcacctctgagtccgccacaccagagtccggacccggatctcccgctgggagccccacctccactgaggagggatctcctgctggctctccaacatctactgaggaaggtacctcaaccgagccatccgagggatcagctcccggcacctcagagtcggcaaccccggagtctggacccggaacttccgaaagtgccacaccagagtccggtcccgggacttcagaatcagcaacacccgagtccggccctgggtctgaacccgccacaagtggtagtgagacaccaggatcagaacctgctacctcagggtcagagacacccggatctccggcaggctcaccaacctccactgaggagggcaccagcacagaaccaagcgagggctccgcacccggaacaagcactgaacccagtgagggttcagcacccggctctgagccggccacaagtggcagtgagacacccggcacttcagagagtgccacccccgagagtggcccaggcactagtaccgagccctctgaaggcagtgcgccagcctcgagcccaccagtcttgaaacgccatcaacgggaaataactcgtactactcttcagtcagatcaagaggaaatcgattatgatgataccatatcagttgaaatgaagaaggaagattttgacatttatgatgaggatgaaaatcagagcccccgcagctttcaaaagaaaacacgacactattttattgctgcagtggagaggctctgggattatgggatgagtagctccccacatgttctaagaaacagggctcagagtggcagtgtccctcagttcaagaaagttgttttccaggaatttactgatggctcctttactcagcccttataccgtggagaactaaatgaacatttgggactcctggggccatatataagagcagaagttgaagataatatcatggtaactttcagaaatcaggcctctcgtccctattccttctattctagccttatttcttatgaggaagatcagaggcaaggagcagaacctagaaaaaactttgtcaagcctaatgaaaccaaaacttacttttggaaagtgcaacatcatatggcacccactaaagatgagtttgactgcaaagcctgggcttatttctctgatgttgacctggaaaaagatgtgcactcaggcctgattggaccccttctggtctgccacactaacacactgaaccctgctcatgggagacaagtgacagtacaggaatttgctctgtttttcaccatctttgatgagaccaaaagctggtacttcactgaaaatatggaaagaaactgcagggctccctgcaatatccagatggaagatcccacttttaaagagaattatcgcttccatgcaatcaatggctacataatggatacactacctggcttagtaatggctcaggatcaaaggattcgatggtatctgctcagcatgggcagcaatgaaaacatccattctattcatttcagtggacatgtgttcactgtacgaaaaaaagaggagtataaaatggcactgtacaatctctatccaggtgtttttgagacagtggaaatgttaccatccaaagctggaatttggcgggtggaatgccttattggcgagcatctacatgctgggatgagcacactttttctggtgtacagcaataagtgtcagactcccctgggaatggcttctggacacattagagattttcagattacagcttcaggacaatatggacagtgggccccaaagctggccagacttcattattccggatcaatcaatgcctggagcaccaaggagcccttttcttggatcaaggtggatctgttggcaccaatgattattcacggcatcaagacccagggtgcccgtcagaagttctccagcctctacatctctcagtttatcatcatgtatagtcttgatgggaagaagtggcagacttatcgaggaaattccactggaaccttaatggtcttctttggcaatgtggattcatctgggataaaacacaatatttttaaccctccaattattgctcgatacatccgtttgcacccaactcattatagcattcgcagcactcttcgcatggagttgatgggctgtgatttaaatagttgcagcatgccattgggaatggagagtaaagcaatatcagatgcacagattactgcttcatcctactttaccaatatgtttgccacctggtctccttcaaaagctcgacttcacctccaagggaggagtaatgcctggagacctcaggtgaataatccaaaagagtggctgcaagtggacttccagaagacaatgaaagtcacaggagtaactactcagggagtaaaatctctgcttaccagcatgtatgtgaaggagttcctcatctccagcagtcaagatggccatcagtggactctcttttttcagaatggcaaagtaaaggtttttcagggaaatcaagactccttcacacctgtggtgaactctctagacccaccgttactgactcgctaccttcgaattcacccccagagttgggtgcaccagattgccctgaggatggaggttctgggctgcgaggcacaggacctctacggcgccggatcacctggggccgaaacggccgaacaaaaactcatctcagaagaggatctgtcacctgcaaccggtcatcatcaccatcaccattga

SEQ ID NO: 643 - protein, 1763 aa, synthetic construct
  REGION 1..1763: note = Description of Artificial Sequence: Synthetic polypeptide
ATRRYYLGAVELSWDYMQSDLGELPVDARFPPRVPKSFPFNTSVVYKKTLFVEFTDHLFNIAKPRPPWMGLLGPTIQAEVYDTVVITLKNMASHPVSLHAVGVSYWKASEGAEYDDQTSQREKEDDKVFPGGSHTYVWQVLKENGPMASDPLCLTYSYLSHVDLVKDLNSGLIGALLVCREGSLAKEKTQTLHKFILLFAVFDEGKSWHSETKNSLMQDRDAASARAWPKMHTVNGYVNRSLPGLIGCHRKSVYWHVIGMGTTPEVHSIFLEGHTFLVRNHRQASLEISPITFLTAQTLLMDLGQFLLFCHISSHQHDGMEAYVKVDSCPEEPQLRMKNNEEAEDYDDDLTDSEMDVVRFDDDNSPSFIQIRSVAKKHPKTWVHYIAAEEEDWDYAPLVLAPDDRSYKSQYLNNGPQRIGRKYKKVRFMAYTDETFKTREAIQHESGILGPLLYGEVGDTLLIIFKNQASRPYNIYPHGITDVRPLYSRRLPKGVKHLKDFPILPGEIFKYKWTVTVEDGPTKSDPRCLTRYYSSFVNMERDLASGLIGPLLICYKESVDQRGNQIMSDKRNVILFSVFDENRSWYLTENIQRFLPNPAGVQLEDPEFQASNIMHSINGYVFDSLQLSVCLHEVAYWYILSIGAQTDFLSVFFSGYTFKHKMVYEDTLTLFPFSGETVFMSMENPGLWILGCHNSDFRNRGMTALLKVSSCDKNTGDYYEDSYEDISAYLLSKNNAIEPRSFSQNGAPGTSESATPESGPGSEPATSGSETPGTSESATPESGPGSEPATSGSETPGTSESATPESGPGTSTEPSEGSAPGSPAGSPTSTEEGTSESATPESGPGSEPATSGSETPGTSESATPESGPGSPAGSPTSTEEGSPAGSPTSTEEGTSTEPSEGSAPGTSESATPESGPGTSESATPESGPGTSESATPESGPGSEPATSGSETPGSEPATSGSETPGSPAGSPTSTEEGTSTEPSEGSAPGTSTEPSEGSAPGSEPATSGSETPGTSESATPESGPGTSTEPSEGSAPASSPPVLKRHQAEITRTTLQSDQEEIDYDDTISVEMKKEDFDIYDEDENQSPRSFQKKTRHYFIAAVERLWDYGMSSSPHVLRNRAQSGSVPQFKKVVFQEFTDGSFTQPLYRGELNEHLGLLGPYIRAEVEDNIMVTFRNQASRPYSFYSSLISYEEDQRQGAEPRKNFVKPNETKTYFWKVQHHMAPTKDEFDCKAWAYFSDVDLEKDVHSGLIGPLLVCHTNTLNPAHGRQVTVQEFALFFTIFDETKSWYFTENMERNCRAPCNIQMEDPTFKENYRFHAINGYIMDTLPGLVMAQDQRIRWYLLSMGSNENIHSIHFSGHVFTVRKKEEYKMALYNLYPGVFETVEMLPSKAGIWRVECLIGEHLHAGMSTLFLVYSNKCQTPLGMASGHIRDFQITASGQYGQWAPKLARLHYSGSINAWSTKEPFSWIKVDLLAPMIIHGIKTQGARQKFSSLYISQFIIMYSLDGKKWQTYRGNSTGTLMVFFGNVDSSGIKHNIFNPPIIARYIRLHPTHYSIRSTLRMELMGCDLNSCSMPLGMESKAISDAQITASSYFTNMFATWSPSKARLHLQGRSNAWRPQVNNPKEWLQVDFQKTMKVTGVTTQGVKSLLTSMYVKEFLISSSQDGHQWTLFFQNGKVKVFQGNQDSFTPVVNSLDPPLLTRYLRIHPQSWVHQIALRMEVLGCEAQDLYGAGSPGAETAEQKLISEEDLSPATGHHHHHH

SEQ ID NO: 644 - DNA, 5292 bp, synthetic construct
  misc_feature 1..5292: note = Description of Artificial Sequence: Synthetic polynucleotide
  source 1..5292: mol_type = other DNA
gccaccagaagatactacctgggtgcagtggaactgtcatgggactatatgcaaagtgatctcggtgagctgcctgtggacgcaagatttcctcctagagtgccaaaatcttttccattcaacacctcagtcgtgtacaaaaagactctgtttgtagaattcacggatcaccttttcaacatcgctaagccaaggccaccctggatgggtctgctaggtcctaccatccaggctgaggtttatgatacagtggtcattacacttaagaacatggcttcccatcctgtcagtcttcatgctgttggtgtatcctactggaaagcttctgagggagctgaatatgatgatcagaccagtcaaagggagaaagaagatgataaagtcttccctggtggaagccatacatatgtctggcaggtcctgaaagagaatggtccaatggcctctgacccactgtgccttacctactcatatctttctcatgtggacctggtaaaagacttgaattcaggcctcattggagccctactagtatgtagagaagggagtctggccaaggaaaagacacagaccttgcacaaatttatactactttttgctgtatttgatgaagggaaaagttggcactcagaaacaaagaactccttgatgcaggatagggatgctgcatctgctcgggcctggcctaaaatgcacacagtcaatggttatgtaaacaggtctctgccaggtctgattggatgccacaggaaatcagtctattggcatgtgattggaatgggcaccactcctgaagtgcactcaatattcctcgaaggtcacacatttcttgtgaggaaccatcgccaggctagcttggaaatctcgccaataactttccttactgctcaaacactcttgatggaccttggacagtttctactgttttgtcatatctcttcccaccaacatgatggcatggaagcttatgtcaaagtagacagctgtccagaggaaccccaactacgaatgaaaaataatgaagaagcggaagactatgatgatgatcttactgattctgaaatggatgtggtcaggtttgatgatgacaactctccttcctttatccaaattcgctcagttgccaagaagcatcctaaaacttgggtacattacattgctgctgaagaggaggactgggactatgctcccttagtcctcgcccccgatgacagaagttataaaagtcaatatttgaacaatggccctcagcggattggtaggaagtacaaaaaagtccgatttatggcatacacagatgaaacctttaagactcgtgaagctattcagcatgaatcaggaatcttgggacctttactttatggggaagttggagacacactgttgattatatttaagaatcaagcaagcagaccatataacatctaccctcacggaatcactgatgtccgtcctttgtattcaaggagattaccaaaaggtgtaaaacatttgaaggattttccaattctgccaggagaaatattcaaatataaatggacagtgactgtagaagatgggccaactaaatcagatcctcggtgcctgacccgctattactctagtttcgttaatatggagagagatctagcttcaggactcattggccctctcctcatctgctacaaagaatctgtagatcaaagaggaaaccagataatgtcagacaagaggaatgtcatcctgttttctgtatttgatgagaaccgaagctggtacctcacagagaatatacaacgctttctccccaatccagctggagtgcagcttgaggatccagagttccaagcctccaacatcatgcacagcatcaatggctatgtttttgatagtttgcagttgtcagtttgtttgcatgaggtggcatactggtacattctaagcattggagcacagactgacttcctttctgtcttcttctctggatataccttcaaacacaaaatggtctatgaagacacactcaccctattcccattctcaggagaaactgtcttcatgtcgatggaaaacccaggtctatggattctggggtgccacaactcagactttcggaacagaggcatgaccgccttactgaaggtttctagttgtgacaagaacactggtgattattacgaggacagttatgaagatatttcagcatacttgctgagtaaaaacaatgccattgaaccaagaagcttctctcaaaacggcgcgccaggtacctcagagtctgctacccccgagtcagggccaggatcagagccagccacctccgggtctgagacacccgggacttccgagagtgccacccctgagtccggacccgggtccgagcccgccacttccggctccgaaactcccggcacaagcgagagcgctaccccagagtcaggaccaggaacatctacagagccctctgaaggctccgctccagggtccccagccggcagtcccactagcaccgaggagggaacctctgaaagcgccacacccgaatcagggccagggtctgagcctgctaccagcggcagcgagacaccaggcacctctgagtccgccacaccagagtccggacccggatctcccgctgggagccccacctccactgaggagggatctcctgctggctctccaacatctactgaggaaggtacctcaaccgagccatccgagggatcagctcccggcacctcagagtcggcaaccccggagtctggacccggaacttccgaaagtgccacaccagagtccggtcccgggacttcagaatcagcaacacccgagtccggccctgggtctgaacccgccacaagtggtagtgagacaccaggatcagaacctgctacctcagggtcagagacacccggatctccggcaggctcaccaacctccactgaggagggcaccagcacagaaccaagcgagggctccgcacccggaacaagcactgaacccagtgagggttcagcacccggctctgagccggccacaagtggcagtgagacacccggcacttcagagagtgccacccccgagagtggcccaggcactagtaccgagccctctgaaggcagtgcgccagcctcgagcccaccagtcttgaaacgccatcaagctgaaataactcgtactactcttcagtcagatcaagaggaaatcgattatgatgataccatatcagttgaaatgaagaaggaagattttgacatttatgatgaggatgaaaatcagagcccccgcagctttcaaaagaaaacacgacactattttattgctgcagtggagaggctctgggattatgggatgagtagctccccacatgttctaagaaacagggctcagagtggcagtgtccctcagttcaagaaagttgttttccaggaatttactgatggctcctttactcagcccttataccgtggagaactaaatgaacatttgggactcctggggccatatataagagcagaagttgaagataatatcatggtaactttcagaaatcaggcctctcgtccctattccttctattctagccttatttcttatgaggaagatcagaggcaaggagcagaacctagaaaaaactttgtcaagcctaatgaaaccaaaacttacttttggaaagtgcaacatcatatggcacccactaaagatgagtttgactgcaaagcctgggcttatttctctgatgttgacctggaaaaagatgtgcactcaggcctgattggaccccttctggtctgccacactaacacactgaaccctgctcatgggagacaagtgacagtacaggaatttgctctgtttttcaccatctttgatgagaccaaaagctggtacttcactgaaaatatggaaagaaactgcagggctccctgcaatatccagatggaagatcccacttttaaagagaattatcgcttccatgcaatcaatggctacataatggatacactacctggcttagtaatggctcaggatcaaaggattcgatggtatctgctcagcatgggcagcaatgaaaacatccattctattcatttcagtggacatgtgttcactgtacgaaaaaaagaggagtataaaatggcactgtacaatctctatccaggtgtttttgagacagtggaaatgttaccatccaaagctggaatttggcgggtggaatgccttattggcgagcatctacatgctgggatgagcacactttttctggtgtacagcaataagtgtcagactcccctgggaatggcttctggacacattagagattttcagattacagcttcaggacaatatggacagtgggccccaaagctggccagacttcattattccggatcaatcaatgcctggagcaccaaggagcccttttcttggatcaaggtggatctgttggcaccaatgattattcacggcatcaagacccagggtgcccgtcagaagttctccagcctctacatctctcagtttatcatcatgtatagtcttgatgggaagaagtggcagacttatcgaggaaattccactggaaccttaatggtcttctttggcaatgtggattcatctgggataaaacacaatatttttaaccctccaattattgctcgatacatccgtttgcacccaactcattatagcattcgcagcactcttcgcatggagttgatgggctgtgatttaaatagttgcagcatgccattgggaatggagagtaaagcaatatcagatgcacagattactgcttcatcctactttaccaatatgtttgccacctggtctccttcaaaagctcgacttcacctccaagggaggagtaatgcctggagacctcaggtgaataatccaaaagagtggctgcaagtggacttccagaagacaatgaaagtcacaggagtaactactcagggagtaaaatctctgcttaccagcatgtatgtgaaggagttcctcatctccagcagtcaagatggccatcagtggactctcttttttcagaatggcaaagtaaaggtttttcagggaaatcaagactccttcacacctgtggtgaactctctagacccaccgttactgactcgctaccttcgaattcacccccagagttgggtgcaccagattgccctgaggatggaggttctgggctgcgaggcacaggacctctacggcgccggatcacctggggccgaaacggccgaacaaaaactcatctcagaagaggatctgtcacctgcaaccggtcatcatcaccatcaccattga

SEQ ID NO: 645 - protein, 1514 aa, synthetic construct
  REGION 1..1514: note = Description of Artificial Sequence: Synthetic polypeptide
ATRRYYLGAVELSWDYMQSDLGELPVDARFPPRVPKSFPFNTSVVYKKTLFVEFTDHLFNIAKPRPPWMGLLGPTIQAEVYDTVVITLKNMASHPVSLHAVGVSYWKASEGAEYDDQTSQREKEDDKVFPGGSHTYVWQVLKENGPMASDPLCLTYSYLSHVDLVKDLNSGLIGALLVCREGSLAKEKTQTLHKFILLFAVFDEGKSWHSETKNSLMQDRDAASARAWPKMHTVNGYVNRSLPGLIGCHRKSVYWHVIGMGTTPEVHSIFLEGHTFLVRNHRQASLEISPITFLTAQTLLMDLGQFLLFCHISSHQHDGMEAYVKVDSCPEEPQLRMKNNEEAEDYDDDLTDSEMDVVRFDDDNSPSFIQIRSVAKKHPKTWVHYIAAEEEDWDYAPLVLAPDDRSYKSQYLNNGPQRIGRKYKKVRFMAYTDETFKTREAIQHESGILGPLLYGEVGDTLLIIFKNQASRPYNIYPHGITDVRPLYSRRLPKGVKHLKDFPILPGEIFKYKWTVTVEDGPTKSDPRCLTRYYSSFVNMERDLASGLIGPLLICYKESVDQRGNQIMSDKRNVILFSVFDENRSWYLTENIQRFLPNPAGVQLEDPEFQASNIMHSINGYVFDSLQLSVCLHEVAYWYILSIGAQTDFLSVFFSGYTFKHKMVYEDTLTLFPFSGETVFMSMENPGLWILGCHNSDFRNRGMTALLKVSSCDKNTGDYYEDSYEDISAYLLSKNNAIEPRSFSQNPPVLKRHQREITRTTLQSDQEEIDYDDTISVEMKKEDFDIYDEDENQSPRSFQKKTRHYFIAAVERLWDYGMSSSPHVLRNRAQGAPGSPAGSPTSTEEGTSESATPESGPGSEPATSGSETPASSRAQSGSVPQFKKVVFQEFTDGSFTQPLYRGELNEHLGLLGPYIRAEVEDNIMVTFRNQASRPYSFYSSLISYEEDQRQGAEPRKNFVKPNETKTYFWKVQHHMAPTKDEFDCKAWAYFSDVDLEKDVHSGLIGPLLVCHTNTLNPAHGRQVTVQEFALFFTIFDETKSWYFTENMERNCRAPCNIQMEDPTFKENYRFHAINGYIMDTLPGLVMAQDQRIRWYLLSMGSNENIHSIHFSGHVFTVRKKEEYKMALYNLYPGVFETVEMLPSKAGIWRVECLIGEHLHAGMSTLFLVYSNKCQTPLGMASGHIRDFQITASGQYGQWAPKLARLHYSGSINAWSTKEPFSWIKVDLLAPMIIHGIKTQGARQKFSSLYISQFIIMYSLDGKKWQTYRGNSTGTLMVFFGNVDSSGIKHNIFNPPIIARYIRLHPTHYSIRSTLRMELMGCDLNSCSMPLGMESKAISDAQITASSYFTNMFATWSPSKARLHLQGRSNAWRPQVNNPKEWLQVDFQKTMKVTGVTTQGVKSLLTSMYVKEFLISSSQDGHQWTLFFQNGKVKVFQGNQDSFTPVVNSLDPPLLTRYLRIHPQSWVHQIALRMEVLGCEAQDLYGAGSPGAETAEQKLISEEDLSPATGHHHHHH

SEQ ID NO: 646 - DNA, 4545 bp, synthetic construct
  misc_feature 1..4545: note = Description of Artificial Sequence: Synthetic polynucleotide
  source 1..4545: mol_type = other DNA
gccaccagaagatactacctgggtgcagtggaactgtcatgggactatatgcaaagtgatctcggtgagctgcctgtggacgcaagatttcctcctagagtgccaaaatcttttccattcaacacctcagtcgtgtacaaaaagactctgtttgtagaattcacggatcaccttttcaacatcgctaagccaaggccaccctggatgggtctgctaggtcctaccatccaggctgaggtttatgatacagtggtcattacacttaagaacatggcttcccatcctgtcagtcttcatgctgttggtgtatcctactggaaagcttctgagggagctgaatatgatgatcagaccagtcaaagggagaaagaagatgataaagtcttccctggtggaagccatacatatgtctggcaggtcctgaaagagaatggtccaatggcctctgacccactgtgccttacctactcatatctttctcatgtggacctggtaaaagacttgaattcaggcctcattggagccctactagtatgtagagaagggagtctggccaaggaaaagacacagaccttgcacaaatttatactactttttgctgtatttgatgaagggaaaagttggcactcagaaacaaagaactccttgatgcaggatagggatgctgcatctgctcgggcctggcctaaaatgcacacagtcaatggttatgtaaacaggtctctgccaggtctgattggatgccacaggaaatcagtctattggcatgtgattggaatgggcaccactcctgaagtgcactcaatattcctcgaaggtcacacatttcttgtgaggaaccatcgccaggctagcttggaaatctcgccaataactttccttactgctcaaacactcttgatggaccttggacagtttctactgttttgtcatatctcttcccaccaacatgatggcatggaagcttatgtcaaagtagacagctgtccagaggaaccccaactacgaatgaaaaataatgaagaagcggaagactatgatgatgatcttactgattctgaaatggatgtggtcaggtttgatgatgacaactctccttcctttatccaaattcgctcagttgccaagaagcatcctaaaacttgggtacattacattgctgctgaagaggaggactgggactatgctcccttagtcctcgcccccgatgacagaagttataaaagtcaatatttgaacaatggccctcagcggattggtaggaagtacaaaaaagtccgatttatggcatacacagatgaaacctttaagactcgtgaagctattcagcatgaatcaggaatcttgggacctttactttatggggaagttggagacacactgttgattatatttaagaatcaagcaagcagaccatataacatctaccctcacggaatcactgatgtccgtcctttgtattcaaggagattaccaaaaggtgtaaaacatttgaaggattttccaattctgccaggagaaatattcaaatataaatggacagtgactgtagaagatgggccaactaaatcagatcctcggtgcctgacccgctattactctagtttcgttaatatggagagagatctagcttcaggactcattggccctctcctcatctgctacaaagaatctgtagatcaaagaggaaaccagataatgtcagacaagaggaatgtcatcctgttttctgtatttgatgagaaccgaagctggtacctcacagagaatatacaacgctttctccccaatccagctggagtgcagcttgaggatccagagttccaagcctccaacatcatgcacagcatcaatggctatgtttttgatagtttgcagttgtcagtttgtttgcatgaggtggcatactggtacattctaagcattggagcacagactgacttcctttctgtcttcttctctggatataccttcaaacacaaaatggtctatgaagacacactcaccctattcccattctcaggagaaactgtcttcatgtcgatggaaaacccaggtctatggattctggggtgccacaactcagactttcggaacagaggcatgaccgccttactgaaggtttctagttgtgacaagaacactggtgattattacgaggacagttatgaagatatttcagcatacttgctgagtaaaaacaatgccattgaaccaagaagcttctctcaaaacccaccagtcttgaaacgccatcaacgggaaataactcgtactactcttcagtcagatcaagaggaaatcgattatgatgataccatatcagttgaaatgaagaaggaagattttgacatttatgatgaggatgaaaatcagagcccccgcagctttcaaaagaaaacacgacactattttattgctgcagtggagaggctctgggattatgggatgagtagctccccacatgttctaagaaacagggctcagggcgcgccaggttctcctgctggctcccccacctcaacagaagaggggacaagcgaaagcgctacgcctgagagtggccctggctctgagccagccacctccggctctgaaacccctgcctcgagcagggctcagagtggcagtgtccctcagttcaagaaagttgttttccaggaatttactgatggctcctttactcagcccttataccgtggagaactaaatgaacatttgggactcctggggccatatataagagcagaagttgaagataatatcatggtaactttcagaaatcaggcctctcgtccctattccttctattctagccttatttcttatgaggaagatcagaggcaaggagcagaacctagaaaaaactttgtcaagcctaatgaaaccaaaacttacttttggaaagtgcaacatcatatggcacccactaaagatgagtttgactgcaaagcctgggcttatttctctgatgttgacctggaaaaagatgtgcactcaggcctgattggaccccttctggtctgccacactaacacactgaaccctgctcatgggagacaagtgacagtacaggaatttgctctgtttttcaccatctttgatgagaccaaaagctggtacttcactgaaaatatggaaagaaactgcagggctccctgcaatatccagatggaagatcccacttttaaagagaattatcgcttccatgcaatcaatggctacataatggatacactacctggcttagtaatggctcaggatcaaaggattcgatggtatctgctcagcatgggcagcaatgaaaacatccattctattcatttcagtggacatgtgttcactgtacgaaaaaaagaggagtataaaatggcactgtacaatctctatccaggtgtttttgagacagtggaaatgttaccatccaaagctggaatttggcgggtggaatgccttattggcgagcatctacatgctgggatgagcacactttttctggtgtacagcaataagtgtcagactcccctgggaatggcttctggacacattagagattttcagattacagcttcaggacaatatggacagtgggccccaaagctggccagacttcattattccggatcaatcaatgcctggagcaccaaggagcccttttcttggatcaaggtggatctgttggcaccaatgattattcacggcatcaagacccagggtgcccgtcagaagttctccagcctctacatctctcagtttatcatcatgtatagtcttgatgggaagaagtggcagacttatcgaggaaattccactggaaccttaatggtcttctttggcaatgtggattcatctgggataaaacacaatatttttaaccctccaattattgctcgatacatccgtttgcacccaactcattatagcattcgcagcactcttcgcatggagttgatgggctgtgatttaaatagttgcagcatgccattgggaatggagagtaaagcaatatcagatgcacagattactgcttcatcctactttaccaatatgtttgccacctggtctccttcaaaagctcgacttcacctccaagggaggagtaatgcctggagacctcaggtgaataatccaaaagagtggctgcaagtggacttccagaagacaatgaaagtcacaggagtaactactcagggagtaaaatctctgcttaccagcatgtatgtgaaggagttcctcatctccagcagtcaagatggccatcagtggactctcttttttcagaatggcaaagtaaaggtttttcagggaaatcaagactccttcacacctgtggtgaactctctagacccaccgttactgactcgctaccttcgaattcacccccagagttgggtgcaccagattgccctgaggatggaggttctgggctgcgaggcacaggacctctacggcgccggatcacctggggccgaaacggccgaacaaaaactcatctcagaagaggatctgtcacctgcaaccggtcatcatcaccatcaccattga

SEQ ID NO: 647 - protein, 1511 aa, synthetic construct
  REGION 1..1511: note = Description of Artificial Sequence: Synthetic polypeptide
ATRRYYLGAVELSWDYMQSDLGELPVDARFPPRVPKSFPFNTSVVYKKTLFVEFTDHLFNIAKPRPPWMGLLGPTIQAEVYDTVVITLKNMASHPVSLHAVGVSYWKASEGAEYDDQTSQREKEDDKVFPGGSHTYVWQVLKENGPMASDPLCLTYSYLSHVDLVKDLNSGLIGALLVCREGSLAKEKTQTLHKFILLFAVFDEGKSWHSETKNSLMQDRDAASARAWPKMHTVNGYVNRSLPGLIGCHRKSVYWHVIGMGTTPEVHSIFLEGHTFLVRNHRQASLEISPITFLTAQTLLMDLGQFLLFCHISSHQHDGMEAYVKVDSCPEEPQLRMKNNEEAEDYDDDLTDSEMDVVRFDDDNSPSFIQIRSVAKKHPKTWVHYIAAEEEDWDYAPLVLAPDDRSYKSQYLNNGPQRIGRKYKKVRFMAYTDETFKTREAIQHESGILGPLLYGEVGDTLLIIFKNQASRPYNIYPHGITDVRPLYSRRLPKGVKHLKDFPILPGEIFKYKWTVTVEDGPTKSDPRCLTRYYSSFVNMERDLASGLIGPLLICYKESVDQRGNQIMSDKRNVILFSVFDENRSWYLTENIQRFLPNPAGVQLEDPEFQASNIMHSINGYVFDSLQLSVCLHEVAYWYILSIGAQTDFLSVFFSGYTFKHKMVYEDTLTLFPFSGETVFMSMENPGLWILGCHNSDFRNRGMTALLKVSSCDKNTGDYYEDSYEDISAYLLSKNNAIEPRSFSQNPPVLKRHQREITRTTLQSDQEEIDYDDTISVEMKKEDFDIYDEDENQSPRSFQKKTRHYFIAAVERLWDYGMSSSPHVLRNRAQSGSVPQFKKVVFQEFTDGSFTQPLYRGELNEHLGLLGPYIRAEVEDNIMVTFRNQASRPYSFYSSLISYEEDQGAPGSPAGSPTSTEEGTSESATPESGPGSEPATSGSETPASSRQGAEPRKNFVKPNETKTYFWKVQHHMAPTKDEFDCKAWAYFSDVDLEKDVHSGLIGPLLVCHTNTLNPAHGRQVTVQEFALFFTIFDETKSWYFTENMERNCRAPCNIQMEDPTFKENYRFHAINGYIMDTLPGLVMAQDQRIRWYLLSMGSNENIHSIHFSGHVFTVRKKEEYKMALYNLYPGVFETVEMLPSKAGIWRVECLIGEHLHAGMSTLFLVYSNKCQTPLGMASGHIRDFQITASGQYGQWAPKLARLHYSGSINAWSTKEPFSWIKVDLLAPMIIHGIKTQGARQKFSSLYISQFIIMYSLDGKKWQTYRGNSTGTLMVFFGNVDSSGIKHNIFNPPIIARYIRLHPTHYSIRSTLRMELMGCDLNSCSMPLGMESKAISDAQITASSYFTNMFATWSPSKARLHLQGRSNAWRPQVNNPKEWLQVDFQKTMKVTGVTTQGVKSLLTSMYVKEFLISSSQDGHQWTLFFQNGKVKVFQGNQDSFTPVVNSLDPPLLTRYLRIHPQSWVHQIALRMEVLGCEAQDLYGAGSPGAETAEQKLISEEDLSPATGHHHHHH

SEQ ID NO: 648 - DNA, 4536 bp, synthetic construct
  misc_feature 1..4536: note = Description of Artificial Sequence: Synthetic polynucleotide
  source 1..4536: mol_type = other DNA
gccaccagaagatactacctgggtgcagtggaactgtcatgggactatatgcaaagtgatctcggtgagctgcctgtggacgcaagatttcctcctagagtgccaaaatcttttccattcaacacctcagtcgtgtacaaaaagactctgtttgtagaattcacggatcaccttttcaacatcgctaagccaaggccaccctggatgggtctgctaggtcctaccatccaggctgaggtttatgatacagtggtcattacacttaagaacatggcttcccatcctgtcagtcttcatgctgttggtgtatcctactggaaagcttctgagggagctgaatatgatgatcagaccagtcaaagggagaaagaagatgataaagtcttccctggtggaagccatacatatgtctggcaggtcctgaaagagaatggtccaatggcctctgacccactgtgccttacctactcatatctttctcatgtggacctggtaaaagacttgaattcaggcctcattggagccctactagtatgtagagaagggagtctggccaaggaaaagacacagaccttgcacaaatttatactactttttgctgtatttgatgaagggaaaagttggcactcagaaacaaagaactccttgatgcaggatagggatgctgcatctgctcgggcctggcctaaaatgcacacagtcaatggttatgtaaacaggtctctgccaggtctgattggatgccacaggaaatcagtctattggcatgtgattggaatgggcaccactcctgaagtgcactcaatattcctcgaaggtcacacatttcttgtgaggaaccatcgccaggctagcttggaaatctcgccaataactttccttactgctcaaacactcttgatggaccttggacagtttctactgttttgtcatatctcttcccaccaacatgatggcatggaagcttatgtcaaagtagacagctgtccagaggaaccccaactacgaatgaaaaataatgaagaagcggaagactatgatgatgatcttactgattctgaaatggatgtggtcaggtttgatgatgacaactctccttcctttatccaaattcgctcagttgccaagaagcatcctaaaacttgggtacattacattgctgctgaagaggaggactgggactatgctcccttagtcctcgcccccgatgacagaagttataaaagtcaatatttgaacaatggccctcagcggattggtaggaagtacaaaaaagtccgatttatggcatacacagatgaaacctttaagactcgtgaagctattcagcatgaatcaggaatcttgggacctttactttatggggaagttggagacacactgttgattatatttaagaatcaagcaagcagaccatataacatctaccctcacggaatcactgatgtccgtcctttgtattcaaggagattaccaaaaggtgtaaaacatttgaaggattttccaattctgccaggagaaatattcaaatataaatggacagtgactgtagaagatgggccaactaaatcagatcctcggtgcctgacccgctattactctagtttcgttaatatggagagagatctagcttcaggactcattggccctctcctcatctgctacaaagaatctgtagatcaaagaggaaaccagataatgtcagacaagaggaatgtcatcctgttttctgtatttgatgagaaccgaagctggtacctcacagagaatatacaacgctttctccccaatccagctggagtgcagcttgaggatccagagttccaagcctccaacatcatgcacagcatcaatggctatgtttttgatagtttgcagttgtcagtttgtttgcatgaggtggcatactggtacattctaagcattggagcacagactgacttcctttctgtcttcttctctggatataccttcaaacacaaaatggtctatgaagacacactcaccctattcccattctcaggagaaactgtcttcatgtcgatggaaaacccaggtctatggattctggggtgccacaactcagactttcggaacagaggcatgaccgccttactgaaggtttctagttgtgacaagaacactggtgattattacgaggacagttatgaagatatttcagcatacttgctgagtaaaaacaatgccattgaaccaagaagcttctctcaaaacccaccagtcttgaaacgccatcaacgggaaataactcgtactactcttcagtcagatcaagaggaaatcgattatgatgataccatatcagttgaaatgaagaaggaagattttgacatttatgatgaggatgaaaatcagagcccccgcagctttcaaaagaaaacacgacactattttattgctgcagtggagaggctctgggattatgggatgagtagctccccacatgttctaagaaacagggctcagagtggcagtgtccctcagttcaagaaagttgttttccaggaatttactgatggctcctttactcagcccttataccgtggagaactaaatgaacatttgggactcctggggccatatataagagcagaagttgaagataatatcatggtaactttcagaaatcaggcctctcgtccctattccttctattctagccttatttcttatgaggaagatcagggcgcgccaggttctcctgctggctcccccacctcaacagaagaggggacaagcgaaagcgctacgcctgagagtggccctggctctgagccagccacctccggctctgaaacccctgcctcgagcaggcaaggagcagaacctagaaaaaactttgtcaagcctaatgaaaccaaaacttacttttggaaagtgcaacatcatatggcacccactaaagatgagtttgactgcaaagcctgggcttatttctctgatgttgacctggaaaaagatgtgcactcaggcctgattggaccccttctggtctgccacactaacacactgaaccctgctcatgggagacaagtgacagtacaggaatttgctctgtttttcaccatctttgatgagaccaaaagctggtacttcactgaaaatatggaaagaaactgcagggctccctgcaatatccagatggaagatcccacttttaaagagaattatcgcttccatgcaatcaatggctacataatggatacactacctggcttagtaatggctcaggatcaaaggattcgatggtatctgctcagcatgggcagcaatgaaaacatccattctattcatttcagtggacatgtgttcactgtacgaaaaaaagaggagtataaaatggcactgtacaatctctatccaggtgtttttgagacagtggaaatgttaccatccaaagctggaatttggcgggtggaatgccttattggcgagcatctacatgctgggatgagcacactttttctggtgtacagcaataagtgtcagactcccctgggaatggcttctggacacattagagattttcagattacagcttcaggacaatatggacagtgggccccaaagctggccagacttcattattccggatcaatcaatgcctggagcaccaaggagcccttttcttggatcaaggtggatctgttggcaccaatgattattcacggcatcaagacccagggtgcccgtcagaagttctccagcctctacatctctcagtttatcatcatgtatagtcttgatgggaagaagtggcagacttatcgaggaaattccactggaaccttaatggtcttctttggcaatgtggattcatctgggataaaacacaatatttttaaccctccaattattgctcgatacatccgtttgcacccaactcattatagcattcgcagcactcttcgcatggagttgatgggctgtgatttaaatagttgcagcatgccattgggaatggagagtaaagcaatatcagatgcacagattactgcttcatcctactttaccaatatgtttgccacctggtctccttcaaaagctcgacttcacctccaagggaggagtaatgcctggagacctcaggtgaataatccaaaagagtggctgcaagtggacttccagaagacaatgaaagtcacaggagtaactactcagggagtaaaatctctgcttaccagcatgtatgtgaaggagttcctcatctccagcagtcaagatggccatcagtggactctcttttttcagaatggcaaagtaaaggtttttcagggaaatcaagactccttcacacctgtggtgaactctctagacccaccgttactgactcgctaccttcgaattcacccccagagttgggtgcaccagattgccctgaggatggaggttctgggctgcgaggcacaggacctctacggcgccggatcacctggggccgaaacggccgaacaaaaactcatctcagaagaggatctgtcacctgcaaccggtcatcatcaccatcaccattga

SEQ ID NO: 649 - protein, 1511 aa, synthetic construct
  REGION 1..1511: note = Description of Artificial Sequence: Synthetic polypeptide
ATRRYYLGAVELSWDYMQSDLGELPVDARFPPRVPKSFPFNTSVVYKKTLFVEFTDHLFNIAKPRPPWMGLLGPTIQAEVYDTVVITLKNMASHPVSLHAVGVSYWKASEGAEYDDQTSQREKEDDKVFPGGSHTYVWQVLKENGPMASDPLCLTYSYLSHVDLVKDLNSGLIGALLVCREGSLAKEKTQTLHKFILLFAVFDEGKSWHSETKNSLMQDRDAASARAWPKMHTVNGYVNRSLPGLIGCHRKSVYWHVIGMGTTPEVHSIFLEGHTFLVRNHRQASLEISPITFLTAQTLLMDLGQFLLFCHISSHQHDGMEAYVKVDSCPEEPQLRMKNNEEAEDYDDDLTDSEMDVVRFDDDNSPSFIQIRSVAKKHPKTWVHYIAAEEEDWDYAPLVLAPDDRSYKSQYLNNGPQRIGRKYKKVRFMAYTDETFKTREAIQHESGILGPLLYGEVGDTLLIIFKNQASRPYNIYPHGITDVRPLYSRRLPKGVKHLKDFPILPGEIFKYKWTVTVEDGPTKSDPRCLTRYYSSFVNMERDLASGLIGPLLICYKESVDQRGNQIMSDKRNVILFSVFDENRSWYLTENIQRFLPNPAGVQLEDPEFQASNIMHSINGYVFDSLQLSVCLHEVAYWYILSIGAQTDFLSVFFSGYTFKHKMVYEDTLTLFPFSGETVFMSMENPGLWILGCHNSDFRNRGMTALLKVSSCDKNTGDYYEDSYEDISAYLLSKNNAIEPRSFSQNPPVLKRHQREITRTTLQSDQEEIDYDDTISVEMKKEDFDIYDEDENQSPRSFQKKTRHYFIAAVERLWDYGMSSSPHVLRNRAQSGSVPQFKKVVFQEFTDGSFTQPLYRGELNEHLGLLGPYIRAEVEDNIMVTFRNQASRPYSFYSSLISYEEDQRQGAEPGAPGSPAGSPTSTEEGTSESATPESGPGSEPATSGSETPASSRKNFVKPNETKTYFWKVQHHMAPTKDEFDCKAWAYFSDVDLEKDVHSGLIGPLLVCHTNTLNPAHGRQVTVQEFALFFTIFDETKSWYFTENMERNCRAPCNIQMEDPTFKENYRFHAINGYIMDTLPGLVMAQDQRIRWYLLSMGSNENIHSIHFSGHVFTVRKKEEYKMALYNLYPGVFETVEMLPSKAGIWRVECLIGEHLHAGMSTLFLVYSNKCQTPLGMASGHIRDFQITASGQYGQWAPKLARLHYSGSINAWSTKEPFSWIKVDLLAPMIIHGIKTQGARQKFSSLYISQFIIMYSLDGKKWQTYRGNSTGTLMVFFGNVDSSGIKHNIFNPPIIARYIRLHPTHYSIRSTLRMELMGCDLNSCSMPLGMESKAISDAQITASSYFTNMFATWSPSKARLHLQGRSNAWRPQVNNPKEWLQVDFQKTMKVTGVTTQGVKSLLTSMYVKEFLISSSQDGHQWTLFFQNGKVKVFQGNQDSFTPVVNSLDPPLLTRYLRIHPQSWVHQIALRMEVLGCEAQDLYGAGSPGAETAEQKLISEEDLSPATGHHHHHH

SEQ ID NO: 650 - DNA, 4536 bp, synthetic construct
  misc_feature 1..4536: note = Description of Artificial Sequence: Synthetic polynucleotide
  source 1..4536: mol_type = other DNA
gccaccagaagatactacctgggtgcagtggaactgtcatgggactatatgcaaagtgatctcggtgagctgcctgtggacgcaagatttcctcctagagtgccaaaatcttttccattcaacacctcagtcgtgtacaaaaagactctgtttgtagaattcacggatcaccttttcaacatcgctaagccaaggccaccctggatgggtctgctaggtcctaccatccaggctgaggtttatgatacagtggtcattacacttaagaacatggcttcccatcctgtcagtcttcatgctgttggtgtatcctactggaaagcttctgagggagctgaatatgatgatcagaccagtcaaagggagaaagaagatgataaagtcttccctggtggaagccatacatatgtctggcaggtcctgaaagagaatggtccaatggcctctgacccactgtgccttacctactcatatctttctcatgtggacctggtaaaagacttgaattcaggcctcattggagccctactagtatgtagagaagggagtctggccaaggaaaagacacagaccttgcacaaatttatactactttttgctgtatttgatgaagggaaaagttggcactcagaaacaaagaactccttgatgcaggatagggatgctgcatctgctcgggcctggcctaaaatgcacacagtcaatggttatgtaaacaggtctctgccaggtctgattggatgccacaggaaatcagtctattggcatgtgattggaatgggcaccactcctgaagtgcactcaatattcctcgaaggtcacacatttcttgtgaggaaccatcgccaggctagcttggaaatctcgccaataactttccttactgctcaaacactcttgatggaccttggacagtttctactgttttgtcatatctcttcccaccaacatgatggcatggaagcttatgtcaaagtagacagctgtccagaggaaccccaactacgaatgaaaaataatgaagaagcggaagactatgatgatgatcttactgattctgaaatggatgtggtcaggtttgatgatgacaactctccttcctttatccaaattcgctcagttgccaagaagcatcctaaaacttgggtacattacattgctgctgaagaggaggactgggactatgctcccttagtcctcgcccccgatgacagaagttataaaagtcaatatttgaacaatggccctcagcggattggtaggaagtacaaaaaagtccgatttatggcatacacagatgaaacctttaagactcgtgaagctattcagcatgaatcaggaatcttgggacctttactttatggggaagttggagacacactgttgattatatttaagaatcaagcaagcagaccatataacatctaccctcacggaatcactgatgtccgtcctttgtattcaaggagattaccaaaaggtgtaaaacatttgaaggattttccaattctgccaggagaaatattcaaatataaatggacagtgactgtagaagatgggccaactaaatcagatcctcggtgcctgacccgctattactctagtttcgttaatatggagagagatctagcttcaggactcattggccctctcctcatctgctacaaagaatctgtagatcaaagaggaaaccagataatgtcagacaagaggaatgtcatcctgttttctgtatttgatgagaaccgaagctggtacctcacagagaatatacaacgctttctccccaatccagctggagtgcagcttgaggatccagagttccaagcctccaacatcatgcacagcatcaatggctatgtttttgatagtttgcagttgtcagtttgtttgcatgaggtggcatactggtacattctaagcattggagcacagactgacttcctttctgtcttcttctctggatataccttcaaacacaaaatggtctatgaagacacactcaccctattcccattctcaggagaaactgtcttcatgtcgatggaaaacccaggtctatggattctggggtgccacaactcagactttcggaacagaggcatgaccgccttactgaaggtttctagttgtgacaagaacactggtgattattacgaggacagttatgaagatatttcagcatacttgctgagtaaaaacaatgccattgaaccaagaagcttctctcaaaacccaccagtcttgaaacgccatcaacgggaaataactcgtactactcttcagtcagatcaagaggaaatcgattatgatgataccatatcagttgaaatgaagaaggaagattttgacatttatgatgaggatgaaaatcagagcccccgcagctttcaaaagaaaacacgacactattttattgctgcagtggagaggctctgggattatgggatgagtagctccccacatgttctaagaaacagggctcagagtggcagtgtccctcagttcaagaaagttgttttccaggaatttactgatggctcctttactcagcccttataccgtggagaactaaatgaacatttgggactcctggggccatatataagagcagaagttgaagataatatcatggtaactttcagaaatcaggcctctcgtccctattccttctattctagccttatttcttatgaggaagatcagaggcaaggagcagaacctggcgcgccaggttctcctgctggctcccccacctcaacagaagaggggacaagcgaaagcgctacgcctgagagtggccctggctctgagccagccacctccggctctgaaacccctgcctcgagcagaaaaaactttgtcaagcctaatgaaaccaaaacttacttttggaaagtgcaacatcatatggcacccactaaagatgagtttgactgcaaagcctgggcttatttctctgatgttgacctggaaaaagatgtgcactcaggcctgattggaccccttctggtctgccacactaacacactgaaccctgctcatgggagacaagtgacagtacaggaatttgctctgtttttcaccatctttgatgagaccaaaagctggtacttcactgaaaatatggaaagaaactgcagggctccctgcaatatccagatggaagatcccacttttaaagagaattatcgcttccatgcaatcaatggctacataatggatacactacctggcttagtaatggctcaggatcaaaggattcgatggtatctgctcagcatgggcagcaatgaaaacatccattctattcatttcagtggacatgtgttcactgtacgaaaaaaagaggagtataaaatggcactgtacaatctctatccaggtgtttttgagacagtggaaatgttaccatccaaagctggaatttggcgggtggaatgccttattggcgagcatctacatgctgggatgagcacactttttctggtgtacagcaataagtgtcagactcccctgggaatggcttctggacacattagagattttcagattacagcttcaggacaatatggacagtgggccccaaagctggccagacttcattattccggatcaatcaatgcctggagcaccaaggagcccttttcttggatcaaggtggatctgttggcaccaatgattattcacggcatcaagacccagggtgcccgtcagaagttctccagcctctacatctctcagtttatcatcatgtatagtcttgatgggaagaagtggcagacttatcgaggaaattccactggaaccttaatggtcttctttggcaatgtggattcatctgggataaaacacaatatttttaaccctccaattattgctcgatacatccgtttgcacccaactcattatagcattcgcagcactcttcgcatggagttgatgggctgtgatttaaatagttgcagcatgccattgggaatggagagtaaagcaatatcagatgcacagattactgcttcatcctactttaccaatatgtttgccacctggtctccttcaaaagctcgacttcacctccaagggaggagtaatgcctggagacctcaggtgaataatccaaaagagtggctgcaagtggacttccagaagacaatgaaagtcacaggagtaactactcagggagtaaaatctctgcttaccagcatgtatgtgaaggagttcctcatctccagcagtcaagatggccatcagtggactctcttttttcagaatggcaaagtaaaggtttttcagggaaatcaagactccttcacacctgtggtgaactctctagacccaccgttactgactcgctaccttcgaattcacccccagagttgggtgcaccagattgccctgaggatggaggttctgggctgcgaggcacaggacctctacggcgccggatcacctggggccgaaacggccgaacaaaaactcatctcagaagaggatctgtcacctgcaaccggtcatcatcaccatcaccattga

SEQ ID NO: 651 - protein, 1511 aa, synthetic construct
  REGION 1..1511: note = Description of Artificial Sequence: Synthetic polypeptide
ATRRYYLGAVELSWDYMQSDLGELPVDARFPPRVPKSFPFNTSVVYKKTLFVEFTDHLFNIAKPRPPWMGLLGPTIQAEVYDTVVITLKNMASHPVSLHAVGVSYWKASEGAEYDDQTSQREKEDDKVFPGGSHTYVWQVLKENGPMASDPLCLTYSYLSHVDLVKDLNSGLIGALLVCREGSLAKEKTQTLHKFILLFAVFDEGKSWHSETKNSLMQDRDAASARAWPKMHTVNGYVNRSLPGLIGCHRKSVYWHVIGMGTTPEVHSIFLEGHTFLVRNHRQASLEISPITFLTAQTLLMDLGQFLLFCHISSHQHDGMEAYVKVDSCPEEPQLRMKNNEEAEDYDDDLTDSEMDVVRFDDDNSPSFIQIRSVAKKHPKTWVHYIAAEEEDWDYAPLVLAPDDRSYKSQYLNNGPQRIGRKYKKVRFMAYTDETFKTREAIQHESGILGPLLYGEVGDTLLIIFKNQASRPYNIYPHGITDVRPLYSRRLPKGVKHLKDFPILPGEIFKYKWTVTVEDGPTKSDPRCLTRYYSSFVNMERDLASGLIGPLLICYKESVDQRGNQIMSDKRNVILFSVFDENRSWYLTENIQRFLPNPAGVQLEDPEFQASNIMHSINGYVFDSLQLSVCLHEVAYWYILSIGAQTDFLSVFFSGYTFKHKMVYEDTLTLFPFSGETVFMSMENPGLWILGCHNSDFRNRGMTALLKVSSCDKNTGDYYEDSYEDISAYLLSKNNAIEPRSFSQNPPVLKRHQREITRTTLQSDQEEIDYDDTISVEMKKEDFDIYDEDENQSPRSFQKKTRHYFIAAVERLWDYGMSSSPHVLRNRAQSGSVPQFKKVVFQEFTDGSFTQPLYRGELNEHLGLLGPYIRAEVEDNIMVTFRNQASRPYSFYSSLISYEEDQRQGAEPRKNFVKPNETKTYFWKVQHHMAPTKGAPGSPAGSPTSTEEGTSESATPESGPGSEPATSGSETPASSDEFDCKAWAYFSDVDLEKDVHSGLIGPLLVCHTNTLNPAHGRQVTVQEFALFFTIFDETKSWYFTENMERNCRAPCNIQMEDPTFKENYRFHAINGYIMDTLPGLVMAQDQRIRWYLLSMGSNENIHSIHFSGHVFTVRKKEEYKMALYNLYPGVFETVEMLPSKAGIWRVECLIGEHLHAGMSTLFLVYSNKCQTPLGMASGHIRDFQITASGQYGQWAPKLARLHYSGSINAWSTKEPFSWIKVDLLAPMIIHGIKTQGARQKFSSLYISQFIIMYSLDGKKWQTYRGNSTGTLMVFFGNVDSSGIKHNIFNPPIIARYIRLHPTHYSIRSTLRMELMGCDLNSCSMPLGMESKAISDAQITASSYFTNMFATWSPSKARLHLQGRSNAWRPQVNNPKEWLQVDFQKTMKVTGVTTQGVKSLLTSMYVKEFLISSSQDGHQWTLFFQNGKVKVFQGNQDSFTPVVNSLDPPLLTRYLRIHPQSWVHQIALRMEVLGCEAQDLYGAGSPGAETAEQKLISEEDLSPATGHHHHHH

SEQ ID NO: 652 - DNA, 4536 bp, synthetic construct
  misc_feature 1..4536: note = Description of Artificial Sequence: Synthetic polynucleotide
  source 1..4536: mol_type = other DNA
gccaccagaagatactacctgggtgcagtggaactgtcatgggactatatgcaaagtgatctcggtgagctgcctgtggacgcaagatttcctcctagagtgccaaaatcttttccattcaacacctcagtcgtgtacaaaaagactctgtttgtagaattcacggatcaccttttcaacatcgctaagccaaggccaccctggatgggtctgctaggtcctaccatccaggctgaggtttatgatacagtggtcattacacttaagaacatggcttcccatcctgtcagtcttcatgctgttggtgtatcctactggaaagcttctgagggagctgaatatgatgatcagaccagtcaaagggagaaagaagatgataaagtcttccctggtggaagccatacatatgtctggcaggtcctgaaagagaatggtccaatggcctctgacccactgtgccttacctactcatatctttctcatgtggacctggtaaaagacttgaattcaggcctcattggagccctactagtatgtagagaagggagtctggccaaggaaaagacacagaccttgcacaaatttatactactttttgctgtatttgatgaagggaaaagttggcactcagaaacaaagaactccttgatgcaggatagggatgctgcatctgctcgggcctggcctaaaatgcacacagtcaatggttatgtaaacaggtctctgccaggtctgattggatgccacaggaaatcagtctattggcatgtgattggaatgggcaccactcctgaagtgcactcaatattcctcgaaggtcacacatttcttgtgaggaaccatcgccaggctagcttggaaatctcgccaataactttccttactgctcaaacactcttgatggaccttggacagtttctactgttttgtcatatctcttcccaccaacatgatggcatggaagcttatgtcaaagtagacagctgtccagaggaaccccaactacgaatgaaaaataatgaagaagcggaagactatgatgatgatcttactgattctgaaatggatgtggtcaggtttgatgatgacaactctccttcctttatccaaattcgctcagttgccaagaagcatcctaaaacttgggtacattacattgctgctgaagaggaggactgggactatgctcccttagtcctcgcccccgatgacagaagttataaaagtcaatatttgaacaatggccctcagcggattggtaggaagtacaaaaaagtccgatttatggcatacacagatgaaacctttaagactcgtgaagctattcagcatgaatcaggaatcttgggacctttactttatggggaagttggagacacactgttgattatatttaagaatcaagcaagcagaccatataacatctaccctcacggaatcactgatgtccgtcctttgtattcaaggagattaccaaaaggtgtaaaacatttgaaggattttccaattctgccaggagaaatattcaaatataaatggacagtgactgtagaagatgggccaactaaatcagatcctcggtgcctgacccgctattactctagtttcgttaatatggagagagatctagcttcaggactcattggccctctcctcatctgctacaaagaatctgtagatcaaagaggaaaccagataatgtcagacaagaggaatgtcatcctgttttctgtatttgatgagaaccgaagctggtacctcacagagaatatacaacgctttctccccaatccagctggagtgcagcttgaggatccagagttccaagcctccaacatcatgcacagcatcaatggctatgtttttgatagtttgcagttgtcagtttgtttgcatgaggtggcatactggtacattctaagcattggagcacagactgacttcctttctgtcttcttctctggatataccttcaaacacaaaatggtctatgaagacacactcaccctattcccattctcaggagaaactgtcttcatgtcgatggaaaacccaggtctatggattctggggtgccacaactcagactttcggaacagaggcatgaccgccttactgaaggtttctagttgtgacaagaacactggtgattattacgaggacagttatgaagatatttcagcatacttgctgagtaaaaacaatgccattgaaccaagaagcttctctcaaaacccaccagtcttgaaacgccatcaacgggaaataactcgtactactcttcagtcagatcaagaggaaatcgattatgatgataccatatcagttgaaatgaagaaggaagattttgacatttatgatgaggatgaaaatcagagcccccgcagctttcaaaagaaaacacgacactattttattgctgcagtggagaggctctgggattatgggatgagtagctccccacatgttctaagaaacagggctcagagtggcagtgtccctcagttcaagaaagttgttttccaggaatttactgatggctcctttactcagcccttataccgtggagaactaaatgaacatttgggactcctggggccatatataagagcagaagttgaagataatatcatggtaactttcagaaatcaggcctctcgtccctattccttctattctagccttatttcttatgaggaagatcagaggcaaggagcagaacctagaaaaaactttgtcaagcctaatgaaaccaaaacttacttttggaaagtgcaacatcatatggcacccactaaaggcgcgccaggttctcctgctggctcccccacctcaacagaagaggggacaagcgaaagcgctacgcctgagagtggccctggctctgagccagccacctccggctctgaaacccctgcctcgagcgatgagtttgactgcaaagcctgggcttatttctctgatgttgacctggaaaaagatgtgcactcaggcctgattggaccccttctggtctgccacactaacacactgaaccctgctcatgggagacaagtgacagtacaggaatttgctctgtttttcaccatctttgatgagaccaaaagctggtacttcactgaaaatatggaaagaaactgcagggctccctgcaatatccagatggaagatcccacttttaaagagaattatcgcttccatgcaatcaatggctacataatggatacactacctggcttagtaatggctcaggatcaaaggattcgatggtatctgctcagcatgggcagcaatgaaaacatccattctattcatttcagtggacatgtgttcactgtacgaaaaaaagaggagtataaaatggcactgtacaatctctatccaggtgtttttgagacagtggaaatgttaccatccaaagctggaatttggcgggtggaatgccttattggcgagcatctacatgctgggatgagcacactttttctggtgtacagcaataagtgtcagactcccctgggaatggcttctggacacattagagattttcagattacagcttcaggacaatatggacagtgggccccaaagctggccagacttcattattccggatcaatcaatgcctggagcaccaaggagcccttttcttggatcaaggtggatctgttggcaccaatgattattcacggcatcaagacccagggtgcccgtcagaagttctccagcctctacatctctcagtttatcatcatgtatagtcttgatgggaagaagtggcagacttatcgaggaaattccactggaaccttaatggtcttctttggcaatgtggattcatctgggataaaacacaatatttttaaccctccaattattgctcgatacatccgtttgcacccaactcattatagcattcgcagcactcttcgcatggagttgatgggctgtgatttaaatagttgcagcatgccattgggaatggagagtaaagcaatatcagatgcacagattactgcttcatcctactttaccaatatgtttgccacctggtctccttcaaaagctcgacttcacctccaagggaggagtaatgcctggagacctcaggtgaataatccaaaagagtggctgcaagtggacttccagaagacaatgaaagtcacaggagtaactactcagggagtaaaatctctgcttaccagcatgtatgtgaaggagttcctcatctccagcagtcaagatggccatcagtggactctcttttttcagaatggcaaagtaaaggtttttcagggaaatcaagactccttcacacctgtggtgaactctctagacccaccgttactgactcgctaccttcgaattcacccccagagttgggtgcaccagattgccctgaggatggaggttctgggctgcgaggcacaggacctctacggcgccggatcacctggggccgaaacggccgaacaaaaactcatctcagaagaggatctgtcacctgcaaccggtcatcatcaccatcaccattga

SEQ ID NO: 653 - protein, 1511 aa, synthetic construct
  REGION 1..1511: note = Description of Artificial Sequence: Synthetic polypeptide
ATRRYYLGAVELSWDYMQSDLGELPVDARFPPRVPKSFPFNTSVVYKKTLFVEFTDHLFNIAKPRPPWMGLLGPTIQAEVYDTVVITLKNMASHPVSLHAVGVSYWKASEGAEYDDQTSQREKEDDKVFPGGSHTYVWQVLKENGPMASDPLCLTYSYLSHVDLVKDLNSGLIGALLVCREGSLAKEKTQTLHKFILLFAVFDEGKSWHSETKNSLMQDRDAASARAWPKMHTVNGYVNRSLPGLIGCHRKSVYWHVIGMGTTPEVHSIFLEGHTFLVRNHRQASLEISPITFLTAQTLLMDLGQFLLFCHISSHQHDGMEAYVKVDSCPEEPQLRMKNNEEAEDYDDDLTDSEMDVVRFDDDNSPSFIQIRSVAKKHPKTWVHYIAAEEEDWDYAPLVLAPDDRSYKSQYLNNGPQRIGRKYKKVRFMAYTDETFKTREAIQHESGILGPLLYGEVGDTLLIIFKNQASRPYNIYPHGITDVRPLYSRRLPKGVKHLKDFPILPGEIFKYKWTVTVEDGPTKSDPRCLTRYYSSFVNMERDLASGLIGPLLICYKESVDQRGNQIMSDKRNVILFSVFDENRSWYLTENIQRFLPNPAGVQLEDPEFQASNIMHSINGYVFDSLQLSVCLHEVAYWYILSIGAQTDFLSVFFSGYTFKHKMVYEDTLTLFPFSGETVFMSMENPGLWILGCHNSDFRNRGMTALLKVSSCDKNTGDYYEDSYEDISAYLLSKNNAIEPRSFSQNPPVLKRHQREITRTTLQSDQEEIDYDDTISVEMKKEDFDIYDEDENQSPRSFQKKTRHYFIAAVERLWDYGMSSSPHVLRNRAQSGSVPQFKKVVFQEFTDGSFTQPLYRGELNEHLGLLGPYIRAEVEDNIMVTFRNQASRPYSFYSSLISYEEDQRQGAEPRKNFVKPNETKTYFWKVQHHMAPTKDEFDCKAWAYFSDVDLEKDVHSGLIGPLLVCHTNGAPGSPAGSPTSTEEGTSESATPESGPGSEPATSGSETPASSTLNPAHGRQVTVQEFALFFTIFDETKSWYFTENMERNCRAPCNIQMEDPTFKENYRFHAINGYIMDTLPGLVMAQDQRIRWYLLSMGSNENIHSIHFSGHVFTVRKKEEYKMALYNLYPGVFETVEMLPSKAGIWRVECLIGEHLHAGMSTLFLVYSNKCQTPLGMASGHIRDFQITASGQYGQWAPKLARLHYSGSINAWSTKEPFSWIKVDLLAPMIIHGIKTQGARQKFSSLYISQFIIMYSLDGKKWQTYRGNSTGTLMVFFGNVDSSGIKHNIFNPPIIARYIRLHPTHYSIRSTLRMELMGCDLNSCSMPLGMESKAISDAQITASSYFTNMFATWSPSKARLHLQGRSNAWRPQVNNPKEWLQVDFQKTMKVTGVTTQGVKSLLTSMYVKEFLISSSQDGHQWTLFFQNGKVKVFQGNQDSFTPVVNSLDPPLLTRYLRIHPQSWVHQIALRMEVLGCEAQDLYGAGSPGAETAEQKLISEEDLSPATGHHHHHH

SEQ ID NO: 654 - DNA, 4536 bp, synthetic construct
  misc_feature 1..4536: note = Description of Artificial Sequence: Synthetic polynucleotide
  source 1..4536: mol_type = other DNA
gccaccagaagatactacctgggtgcagtggaactgtcatgggactatatgcaaagtgatctcggtgagctgcctgtggacgcaagatttcctcctagagtgccaaaatcttttccattcaacacctcagtcgtgtacaaaaagactctgtttgtagaattcacggatcaccttttcaacatcgctaagccaaggccaccctggatgggtctgctaggtcctaccatccaggctgaggtttatgatacagtggtcattacacttaagaacatggcttcccatcctgtcagtcttcatgctgttggtgtatcctactggaaagcttctgagggagctgaatatgatgatcagaccagtcaaagggagaaagaagatgataaagtcttccctggtggaagccatacatatgtctggcaggtcctgaaagagaatggtccaatggcctctgacccactgtgccttacctactcatatctttctcatgtggacctggtaaaagacttgaattcaggcctcattggagccctactagtatgtagagaagggagtctggccaaggaaaagacacagaccttgcacaaatttatactactttttgctgtatttgatgaagggaaaagttggcactcagaaacaaagaactccttgatgcaggatagggatgctgcatctgctcgggcctggcctaaaatgcacacagtcaatggttatgtaaacaggtctctgccaggtctgattggatgccacaggaaatcagtctattggcatgtgattggaatgggcaccactcctgaagtgcactcaatattcctcgaaggtcacacatttcttgtgaggaaccatcgccaggctagcttggaaatctcgccaataactttccttactgctcaaacactcttgatggaccttggacagtttctactgttttgtcatatctcttcccaccaacatgatggcatggaagcttatgtcaaagtagacagctgtccagaggaaccccaactacgaatgaaaaataatgaagaagcggaagactatgatgatgatcttactgattctgaaatggatgtggtcaggtttgatgatgacaactctccttcctttatccaaattcgctcagttgccaagaagcatcctaaaacttgggtacattacattgctgctgaagaggaggactgggactatgctcccttagtcctcgcccccgatgacagaagttataaaagtcaatatttgaacaatggccctcagcggattggtaggaagtacaaaaaagtccgatttatggcatacacagatgaaacctttaagactcgtgaagctattcagcatgaatcaggaatcttgggacctttactttatggggaagttggagacacactgttgattatatttaagaatcaagcaagcagaccatataacatctaccctcacggaatcactgatgtccgtcctttgtattcaaggagattaccaaaaggtgtaaaacatttgaaggattttccaattctgccaggagaaatattcaaatataaatggacagtgactgtagaagatgggccaactaaatcagatcctcggtgcctgacccgctattactctagtttcgttaatatggagagagatctagcttcaggactcattggccctctcctcatctgctacaaagaatctgtagatcaaagaggaaaccagataatgtcagacaagaggaatgtcatcctgttttctgtatttgatgagaaccgaagctggtacctcacagagaatatacaacgctttctccccaatccagctggagtgcagcttgaggatccagagttccaagcctccaacatcatgcacagcatcaatggctatgtttttgatagtttgcagttgtcagtttgtttgcatgaggtggcatactggtacattctaagcattggagcacagactgacttcctttctgtcttcttctctggatataccttcaaacacaaaatggtctatgaagacacactcaccctattcccattctcaggagaaactgtcttcatgtcgatggaaaacccaggtctatggattctggggtgccacaactcagactttcggaacagaggcatgaccgccttactgaaggtttctagttgtgacaagaacactggtgattattacgaggacagttatgaagatatttcagcatacttgctgagtaaaaacaatgccattgaaccaagaagcttctctcaaaacccaccagtcttgaaacgccatcaacgggaaataactcgtactactcttcagtcagatcaagaggaaatcgattatgatgataccatatcagttgaaatgaagaaggaagattttgacatttatgatgaggatgaaaatcagagcccccgcagctttcaaaagaaaacacgacactattttattgctgcagtggagaggctctgggattatgggatgagtagctccccacatgttctaagaaacagggctcagagtggcagtgtccctcagttcaagaaagttgttttccaggaatttactgatggctcctttactcagcccttataccgtggagaactaaatgaacatttgggactcctggggccatatataagagcagaagttgaagataatatcatggtaactttcagaaatcaggcctctcgtccctattccttctattctagccttatttcttatgaggaagatcagaggcaaggagcagaacctagaaaaaactttgtcaagcctaatgaaaccaaaacttacttttggaaagtgcaacatcatatggcacccactaaagatgagtttgactgcaaagcctgggcttatttctctgatgttgacctggaaaaagatgtgcactcaggcctgattggaccccttctggtctgccacactaacggcgcgccaggttctcctgctggctcccccacctcaacagaagaggggacaagcgaaagcgctacgcctgagagtggccctggctctgagccagccacctccggctctgaaacccctgcctcgagcacactgaaccctgctcatgggagacaagtgacagtacaggaatttgctctgtttttcaccatctttgatgagaccaaaagctggtacttcactgaaaatatggaaagaaactgcagggctccctgcaatatccagatggaagatcccacttttaaagagaattatcgcttccatgcaatcaatggctacataatggatacactacctggcttagtaatggctcaggatcaaaggattcgatggtatctgctcagcatgggcagcaatgaaaacatccattctattcatttcagtggacatgtgttcactgtacgaaaaaaagaggagtataaaatggcactgtacaatctctatccaggtgtttttgagacagtggaaatgttaccatccaaagctggaatttggcgggtggaatgccttattggcgagcatctacatgctgggatgagcacactttttctggtgtacagcaataagtgtcagactcccctgggaatggcttctggacacattagagattttcagattacagcttcaggacaatatggacagtgggccccaaagctggccagacttcattattccggatcaatcaatgcctggagcaccaaggagcccttttcttggatcaaggtggatctgttggcaccaatgattattcacggcatcaagacccagggtgcccgtcagaagttctccagcctctacatctctcagtttatcatcatgtatagtcttgatgggaagaagtggcagacttatcgaggaaattccactggaaccttaatggtcttctttggcaatgtggattcatctgggataaaacacaatatttttaaccctccaattattgctcgatacatccgtttgcacccaactcattatagcattcgcagcactcttcgcatggagttgatgggctgtgatttaaatagttgcagcatgccattgggaatggagagtaaagcaatatcagatgcacagattactgcttcatcctactttaccaatatgtttgccacctggtctccttcaaaagctcgacttcacctccaagggaggagtaatgcctggagacctcaggtgaataatccaaaagagtggctgcaagtggacttccagaagacaatgaaagtcacaggagtaactactcagggagtaaaatctctgcttaccagcatgtatgtgaaggagttcctcatctccagcagtcaagatggccatcagtggactctcttttttcagaatggcaaagtaaaggtttttcagggaaatcaagactccttcacacctgtggtgaactctctagacccaccgttactgactcgctaccttcgaattcacccccagagttgggtgcaccagattgccctgaggatggaggttctgggctgcgaggcacaggacctctacggcgccggatcacctggggccgaaacggccgaacaaaaactcatctcagaagaggatctgtcacctgcaaccggtcatcatcaccatcaccattga

SEQ ID NO: 655 - protein, 1511 aa, synthetic construct
  REGION 1..1511: note = Description of Artificial Sequence: Synthetic polypeptide
ATRRYYLGAVELSWDYMQSDLGELPVDARFPPRVPKSFPFNTSVVYKKTLFVEFTDHLFNIAKPRPPWMGLLGPTIQAEVYDTVVITLKNMASHPVSLHAVGVSYWKASEGAEYDDQTSQREKEDDKVFPGGSHTYVWQVLKENGPMASDPLCLTYSYLSHVDLVKDLNSGLIGALLVCREGSLAKEKTQTLHKFILLFAVFDEGKSWHSETKNSLMQDRDAASARAWPKMHTVNGYVNRSLPGLIGCHRKSVYWHVIGMGTTPEVHSIFLEGHTFLVRNHRQASLEISPITFLTAQTLLMDLGQFLLFCHISSHQHDGMEAYVKVDSCPEEPQLRMKNNEEAEDYDDDLTDSEMDVVRFDDDNSPSFIQIRSVAKKHPKTWVHYIAAEEEDWDYAPLVLAPDDRSYKSQYLNNGPQRIGRKYKKVRFMAYTDETFKTREAIQHESGILGPLLYGEVGDTLLIIFKNQASRPYNIYPHGITDVRPLYSRRLPKGVKHLKDFPILPGEIFKYKWTVTVEDGPTKSDPRCLTRYYSSFVNMERDLASGLIGPLLICYKESVDQRGNQIMSDKRNVILFSVFDENRSWYLTENIQRFLPNPAGVQLEDPEFQASNIMHSINGYVFDSLQLSVCLHEVAYWYILSIGAQTDFLSVFFSGYTFKHKMVYEDTLTLFPFSGETVFMSMENPGLWILGCHNSDFRNRGMTALLKVSSCDKNTGDYYEDSYEDISAYLLSKNNAIEPRSFSQNPPVLKRHQREITRTTLQSDQEEIDYDDTISVEMKKEDFDIYDEDENQSPRSFQKKTRHYFIAAVERLWDYGMSSSPHVLRNRAQSGSVPQFKKVVFQEFTDGSFTQPLYRGELNEHLGLLGPYIRAEVEDNIMVTFRNQASRPYSFYSSLISYEEDQRQGAEPRKNFVKPNETKTYFWKVQHHMAPTKDEFDCKAWAYFSDVDLEKDVHSGLIGPLLVCHTNTLNPAHGRQVTVQEFALFFTIFDETKSWYFTENMEGAPGSPAGSPTSTEEGTSESATPESGPGSEPATSGSETPASSRNCRAPCNIQMEDPTFKENYRFHAINGYIMDTLPGLVMAQDQRIRWYLLSMGSNENIHSIHFSGHVFTVRKKEEYKMALYNLYPGVFETVEMLPSKAGIWRVECLIGEHLHAGMSTLFLVYSNKCQTPLGMASGHIRDFQITASGQYGQWAPKLARLHYSGSINAWSTKEPFSWIKVDLLAPMIIHGIKTQGARQKFSSLYISQFIIMYSLDGKKWQTYRGNSTGTLMVFFGNVDSSGIKHNIFNPPIIARYIRLHPTHYSIRSTLRMELMGCDLNSCSMPLGMESKAISDAQITASSYFTNMFATWSPSKARLHLQGRSNAWRPQVNNPKEWLQVDFQKTMKVTGVTTQGVKSLLTSMYVKEFLISSSQDGHQWTLFFQNGKVKVFQGNQDSFTPVVNSLDPPLLTRYLRIHPQSWVHQIALRMEVLGCEAQDLYGAGSPGAETAEQKLISEEDLSPATGHHHHHH

SEQ ID NO: 656 - DNA, 4536 bp, synthetic construct
  misc_feature 1..4536: note = Description of Artificial Sequence: Synthetic polynucleotide
  source 1..4536: mol_type = other DNA
gccaccagaagatactacctgggtgcagtggaactgtcatgggactatatgcaaagtgatctcggtgagctgcctgtggacgcaagatttcctcctagagtgccaaaatcttttccattcaacacctcagtcgtgtacaaaaagactctgtttgtagaattcacggatcaccttttcaacatcgctaagccaaggccaccctggatgggtctgctaggtcctaccatccaggctgaggtttatgatacagtggtcattacacttaagaacatggcttcccatcctgtcagtcttcatgctgttggtgtatcctactggaaagcttctgagggagctgaatatgatgatcagaccagtcaaagggagaaagaagatgataaagtcttccctggtggaagccatacatatgtctggcaggtcctgaaagagaatggtccaatggcctctgacccactgtgccttacctactcatatctttctcatgtggacctggtaaaagacttgaattcaggcctcattggagccctactagtatgtagagaagggagtctggccaaggaaaagacacagaccttgcacaaatttatactactttttgctgtatttgatgaagggaaaagttggcactcagaaacaaagaactccttgatgcaggatagggatgctgcatctgctcgggcctggcctaaaatgcacacagtcaatggttatgtaaacaggtctctgccaggtctgattggatgccacaggaaatcagtctattggcatgtgattggaatgggcaccactcctgaagtgcactcaatattcctcgaaggtcacacatttcttgtgaggaaccatcgccaggctagcttggaaatctcgccaataactttccttactgctcaaacactcttgatggaccttggacagtttctactgttttgtcatatctcttcccaccaacatgatggcatggaagcttatgtcaaagtagacagctgtccagaggaaccccaactacgaatgaaaaataatgaagaagcggaagactatgatgatgatcttactgattctgaaatggatgtggtcaggtttgatgatgacaactctccttcctttatccaaattcgctcagttgccaagaagcatcctaaaacttgggtacattacattgctgctgaagaggaggactgggactatgctcccttagtcctcgcccccgatgacagaagttataaaagtcaatatttgaacaatggccctcagcggattggtaggaagtacaaaaaagtccgatttatggcatacacagatgaaacctttaagactcgtgaagctattcagcatgaatcaggaatcttgggacctttactttatggggaagttggagacacactgttgattatatttaagaatcaagcaagcagaccatataacatctaccctcacggaatcactgatgtccgtcctttgtattcaaggagattaccaaaaggtgtaaaacatttgaaggattttccaattctgccaggagaaatattcaaatataaatggacagtgactgtagaagatgggccaactaaatcagatcctcggtgcctgacccgctattactctagtttcgttaatatggagagagatctagcttcaggactcattggccctctcctcatctgctacaaagaatctgtagatcaaagaggaaaccagataatgtcagacaagaggaatgtcatcctgttttctgtatttgatgagaaccgaagctggtacctcacagagaatatacaacgctttctccccaatccagctggagtgcagcttgaggatccagagttccaagcctccaacatcatgcacagcatcaatggctatgtttttgatagtttgcagttgtcagtttgtttgcatgaggtggcatactggtacattctaagcattggagcacagactgacttcctttctgtcttcttctctggatataccttcaaacacaaaatggtctatgaagacacactcaccctattcccattctcaggagaaactgtcttcatgtcgatggaaaacccaggtctatggattctggggtgccacaactcagactttcggaacagaggcatgaccgccttactgaaggtttctagttgtgacaagaacactggtgattattacgaggacagttatgaagatatttcagcatacttgctgagtaaaaacaatgccattgaaccaagaagcttctctcaaaacccaccagtcttgaaacgccatcaacgggaaataactcgtactactcttcagtcagatcaagaggaaatcgattatgatgataccatatcagttgaaatgaagaaggaagattttgacatttatgatgaggatgaaaatcagagcccccgcagctttcaaaagaaaacacgacactattttattgctgcagtggagaggctctgggattatgggatgagtagctccccacatgttctaagaaacagggctcagagtggcagtgtccctcagttcaagaaagttgttttccaggaatttactgatggctcctttactcagcccttataccgtggagaactaaatgaacatttgggactcctggggccatatataagagcagaagttgaagataatatcatggtaactttcagaaatcaggcctctcgtccctattccttctattctagccttatttcttatgaggaagatcagaggcaaggagcagaacctagaaaaaactttgtcaagcctaatgaaaccaaaacttacttttggaaagtgcaacatcatatggcacccactaaagatgagtttgactgcaaagcctgggcttatttctctgatgttgacctggaaaaagatgtgcactcaggcctgattggaccccttctggtctgccacactaacacactgaaccctgctcatgggagacaagtgacagtacaggaatttgctctgtttttcaccatctttgatgagaccaaaagctggtacttcactgaaaatatggaaggcgcgccaggttctcctgctggctcccccacctcaacagaagaggggacaagcgaaagcgctacgcctgagagtggccctggctctgagccagccacctccggctctgaaacccctgcctcgagcagaaactgcagggctccctgcaatatccagatggaagatcccacttttaaagagaattatcgcttccatgcaatcaatggctacataatggatacactacctggcttagtaatggctcaggatcaaaggattcgatggtatctgctcagcatgggcagcaatgaaaacatccattctattcatttcagtggacatgtgttcactgtacgaaaaaaagaggagtataaaatggcactgtacaatctctatccaggtgtttttgagacagtggaaatgttaccatccaaagctggaatttggcgggtggaatgccttattggcgagcatctacatgctgggatgagcacactttttctggtgtacagcaataagtgtcagactcccctgggaatggcttctggacacattagagattttcagattacagcttcaggacaatatggacagtgggccccaaagctggccagacttcattattccggatcaatcaatgcctggagcaccaaggagcccttttcttggatcaaggtggatctgttggcaccaatgattattcacggcatcaagacccagggtgcccgtcagaagttctccagcctctacatctctcagtttatcatcatgtatagtcttgatgggaagaagtggcagacttatcgaggaaattccactggaaccttaatggtcttctttggcaatgtggattcatctgggataaaacacaatatttttaaccctccaattattgctcgatacatccgtttgcacccaactcattatagcattcgcagcactcttcgcatggagttgatgggctgtgatttaaatagttgcagcatgccattgggaatggagagtaaagcaatatcagatgcacagattactgcttcatcctactttaccaatatgtttgccacctggtctccttcaaaagctcgacttcacctccaagggaggagtaatgcctggagacctcaggtgaataatccaaaagagtggctgcaagtggacttccagaagacaatgaaagtcacaggagtaactactcagggagtaaaatctctgcttaccagcatgtatgtgaaggagttcctcatctccagcagtcaagatggccatcagtggactctcttttttcagaatggcaaagtaaaggtttttcagggaaatcaagactccttcacacctgtggtgaactctctagacccaccgttactgactcgctaccttcgaattcacccccagagttgggtgcaccagattgccctgaggatggaggttctgggctgcgaggcacaggacctctacggcgccggatcacctggggccgaaacggccgaacaaaaactcatctcagaagaggatctgtcacctgcaaccggtcatcatcaccatcaccattga

SEQ ID NO: 657 - protein, 1511 aa, synthetic construct
  REGION 1..1511: note = Description of Artificial Sequence: Synthetic polypeptide
ATRRYYLGAVELSWDYMQSDLGELPVDARFPPRVPKSFPFNTSVVYKKTLFVEFTDHLFNIAKPRPPWMGLLGPTIQAEVYDTVVITLKNMASHPVSLHAVGVSYWKASEGAEYDDQTSQREKEDDKVFPGGSHTYVWQVLKENGPMASDPLCLTYSYLSHVDLVKDLNSGLIGALLVCREGSLAKEKTQTLHKFILLFAVFDEGKSWHSETKNSLMQDRDAASARAWPKMHTVNGYVNRSLPGLIGCHRKSVYWHVIGMGTTPEVHSIFLEGHTFLVRNHRQASLEISPITFLTAQTLLMDLGQFLLFCHISSHQHDGMEAYVKVDSCPEEPQLRMKNNEEAEDYDDDLTDSEMDVVRFDDDNSPSFIQIRSVAKKHPKTWVHYIAAEEEDWDYAPLVLAPDDRSYKSQYLNNGPQRIGRKYKKVRFMAYTDETFKTREAIQHESGILGPLLYGEVGDTLLIIFKNQASRPYNIYPHGITDVRPLYSRRLPKGVKHLKDFPILPGEIFKYKWTVTVEDGPTKSDPRCLTRYYSSFVNMERDLASGLIGPLLICYKESVDQRGNQIMSDKRNVILFSVFDENRSWYLTENIQRFLPNPAGVQLEDPEFQASNIMHSINGYVFDSLQLSVCLHEVAYWYILSIGAQTDFLSVFFSGYTFKHKMVYEDTLTLFPFSGETVFMSMENPGLWILGCHNSDFRNRGMTALLKVSSCDKNTGDYYEDSYEDISAYLLSKNNAIEPRSFSQNPPVLKRHQREITRTTLQSDQEEIDYDDTISVEMKKEDFDIYDEDENQSPRSFQKKTRHYFIAAVERLWDYGMSSSPHVLRNRAQSGSVPQFKKVVFQEFTDGSFTQPLYRGELNEHLGLLGPYIRAEVEDNIMVTFRNQASRPYSFYSSLISYEEDQRQGAEPRKNFVKPNETKTYFWKVQHHMAPTKDEFDCKAWAYFSDVDLEKDVHSGLIGPLLVCHTNTLNPAHGRQVTVQEFALFFTIFDETKSWYFTENMERNCRGAPGSPAGSPTSTEEGTSESATPESGPGSEPATSGSETPASSAPCNIQMEDPTFKENYRFHAINGYIMDTLPGLVMAQDQRIRWYLLSMGSNENIHSIHFSGHVFTVRKKEEYKMALYNLYPGVFETVEMLPSKAGIWRVECLIGEHLHAGMSTLFLVYSNKCQTPLGMASGHIRDFQITASGQYGQWAPKLARLHYSGSINAWSTKEPFSWIKVDLLAPMIIHGIKTQGARQKFSSLYISQFIIMYSLDGKKWQTYRGNSTGTLMVFFGNVDSSGIKHNIFNPPIIARYIRLHPTHYSIRSTLRMELMGCDLNSCSMPLGMESKAISDAQITASSYFTNMFATWSPSKARLHLQGRSNAWRPQVNNPKEWLQVDFQKTMKVTGVTTQGVKSLLTSMYVKEFLISSSQDGHQWTLFFQNGKVKVFQGNQDSFTPVVNSLDPPLLTRYLRIHPQSWVHQIALRMEVLGCEAQDLYGAGSPGAETAEQKLISEEDLSPATGHHHHHH

SEQ ID NO: 658 - DNA, 4536 bp, synthetic construct
  misc_feature 1..4536: note = Description of Artificial Sequence: Synthetic polynucleotide
  source 1..4536: mol_type = other DNA
gccaccagaagatactacctgggtgcagtggaactgtcatgggactatatgcaaagtgatctcggtgagctgcctgtggacgcaagatttcctcctagagtgccaaaatcttttccattcaacacctcagtcgtgtacaaaaagactctgtttgtagaattcacggatcaccttttcaacatcgctaagccaaggccaccctggatgggtctgctaggtcctaccatccaggctgaggtttatgatacagtggtcattacacttaagaacatggcttcccatcctgtcagtcttcatgctgttggtgtatcctactggaaagcttctgagggagctgaatatgatgatcagaccagtcaaagggagaaagaagatgataaagtcttccctggtggaagccatacatatgtctggcaggtcctgaaagagaatggtccaatggcctctgacccactgtgccttacctactcatatctttctcatgtggacctggtaaaagacttgaattcaggcctcattggagccctactagtatgtagagaagggagtctggccaaggaaaagacacagaccttgcacaaatttatactactttttgctgtatttgatgaagggaaaagttggcactcagaaacaaagaactccttgatgcaggatagggatgctgcatctgctcgggcctggcctaaaatgcacacagtcaatggttatgtaaacaggtctctgccaggtctgattggatgccacaggaaatcagtctattggcatgtgattggaatgggcaccactcctgaagtgcactcaatattcctcgaaggtcacacatttcttgtgaggaaccatcgccaggctagcttggaaatctcgccaataactttccttactgctcaaacactcttgatggaccttggacagtttctactgttttgtcatatctcttcccaccaacatgatggcatggaagcttatgtcaaagtagacagctgtccagaggaaccccaactacgaatgaaaaataatgaagaagcggaagactatgatgatgatcttactgattctgaaatggatgtggtcaggtttgatgatgacaactctccttcctttatccaaattcgctcagttgccaagaagcatcctaaaacttgggtacattacattgctgctgaagaggaggactgggactatgctcccttagtcctcgcccccgatgacagaagttataaaagtcaatatttgaacaatggccctcagcggattggtaggaagtacaaaaaagtccgatttatggcatacacagatgaaacctttaagactcgtgaagctattcagcatgaatcaggaatcttgggacctttactttatggggaagttggagacacactgttgattatatttaagaatcaagcaagcagaccatataacatctaccctcacggaatcactgatgtccgtcctttgtattcaaggagattaccaaaaggtgtaaaacatttgaaggattttccaattctgccaggagaaatattcaaatataaatggacagtgactgtagaagatgggccaactaaatcagatcctcggtgcctgacccgctattactctagtttcgttaatatggagagagatctagcttcaggactcattggccctctcctcatctgctacaaagaatctgtagatcaaagaggaaaccagataatgtcagacaagaggaatgtcatcctgttttctgtatttgatgagaaccgaagctggtacctcacagagaatatacaacgctttctccccaatccagctggagtgcagcttgaggatccagagttccaagcctccaacatcatgcacagcatcaatggctatgtttttgatagtttgcagttgtcagtttgtttgcatgaggtggcatactggtacattctaagcattggagcacagactgacttcctttctgtcttcttctctggatataccttcaaacacaaaatggtctatgaagacacactcaccctattcccattctcaggagaaactgtcttcatgtcgatggaaaacccaggtctatggattctggggtgccacaactcagactttcggaacagaggcatgaccgccttactgaaggtttctagttgtgacaagaacactggtgattattacgaggacagttatgaagatatttcagcatacttgctgagtaaaaacaatgccattgaaccaagaagcttctctcaaaacccaccagtcttgaaacgccatcaacgggaaataactcgtactactcttcagtcagatcaagaggaaatcgattatgatgataccatatcagttgaaatgaagaaggaagattttgacatttatgatgaggatgaaaatcagagcccccgcagctttcaaaagaaaacacgacactattttattgctgcagtggagaggctctgggattatgggatgagtagctccccacatgttctaagaaacagggctcagagtggcagtgtccctcagttcaagaaagttgttttccaggaatttactgatggctcctttactcagcccttataccgtggagaactaaatgaacatttgggactcctggggccatatataagagcagaagttgaagataatatcatggtaactttcagaaatcaggcctctcgtccctattccttctattctagccttatttcttatgaggaagatcagaggcaaggagcagaacctagaaaaaactttgtcaagcctaatgaaaccaaaacttacttttggaaagtgcaacatcatatggcacccactaaagatgagtttgactgcaaagcctgggcttatttctctgatgttgacctggaaaaagatgtgcactcaggcctgattggaccccttctggtctgccacactaacacactgaaccctgctcatgggagacaagtgacagtacaggaatttgctctgtttttcaccatctttgatgagaccaaaagctggtacttcactgaaaatatggaaagaaactgcaggggcgcgccaggttctcctgctggctcccccacctcaacagaagaggggacaagcgaaagcgctacgcctgagagtggccctggctctgagccagccacctccggctctgaaacccctgcctcgagcgctccctgcaatatccagatggaagatcccacttttaaagagaattatcgcttccatgcaatcaatggctacataatggatacactacctggcttagtaatggctcaggatcaaaggattcgatggtatctgctcagcatgggcagcaatgaaaacatccattctattcatttcagtggacatgtgttcactgtacgaaaaaaagaggagtataaaatggcactgtacaatctctatccaggtgtttttgagacagtggaaatgttaccatccaaagctggaatttggcgggtggaatgccttattggcgagcatctacatgctgggatgagcacactttttctggtgtacagcaataagtgtcagactcccctgggaatggcttctggacacattagagattttcagattacagcttcaggacaatatggacagtgggccccaaagctggccagacttcattattccggatcaatcaatgcctggagcaccaaggagcccttttcttggatcaaggtggatctgttggcaccaatgattattcacggcatcaagacccagggtgcccgtcagaagttctccagcctctacatctctcagtttatcatcatgtatagtcttgatgggaagaagtggcagacttatcgaggaaattccactggaaccttaatggtcttctttggcaatgtggattcatctgggataaaacacaatatttttaaccctccaattattgctcgatacatccgtttgcacccaactcattatagcattcgcagcactcttcgcatggagttgatgggctgtgatttaaatagttgcagcatgccattgggaatggagagtaaagcaatatcagatgcacagattactgcttcatcctactttaccaatatgtttgccacctggtctccttcaaaagctcgacttcacctccaagggaggagtaatgcctggagacctcaggtgaataatccaaaagagtggctgcaagtggacttccagaagacaatgaaagtcacaggagtaactactcagggagtaaaatctctgcttaccagcatgtatgtgaaggagttcctcatctccagcagtcaagatggccatcagtggactctcttttttcagaatggcaaagtaaaggtttttcagggaaatcaagactccttcacacctgtggtgaactctctagacccaccgttactgactcgctaccttcgaattcacccccagagttgggtgcaccagattgccctgaggatggaggttctgggctgcgaggcacaggacctctacggcgccggatcacctggggccgaaacggccgaacaaaaactcatctcagaagaggatctgtcacctgcaaccggtcatcatcaccatcaccattga

SEQ ID NO: 659 - protein, 1511 aa, synthetic construct
  REGION 1..1511: note = Description of Artificial Sequence: Synthetic polypeptide
ATRRYYLGAVELSWDYMQSDLGELPVDARFPPRVPKSFPFNTSVVYKKTLFVEFTDHLFNIAKPRPPWMGLLGPTIQAEVYDTVVITLKNMASHPVSLHAVGVSYWKASEGAEYDDQTSQREKEDDKVFPGGSHTYVWQVLKENGPMASDPLCLTYSYLSHVDLVKDLNSGLIGALLVCREGSLAKEKTQTLHKFILLFAVFDEGKSWHSETKNSLMQDRDAASARAWPKMHTVNGYVNRSLPGLIGCHRKSVYWHVIGMGTTPEVHSIFLEGHTFLVRNHRQASLEISPITFLTAQTLLMDLGQFLLFCHISSHQHDGMEAYVKVDSCPEEPQLRMKNNEEAEDYDDDLTDSEMDVVRFDDDNSPSFIQIRSVAKKHPKTWVHYIAAEEEDWDYAPLVLAPDDRSYKSQYLNNGPQRIGRKYKKVRFMAYTDETFKTREAIQHESGILGPLLYGEVGDTLLIIFKNQASRPYNIYPHGITDVRPLYSRRLPKGVKHLKDFPILPGEIFKYKWTVTVEDGPTKSDPRCLTRYYSSFVNMERDLASGLIGPLLICYKESVDQRGNQIMSDKRNVILFSVFDENRSWYLTENIQRFLPNPAGVQLEDPEFQASNIMHSINGYVFDSLQLSVCLHEVAYWYILSIGAQTDFLSVFFSGYTFKHKMVYEDTLTLFPFSGETVFMSMENPGLWILGCHNSDFRNRGMTALLKVSSCDKNTGDYYEDSYEDISAYLLSKNNAIEPRSFSQNPPVLKRHQREITRTTLQSDQEEIDYDDTISVEMKKEDFDIYDEDENQSPRSFQKKTRHYFIAAVERLWDYGMSSSPHVLRNRAQSGSVPQFKKVVFQEFTDGSFTQPLYRGELNEHLGLLGPYIRAEVEDNIMVTFRNQASRPYSFYSSLISYEEDQRQGAEPRKNFVKPNETKTYFWKVQHHMAPTKDEFDCKAWAYFSDVDLEKDVHSGLIGPLLVCHTNTLNPAHGRQVTVQEFALFFTIFDETKSWYFTENMERNCRAPCNGAPGSPAGSPTSTEEGTSESATPESGPGSEPATSGSETPASSIQMEDPTFKENYRFHAINGYIMDTLPGLVMAQDQRIRWYLLSMGSNENIHSIHFSGHVFTVRKKEEYKMALYNLYPGVFETVEMLPSKAGIWRVECLIGEHLHAGMSTLFLVYSNKCQTPLGMASGHIRDFQITASGQYGQWAPKLARLHYSGSINAWSTKEPFSWIKVDLLAPMIIHGIKTQGARQKFSSLYISQFIIMYSLDGKKWQTYRGNSTGTLMVFFGNVDSSGIKHNIFNPPIIARYIRLHPTHYSIRSTLRMELMGCDLNSCSMPLGMESKAISDAQITASSYFTNMFATWSPSKARLHLQGRSNAWRPQVNNPKEWLQVDFQKTMKVTGVTTQGVKSLLTSMYVKEFLISSSQDGHQWTLFFQNGKVKVFQGNQDSFTPVVNSLDPPLLTRYLRIHPQSWVHQIALRMEVLGCEAQDLYGAGSPGAETAEQKLISEEDLSPATGHHHHHH

SEQ ID NO: 660 - DNA, 4536 bp, synthetic construct
  misc_feature 1..4536: note = Description of Artificial Sequence: Synthetic polynucleotide
  source 1..4536: mol_type = other DNA
gccaccagaagatactacctgggtgcagtggaactgtcatgggactatatgcaaagtgatctcggtgagctgcctgtggacgcaagatttcctcctagagtgccaaaatcttttccattcaacacctcagtcgtgtacaaaaagactctgtttgtagaattcacggatcaccttttcaacatcgctaagccaaggccaccctggatgggtctgctaggtcctaccatccaggctgaggtttatgatacagtggtcattacacttaagaacatggcttcccatcctgtcagtcttcatgctgttggtgtatcctactggaaagcttctgagggagctgaatatgatgatcagaccagtcaaagggagaaagaagatgataaagtcttccctggtggaagccatacatatgtctggcaggtcctgaaagagaatggtccaatggcctctgacccactgtgccttacctactcatatctttctcatgtggacctggtaaaagacttgaattcaggcctcattggagccctactagtatgtagagaagggagtctggccaaggaaaagacacagaccttgcacaaatttatactactttttgctgtatttgatgaagggaaaagttggcactcagaaacaaagaactccttgatgcaggatagggatgctgcatctgctcgggcctggcctaaaatgcacacagtcaatggttatgtaaacaggtctctgccaggtctgattggatgccacaggaaatcagtctattggcatgtgattggaatgggcaccactcctgaagtgcactcaatattcctcgaaggtcacacatttcttgtgaggaaccatcgccaggctagcttggaaatctcgccaataactttccttactgctcaaacactcttgatggaccttggacagtttctactgttttgtcatatctcttcccaccaacatgatggcatggaagcttatgtcaaagtagacagctgtccagaggaaccccaactacgaatgaaaaataatgaagaagcggaagactatgatgatgatcttactgattctgaaatggatgtggtcaggtttgatgatgacaactctccttcctttatccaaattcgctcagttgccaagaagcatcctaaaacttgggtacattacattgctgctgaagaggaggactgggactatgctcccttagtcctcgcccccgatgacagaagttataaaagtcaatatttgaacaatggccctcagcggattggtaggaagtacaaaaaagtccgatttatggcatacacagatgaaacctttaagactcgtgaagctattcagcatgaatcaggaatcttgggacctttactttatggggaagttggagacacactgttgattatatttaagaatcaagcaagcagaccatataacatctaccctcacggaatcactgatgtccgtcctttgtattcaaggagattaccaaaaggtgtaaaacatttgaaggattttccaattctgccaggagaaatattcaaatataaatggacagtgactgtagaagatgggccaactaaatcagatcctcggtgcctgacccgctattactctagtttcgttaatatggagagagatctagcttcaggactcattggccctctcctcatctgctacaaagaatctgtagatcaaagaggaaaccagataatgtcagacaagaggaatgtcatcctgttttctgtatttgatgagaaccgaagctggtacctcacagagaatatacaacgctttctccccaatccagctggagtgcagcttgaggatccagagttccaagcctccaacatcatgcacagcatcaatggctatgtttttgatagtttgcagttgtcagtttgtttgcatgaggtggcatactggtacattctaagcattggagcacagactgacttcctttctgtcttcttctctggatataccttcaaacacaaaatggtctatgaagacacactcaccctattcccattctcaggagaaactgtcttcatgtcgatggaaaacccaggtctatggattctggggtgccacaactcagactttcggaacagaggcatgaccgccttactgaaggtttctagttgtgacaagaacactggtgattattacgaggacagttatgaagatatttcagcatacttgctgagtaaaaacaatgccattgaaccaagaagcttctctcaaaacccaccagtcttgaaacgccatcaacgggaaataactcgtactactcttcagtcagatcaagaggaaatcgattatgatgataccatatcagttgaaatgaagaaggaagattttgacatttatgatgaggatgaaaatcagagcccccgcagctttcaaaagaaaacacgacactattttattgctgcagtggagaggctctgggattatgggatgagtagctccccacatgttctaagaaacagggctcagagtggcagtgtccctcagttcaagaaagttgttttccaggaatttactgatggctcctttactcagcccttataccgtggagaactaaatgaacatttgggactcctggggccatatataagagcagaagttgaagataatatcatggtaactttcagaaatcaggcctctcgtccctattccttctattctagccttatttcttatgaggaagatcagaggcaaggagcagaacctagaaaaaactttgtcaagcctaatgaaaccaaaacttacttttggaaagtgcaacatcatatggcacccactaaagatgagtttgactgcaaagcctgggcttatttctctgatgttgacctggaaaaagatgtgcactcaggcctgattggaccccttctggtctgccacactaacacactgaaccctgctcatgggagacaagtgacagtacaggaatttgctctgtttttcaccatctttgatgagaccaaaagctggtacttcactgaaaatatggaaagaaactgcagggctccctgcaatggcgcgccaggttctcctgctggctcccccacctcaacagaagaggggacaagcgaaagcgctacgcctgagagtggccctggctctgagccagccacctccggctctgaaacccctgcctcgagcatccagatggaagatcccacttttaaagagaattatcgcttccatgcaatcaatggctacataatggatacactacctggcttagtaatggctcaggatcaaaggattcgatggtatctgctcagcatgggcagcaatgaaaacatccattctattcatttcagtggacatgtgttcactgtacgaaaaaaagaggagtataaaatggcactgtacaatctctatccaggtgtttttgagacagtggaaatgttaccatccaaagctggaatttggcgggtggaatgccttattggcgagcatctacatgctgggatgagcacactttttctggtgtacagcaataagtgtcagactcccctgggaatggcttctggacacattagagattttcagattacagcttcaggacaatatggacagtgggccccaaagctggccagacttcattattccggatcaatcaatgcctggagcaccaaggagcccttttcttggatcaaggtggatctgttggcaccaatgattattcacggcatcaagacccagggtgcccgtcagaagttctccagcctctacatctctcagtttatcatcatgtatagtcttgatgggaagaagtggcagacttatcgaggaaattccactggaaccttaatggtcttctttggcaatgtggattcatctgggataaaacacaatatttttaaccctccaattattgctcgatacatccgtttgcacccaactcattatagcattcgcagcactcttcgcatggagttgatgggctgtgatttaaatagttgcagcatgccattgggaatggagagtaaagcaatatcagatgcacagattactgcttcatcctactttaccaatatgtttgccacctggtctccttcaaaagctcgacttcacctccaagggaggagtaatgcctggagacctcaggtgaataatccaaaagagtggctgcaagtggacttccagaagacaatgaaagtcacaggagtaactactcagggagtaaaatctctgcttaccagcatgtatgtgaaggagttcctcatctccagcagtcaagatggccatcagtggactctcttttttcagaatggcaaagtaaaggtttttcagggaaatcaagactccttcacacctgtggtgaactctctagacccaccgttactgactcgctaccttcgaattcacccccagagttgggtgcaccagattgccctgaggatggaggttctgggctgcgaggcacaggacctctacggcgccggatcacctggggccgaaacggccgaacaaaaactcatctcagaagaggatctgtcacctgcaaccggtcatcatcaccatcaccattga

SEQ ID NO: 661 - protein, 1511 aa, synthetic construct
  REGION 1..1511: note = Description of Artificial Sequence: Synthetic polypeptide
ATRRYYLGAVELSWDYMQSDLGELPVDARFPPRVPKSFPFNTSVVYKKTLFVEFTDHLFNIAKPRPPWMGLLGPTIQAEVYDTVVITLKNMASHPVSLHAVGVSYWKASEGAEYDDQTSQREKEDDKVFPGGSHTYVWQVLKENGPMASDPLCLTYSYLSHVDLVKDLNSGLIGALLVCREGSLAKEKTQTLHKFILLFAVFDEGKSWHSETKNSLMQDRDAASARAWPKMHTVNGYVNRSLPGLIGCHRKSVYWHVIGMGTTPEVHSIFLEGHTFLVRNHRQASLEISPITFLTAQTLLMDLGQFLLFCHISSHQHDGMEAYVKVDSCPEEPQLRMKNNEEAEDYDDDLTDSEMDVVRFDDDNSPSFIQIRSVAKKHPKTWVHYIAAEEEDWDYAPLVLAPDDRSYKSQYLNNGPQRIGRKYKKVRFMAYTDETFKTREAIQHESGILGPLLYGEVGDTLLIIFKNQASRPYNIYPHGITDVRPLYSRRLPKGVKHLKDFPILPGEIFKYKWTVTVEDGPTKSDPRCLTRYYSSFVNMERDLASGLIGPLLICYKESVDQRGNQIMSDKRNVILFSVFDENRSWYLTENIQRFLPNPAGVQLEDPEFQASNIMHSINGYVFDSLQLSVCLHEVAYWYILSIGAQTDFLSVFFSGYTFKHKMVYEDTLTLFPFSGETVFMSMENPGLWILGCHNSDFRNRGMTALLKVSSCDKNTGDYYEDSYEDISAYLLSKNNAIEPRSFSQNPPVLKRHQREITRTTLQSDQEEIDYDDTISVEMKKEDFDIYDEDENQSPRSFQKKTRHYFIAAVERLWDYGMSSSPHVLRNRAQSGSVPQFKKVVFQEFTDGSFTQPLYRGELNEHLGLLGPYIRAEVEDNIMVTFRNQASRPYSFYSSLISYEEDQRQGAEPRKNFVKPNETKTYFWKVQHHMAPTKDEFDCKAWAYFSDVDLEKDVHSGLIGPLLVCHTNTLNPAHGRQVTVQEFALFFTIFDETKSWYFTENMERNCRAPCNIQMEDPTFKENYRFHAINGYIMDTLPGLVMAQDGAPGSPAGSPTSTEEGTSESATPESGPGSEPATSGSETPASSQRIRWYLLSMGSNENIHSIHFSGHVFTVRKKEEYKMALYNLYPGVFETVEMLPSKAGIWRVECLIGEHLHAGMSTLFLVYSNKCQTPLGMASGHIRDFQITASGQYGQWAPKLARLHYSGSINAWSTKEPFSWIKVDLLAPMIIHGIKTQGARQKFSSLYISQFIIMYSLDGKKWQTYRGNSTGTLMVFFGNVDSSGIKHNIFNPPIIARYIRLHPTHYSIRSTLRMELMGCDLNSCSMPLGMESKAISDAQITASSYFTNMFATWSPSKARLHLQGRSNAWRPQVNNPKEWLQVDFQKTMKVTGVTTQGVKSLLTSMYVKEFLISSSQDGHQWTLFFQNGKVKVFQGNQDSFTPVVNSLDPPLLTRYLRIHPQSWVHQIALRMEVLGCEAQDLYGAGSPGAETAEQKLISEEDLSPATGHHHHHH

SEQ ID NO: 662 - DNA, 4536 bp, synthetic construct
  misc_feature 1..4536: note = Description of Artificial Sequence: Synthetic polynucleotide
  source 1..4536: mol_type = other DNA
gccaccagaagatactacctgggtgcagtggaactgtcatgggactatatgcaaagtgatctcggtgagctgcctgtggacgcaagatttcctcctagagtgccaaaatcttttccattcaacacctcagtcgtgtacaaaaagactctgtttgtagaattcacggatcaccttttcaacatcgctaagccaaggccaccctggatgggtctgctaggtcctaccatccaggctgaggtttatgatacagtggtcattacacttaagaacatggcttcccatcctgtcagtcttcatgctgttggtgtatcctactggaaagcttctgagggagctgaatatgatgatcagaccagtcaaagggagaaagaagatgataaagtcttccctggtggaagccatacatatgtctggcaggtcctgaaagagaatggtccaatggcctctgacccactgtgccttacctactcatatctttctcatgtggacctggtaaaagacttgaattcaggcctcattggagccctactagtatgtagagaagggagtctggccaaggaaaagacacagaccttgcacaaatttatactactttttgctgtatttgatgaagggaaaagttggcactcagaaacaaagaactccttgatgcaggatagggatgctgcatctgctcgggcctggcctaaaatgcacacagtcaatggttatgtaaacaggtctctgccaggtctgattggatgccacaggaaatcagtctattggcatgtgattggaatgggcaccactcctgaagtgcactcaatattcctcgaaggtcacacatttcttgtgaggaaccatcgccaggctagcttggaaatctcgccaataactttccttactgctcaaacactcttgatggaccttggacagtttctactgttttgtcatatctcttcccaccaacatgatggcatggaagcttatgtcaaagtagacagctgtccagaggaaccccaactacgaatgaaaaataatgaagaagcggaagactatgatgatgatcttactgattctgaaatggatgtggtcaggtttgatgatgacaactctccttcctttatccaaattcgctcagttgccaagaagcatcctaaaacttgggtacattacattgctgctgaagaggaggactgggactatgctcccttagtcctcgcccccgatgacagaagttataaaagtcaatatttgaacaatggccctcagcggattggtaggaagtacaaaaaagtccgatttatggcatacacagatgaaacctttaagactcgtgaagctattcagcatgaatcaggaatcttgggacctttactttatggggaagttggagacacactgttgattatatttaagaatcaagcaagcagaccatataacatctaccctcacggaatcactgatgtccgtcctttgtattcaaggagattaccaaaaggtgtaaaacatttgaaggattttccaattctgccaggagaaatattcaaatataaatggacagtgactgtagaagatgggccaactaaatcagatcctcggtgcctgacccgctattactctagtttcgttaatatggagagagatctagcttcaggactcattggccctctcctcatctgctacaaagaatctgtagatcaaagaggaaaccagataatgtcagacaagaggaatgtcatcctgttttctgtatttgatgagaaccgaagctggtacctcacagagaatatacaacgctttctccccaatccagctggagtgcagcttgaggatccagagttccaagcctccaacatcatgcacagcatcaatggctatgtttttgatagtttgcagttgtcagtttgtttgcatgaggtggcatactggtacattctaagcattggagcacagactgacttcctttctgtcttcttctctggatataccttcaaacacaaaatggtctatgaagacacactcaccctattcccattctcaggagaaactgtcttcatgtcgatggaaaacccaggtctatggattctggggtgccacaactcagactttcggaacagaggcatgaccgccttactgaaggtttctagttgtgacaagaacactggtgattattacgaggacagttatgaagatatttcagcatacttgctgagtaaaaacaatgccattgaaccaagaagcttctctcaaaacccaccagtcttgaaacgccatcaacgggaaataactcgtactactcttcagtcagatcaagaggaaatcgattatgatgataccatatcagttgaaatgaagaaggaagattttgacatttatgatgaggatgaaaatcagagcccccgcagctttcaaaagaaaacacgacactattttattgctgcagtggagaggctctgggattatgggatgagtagctccccacatgttctaagaaacagggctcagagtggcagtgtccctcagttcaagaaagttgttttccaggaatttactgatggctcctttactcagcccttataccgtggagaactaaatgaacatttgggactcctggggccatatataagagcagaagttgaagataatatcatggtaactttcagaaatcaggcctctcgtccctattccttctattctagccttatttcttatgaggaagatcagaggcaaggagcagaacctagaaaaaactttgtcaagcctaatgaaaccaaaacttacttttggaaagtgcaacatcatatggcacccactaaagatgagtttgactgcaaagcctgggcttatttctctgatgttgacctggaaaaagatgtgcactcaggcctgattggaccccttctggtctgccacactaacacactgaaccctgctcatgggagacaagtgacagtacaggaatttgctctgtttttcaccatctttgatgagaccaaaagctggtacttcactgaaaatatggaaagaaactgcagggctccctgcaatatccagatggaagatcccacttttaaagagaattatcgcttccatgcaatcaatggctacataatggatacactacctggcttagtaatggctcaggatggcgcgccaggttctcctgctggctcccccacctcaacagaagaggggacaagcgaaagcgctacgcctgagagtggccctggctctgagccagccacctccggctctgaaacccctgcctcgagccaaaggattcgatggtatctgctcagcatgggcagcaatgaaaacatccattctattcatttcagtggacatgtgttcactgtacgaaaaaaagaggagtataaaatggcactgtacaatctctatccaggtgtttttgagacagtggaaatgttaccatccaaagctggaatttggcgggtggaatgccttattggcgagcatctacatgctgggatgagcacactttttctggtgtacagcaataagtgtcagactcccctgggaatggcttctggacacattagagattttcagattacagcttcaggacaatatggacagtgggccccaaagctggccagacttcattattccggatcaatcaatgcctggagcaccaaggagcccttttcttggatcaaggtggatctgttggcaccaatgattattcacggcatcaagacccagggtgcccgtcagaagttctccagcctctacatctctcagtttatcatcatgtatagtcttgatgggaagaagtggcagacttatcgaggaaattccactggaaccttaatggtcttctttggcaatgtggattcatctgggataaaacacaatatttttaaccctccaattattgctcgatacatccgtttgcacccaactcattatagcattcgcagcactcttcgcatggagttgatgggctgtgatttaaatagttgcagcatgccattgggaatggagagtaaagcaatatcagatgcacagattactgcttcatcctactttaccaatatgtttgccacctggtctccttcaaaagctcgacttcacctccaagggaggagtaatgcctggagacctcaggtgaataatccaaaagagtggctgcaagtggacttccagaagacaatgaaagtcacaggagtaactactcagggagtaaaatctctgcttaccagcatgtatgtgaaggagttcctcatctccagcagtcaagatggccatcagtggactctcttttttcagaatggcaaagtaaaggtttttcagggaaatcaagactccttcacacctgtggtgaactctctagacccaccgttactgactcgctaccttcgaattcacccccagagttgggtgcaccagattgccctgaggatggaggttctgggctgcgaggcacaggacctctacggcgccggatcacctggggccgaaacggccgaacaaaaactcatctcagaagaggatctgtcacctgcaaccggtcatcatcaccatcaccattga

SEQ ID NO: 663 - protein, 1511 aa, synthetic construct
  REGION 1..1511: note = Description of Artificial Sequence: Synthetic polypeptide
ATRRYYLGAVELSWDYMQSDLGELPVDARFPPRVPKSFPFNTSVVYKKTLFVEFTDHLFNIAKPRPPWMGLLGPTIQAEVYDTVVITLKNMASHPVSLHAVGVSYWKASEGAEYDDQTSQREKEDDKVFPGGSHTYVWQVLKENGPMASDPLCLTYSYLSHVDLVKDLNSGLIGALLVCREGSLAKEKTQTLHKFILLFAVFDEGKSWHSETKNSLMQDRDAASARAWPKMHTVNGYVNRSLPGLIGCHRKSVYWHVIGMGTTPEVHSIFLEGHTFLVRNHRQASLEISPITFLTAQTLLMDLGQFLLFCHISSHQHDGMEAYVKVDSCPEEPQLRMKNNEEAEDYDDDLTDSEMDVVRFDDDNSPSFIQIRSVAKKHPKTWVHYIAAEEEDWDYAPLVLAPDDRSYKSQYLNNGPQRIGRKYKKVRFMAYTDETFKTREAIQHESGILGPLLYGEVGDTLLIIFKNQASRPYNIYPHGITDVRPLYSRRLPKGVKHLKDFPILPGEIFKYKWTVTVEDGPTKSDPRCLTRYYSSFVNMERDLASGLIGPLLICYKESVDQRGNQIMSDKRNVILFSVFDENRSWYLTENIQRFLPNPAGVQLEDPEFQASNIMHSINGYVFDSLQLSVCLHEVAYWYILSIGAQTDFLSVFFSGYTFKHKMVYEDTLTLFPFSGETVFMSMENPGLWILGCHNSDFRNRGMTALLKVSSCDKNTGDYYEDSYEDISAYLLSKNNAIEPRSFSQNPPVLKRHQREITRTTLQSDQEEIDYDDTISVEMKKEDFDIYDEDENQSPRSFQKKTRHYFIAAVERLWDYGMSSSPHVLRNRAQSGSVPQFKKVVFQEFTDGSFTQPLYRGELNEHLGLLGPYIRAEVEDNIMVTFRNQASRPYSFYSSLISYEEDQRQGAEPRKNFVKPNETKTYFWKVQHHMAPTKDEFDCKAWAYFSDVDLEKDVHSGLIGPLLVCHTNTLNPAHGRQVTVQEFALFFTIFDETKSWYFTENMERNCRAPCNIQMEDPTFKENYRFHAINGYIMDTLPGLVMAQDQRIRWYLLSMGSNENIHSIHFSGHVFTVRKKEEYKMALYNLYPGVFETVEMLPSKAGIWRVECLIGEHLHAGMSTLFLVYSNGAPGSPAGSPTSTEEGTSESATPESGPGSEPATSGSETPASSKCQTPLGMASGHIRDFQITASGQYGQWAPKLARLHYSGSINAWSTKEPFSWIKVDLLAPMIIHGIKTQGARQKFSSLYISQFIIMYSLDGKKWQTYRGNSTGTLMVFFGNVDSSGIKHNIFNPPIIARYIRLHPTHYSIRSTLRMELMGCDLNSCSMPLGMESKAISDAQITASSYFTNMFATWSPSKARLHLQGRSNAWRPQVNNPKEWLQVDFQKTMKVTGVTTQGVKSLLTSMYVKEFLISSSQDGHQWTLFFQNGKVKVFQGNQDSFTPVVNSLDPPLLTRYLRIHPQSWVHQIALRMEVLGCEAQDLYGAGSPGAETAEQKLISEEDLSPATGHHHHHH

SEQ ID NO: 664 - DNA, 4536 bp, synthetic construct
  misc_feature 1..4536: note = Description of Artificial Sequence: Synthetic polynucleotide
  source 1..4536: mol_type = other DNA
gccaccagaagatactacctgggtgcagtggaactgtcatgggactatatgcaaagtgatctcggtgagctgcctgtggacgcaagatttcctcctagagtgccaaaatcttttccattcaacacctcagtcgtgtacaaaaagactctgtttgtagaattcacggatcaccttttcaacatcgctaagccaaggccaccctggatgggtctgctaggtcctaccatccaggctgaggtttatgatacagtggtcattacacttaagaacatggcttcccatcctgtcagtcttcatgctgttggtgtatcctactggaaagcttctgagggagctgaatatgatgatcagaccagtcaaagggagaaagaagatgataaagtcttccctggtggaagccatacatatgtctggcaggtcctgaaagagaatggtccaatggcctctgacccactgtgccttacctactcatatctttctcatgtggacctggtaaaagacttgaattcaggcctcattggagccctactagtatgtagagaagggagtctggccaaggaaaagacacagaccttgcacaaatttatactactttttgctgtatttgatgaagggaaaagttggcactcagaaacaaagaactccttgatgcaggatagggatgctgcatctgctcgggcctggcctaaaatgcacacagtcaatggttatgtaaacaggtctctgccaggtctgattggatgccacaggaaatcagtctattggcatgtgattggaatgggcaccactcctgaagtgcactcaatattcctcgaaggtcacacatttcttgtgaggaaccatcgccaggctagcttggaaatctcgccaataactttccttactgctcaaacactcttgatggaccttggacagtttctactgttttgtcatatctcttcccaccaacatgatggcatggaagcttatgtcaaagtagacagctgtccagaggaaccccaactacgaatgaaaaataatgaagaagcggaagactatgatgatgatcttactgattctgaaatggatgtggtcaggtttgatgatgacaactctccttcctttatccaaattcgctcagttgccaagaagcatcctaaaacttgggtacattacattgctgctgaagaggaggactgggactatgctcccttagtcctcgcccccgatgacagaagttataaaagtcaatatttgaacaatggccctcagcggattggtaggaagtacaaaaaagtccgatttatggcatacacagatgaaacctttaagactcgtgaagctattcagcatgaatcaggaatcttgggacctttactttatggggaagttggagacacactgttgattatatttaagaatcaagcaagcagaccatataacatctaccctcacggaatcactgatgtccgtcctttgtattcaaggagattaccaaaaggtgtaaaacatttgaaggattttccaattctgccaggagaaatattcaaatataaatggacagtgactgtagaagatgggccaactaaatcagatcctcggtgcctgacccgctattactctagtttcgttaatatggagagagatctagcttcaggactcattggccctctcctcatctgctacaaagaatctgtagatcaaagaggaaaccagataatgtcagacaagaggaatgtcatcctgttttctgtatttgatgagaaccgaagctggtacctcacagagaatatacaacgctttctccccaatccagctggagtgcagcttgaggatccagagttccaagcctccaacatcatgcacagcatcaatggctatgtttttgatagtttgcagttgtcagtttgtttgcatgaggtggcatactggtacattctaagcattggagcacagactgacttcctttctgtcttcttctctggatataccttcaaacacaaaatggtctatgaagacacactcaccctattcccattctcaggagaaactgtcttcatgtcgatggaaaacccaggtctatggattctggggtgccacaactcagactttcggaacagaggcatgaccgccttactgaaggtttctagttgtgacaagaacactggtgattattacgaggacagttatgaagatatttcagcatacttgctgagtaaaaacaatgccattgaaccaagaagcttctctcaaaacccaccagtcttgaaacgccatcaacgggaaataactcgtactactcttcagtcagatcaagaggaaatcgattatgatgataccatatcagttgaaatgaagaaggaagattttgacatttatgatgaggatgaaaatcagagcccccgcagctttcaaaagaaaacacgacactattttattgctgcagtggagaggctctgggattatgggatgagtagctccccacatgttctaagaaacagggctcagagtggcagtgtccctcagttcaagaaagttgttttccaggaatttactgatggctcctttactcagcccttataccgtggagaactaaatgaacatttgggactcctggggccatatataagagcagaagttgaagataatatcatggtaactttcagaaatcaggcctctcgtccctattccttctattctagccttatttcttatgaggaagatcagaggcaaggagcagaacctagaaaaaactttgtcaagcctaatgaaaccaaaacttacttttggaaagtgcaacatcatatggcacccactaaagatgagtttgactgcaaagcctgggcttatttctctgatgttgacctggaaaaagatgtgcactcaggcctgattggaccccttctggtctgccacactaacacactgaaccctgctcatgggagacaagtgacagtacaggaatttgctctgtttttcaccatctttgatgagaccaaaagctggtacttcactgaaaatatggaaagaaactgcagggctccctgcaatatccagatggaagatcccacttttaaagagaattatcgcttccatgcaatcaatggctacataatggatacactacctggcttagtaatggctcaggatcaaaggattcgatggtatctgctcagcatgggcagcaatgaaaacatccattctattcatttcagtggacatgtgttcactgtacgaaaaaaagaggagtataaaatggcactgtacaatctctatccaggtgtttttgagacagtggaaatgttaccatccaaagctggaatttggcgggtggaatgccttattggcgagcatctacatgctgggatgagcacactttttctggtgtacagcaatggcgcgccaggttctcctgctggctcccccacctcaacagaagaggggacaagcgaaagcgctacgcctgagagtggccctggctctgagccagccacctccggctctgaaacccctgcctcgagcaagtgtcagactcccctgggaatggcttctggacacattagagattttcagattacagcttcaggacaatatggacagtgggccccaaagctggccagacttcattattccggatcaatcaatgcctggagcaccaaggagcccttttcttggatcaaggtggatctgttggcaccaatgattattcacggcatcaagacccagggtgcccgtcagaagttctccagcctctacatctctcagtttatcatcatgtatagtcttgatgggaagaagtggcagacttatcgaggaaattccactggaaccttaatggtcttctttggcaatgtggattcatctgggataaaacacaatatttttaaccctccaattattgctcgatacatccgtttgcacccaactcattatagcattcgcagcactcttcgcatggagttgatgggctgtgatttaaatagttgcagcatgccattgggaatggagagtaaagcaatatcagatgcacagattactgcttcatcctactttaccaatatgtttgccacctggtctccttcaaaagctcgacttcacctccaagggaggagtaatgcctggagacctcaggtgaataatccaaaagagtggctgcaagtggacttccagaagacaatgaaagtcacaggagtaactactcagggagtaaaatctctgcttaccagcatgtatgtgaaggagttcctcatctccagcagtcaagatggccatcagtggactctcttttttcagaatggcaaagtaaaggtttttcagggaaatcaagactccttcacacctgtggtgaactctctagacccaccgttactgactcgctaccttcgaattcacccccagagttgggtgcaccagattgccctgaggatggaggttctgggctgcgaggcacaggacctctacggcgccggatcacctggggccgaaacggccgaacaaaaactcatctcagaagaggatctgtcacctgcaaccggtcatcatcaccatcaccattga

SEQ ID NO: 665 - protein, 1511 aa, synthetic construct
  REGION 1..1511: note = Description of Artificial Sequence: Synthetic polypeptide
ATRRYYLGAVELSWDYMQSDLGELPVDARFPPRVPKSFPFNTSVVYKKTLFVEFTDHLFNIAKPRPPWMGLLGPTIQAEVYDTVVITLKNMASHPVSLHAVGVSYWKASEGAEYDDQTSQREKEDDKVFPGGSHTYVWQVLKENGPMASDPLCLTYSYLSHVDLVKDLNSGLIGALLVCREGSLAKEKTQTLHKFILLFAVFDEGKSWHSETKNSLMQDRDAASARAWPKMHTVNGYVNRSLPGLIGCHRKSVYWHVIGMGTTPEVHSIFLEGHTFLVRNHRQASLEISPITFLTAQTLLMDLGQFLLFCHISSHQHDGMEAYVKVDSCPEEPQLRMKNNEEAEDYDDDLTDSEMDVVRFDDDNSPSFIQIRSVAKKHPKTWVHYIAAEEEDWDYAPLVLAPDDRSYKSQYLNNGPQRIGRKYKKVRFMAYTDETFKTREAIQHESGILGPLLYGEVGDTLLIIFKNQASRPYNIYPHGITDVRPLYSRRLPKGVKHLKDFPILPGEIFKYKWTVTVEDGPTKSDPRCLTRYYSSFVNMERDLASGLIGPLLICYKESVDQRGNQIMSDKRNVILFSVFDENRSWYLTENIQRFLPNPAGVQLEDPEFQASNIMHSINGYVFDSLQLSVCLHEVAYWYILSIGAQTDFLSVFFSGYTFKHKMVYEDTLTLFPFSGETVFMSMENPGLWILGCHNSDFRNRGMTALLKVSSCDKNTGDYYEDSYEDISAYLLSKNNAIEPRSFSQNPPVLKRHQREITRTTLQSDQEEIDYDDTISVEMKKEDFDIYDEDENQSPRSFQKKTRHYFIAAVERLWDYGMSSSPHVLRNRAQSGSVPQFKKVVFQEFTDGSFTQPLYRGELNEHLGLLGPYIRAEVEDNIMVTFRNQASRPYSFYSSLISYEEDQRQGAEPRKNFVKPNETKTYFWKVQHHMAPTKDEFDCKAWAYFSDVDLEKDVHSGLIGPLLVCHTNTLNPAHGRQVTVQEFALFFTIFDETKSWYFTENMERNCRAPCNIQMEDPTFKENYRFHAINGYIMDTLPGLVMAQDQRIRWYLLSMGSNENIHSIHFSGHVFTVRKKEEYKMALYNLYPGVFETVEMLPSKAGIWRVECLIGEHLHAGMSTLFLVYSNKCQTPLGMASGHIRDFQITASGQYGQWAPKLARLHYSGSINAWSTKEPFGAPGSPAGSPTSTEEGTSESATPESGPGSEPATSGSETPASSSWIKVDLLAPMIIHGIKTQGARQKFSSLYISQFIIMYSLDGKKWQTYRGNSTGTLMVFFGNVDSSGIKHNIFNPPIIARYIRLHPTHYSIRSTLRMELMGCDLNSCSMPLGMESKAISDAQITASSYFTNMFATWSPSKARLHLQGRSNAWRPQVNNPKEWLQVDFQKTMKVTGVTTQGVKSLLTSMYVKEFLISSSQDGHQWTLFFQNGKVKVFQGNQDSFTPVVNSLDPPLLTRYLRIHPQSWVHQIALRMEVLGCEAQDLYGAGSPGAETAEQKLISEEDLSPATGHHHHHH

SEQ ID NO: 666 - DNA, 4536 bp, synthetic construct
  misc_feature 1..4536: note = Description of Artificial Sequence: Synthetic polynucleotide
  source 1..4536: mol_type = other DNA
gccaccagaagatactacctgggtgcagtggaactgtcatgggactatatgcaaagtgatctcggtgagctgcctgtggacgcaagatttcctcctagagtgccaaaatcttttccattcaacacctcagtcgtgtacaaaaagactctgtttgtagaattcacggatcaccttttcaacatcgctaagccaaggccaccctggatgggtctgctaggtcctaccatccaggctgaggtttatgatacagtggtcattacacttaagaacatggcttcccatcctgtcagtcttcatgctgttggtgtatcctactggaaagcttctgagggagctgaatatgatgatcagaccagtcaaagggagaaagaagatgataaagtcttccctggtggaagccatacatatgtctggcaggtcctgaaagagaatggtccaatggcctctgacccactgtgccttacctactcatatctttctcatgtggacctggtaaaagacttgaattcaggcctcattggagccctactagtatgtagagaagggagtctggccaaggaaaagacacagaccttgcacaaatttatactactttttgctgtatttgatgaagggaaaagttggcactcagaaacaaagaactccttgatgcaggatagggatgctgcatctgctcgggcctggcctaaaatgcacacagtcaatggttatgtaaacaggtctctgccaggtctgattggatgccacaggaaatcagtctattggcatgtgattggaatgggcaccactcctgaagtgcactcaatattcctcgaaggtcacacatttcttgtgaggaaccatcgccaggctagcttggaaatctcgccaataactttccttactgctcaaacactcttgatggaccttggacagtttctactgttttgtcatatctcttcccaccaacatgatggcatggaagcttatgtcaaagtagacagctgtccagaggaaccccaactacgaatgaaaaataatgaagaagcggaagactatgatgatgatcttactgattctgaaatggatgtggtcaggtttgatgatgacaactctccttcctttatccaaattcgctcagttgccaagaagcatcctaaaacttgggtacattacattgctgctgaagaggaggactgggactatgctcccttagtcctcgcccccgatgacagaagttataaaagtcaatatttgaacaatggccctcagcggattggtaggaagtacaaaaaagtccgatttatggcatacacagatgaaacctttaagactcgtgaagctattcagcatgaatcaggaatcttgggacctttactttatggggaagttggagacacactgttgattatatttaagaatcaagcaagcagaccatataacatctaccctcacggaatcactgatgtccgtcctttgtattcaaggagattaccaaaaggtgtaaaacatttgaaggattttccaattctgccaggagaaatattcaaatataaatggacagtgactgtagaagatgggccaactaaatcagatcctcggtgcctgacccgctattactctagtttcgttaatatggagagagatctagcttcaggactcattggccctctcctcatctgctacaaagaatctgtagatcaaagaggaaaccagataatgtcagacaagaggaatgtcatcctgttttctgtatttgatgagaaccgaagctggtacctcacagagaatatacaacgctttctccccaatccagctggagtgcagcttgaggatccagagttccaagcctccaacatcatgcacagcatcaatggctatgtttttgatagtttgcagttgtcagtttgtttgcatgaggtggcatactggtacattctaagcattggagcacagactgacttcctttctgtcttcttctctggatataccttcaaacacaaaatggtctatgaagacacactcaccctattcccattctcaggagaaactgtcttcatgtcgatggaaaacccaggtctatggattctggggtgccacaactcagactttcggaacagaggcatgaccgccttactgaaggtttctagttgtgacaagaacactggtgattattacgaggacagttatgaagatatttcagcatacttgctgagtaaaaacaatgccattgaaccaagaagcttctctcaaaacccaccagtcttgaaacgccatcaacgggaaataactcgtactactcttcagtcagatcaagaggaaatcgattatgatgataccatatcagttgaaatgaagaaggaagattttgacatttatgatgaggatgaaaatcagagcccccgcagctttcaaaagaaaacacgacactattttattgctgcagtggagaggctctgggattatgggatgagtagctccccacatgttctaagaaacagggctcagagtggcagtgtccctcagttcaagaaagttgttttccaggaatttactgatggctcctttactcagcccttataccgtggagaactaaatgaacatttgggactcctggggccatatataagagcagaagttgaagataatatcatggtaactttcagaaatcaggcctctcgtccctattccttctattctagccttatttcttatgaggaagatcagaggcaaggagcagaacctagaaaaaactttgtcaagcctaatgaaaccaaaacttacttttggaaagtgcaacatcatatggcacccactaaagatgagtttgactgcaaagcctgggcttatttctctgatgttgacctggaaaaagatgtgcactcaggcctgattggaccccttctggtctgccacactaacacactgaaccctgctcatgggagacaagtgacagtacaggaatttgctctgtttttcaccatctttgatgagaccaaaagctggtacttcactgaaaatatggaaagaaactgcagggctccctgcaatatccagatggaagatcccacttttaaagagaattatcgcttccatgcaatcaatggctacataatggatacactacctggcttagtaatggctcaggatcaaaggattcgatggtatctgctcagcatgggcagcaatgaaaacatccattctattcatttcagtggacatgtgttcactgtacgaaaaaaagaggagtataaaatggcactgtacaatctctatccaggtgtttttgagacagtggaaatgttaccatccaaagctggaatttggcgggtggaatgccttattggcgagcatctacatgctgggatgagcacactttttctggtgtacagcaataagtgtcagactcccctgggaatggcttctggacacattagagattttcagattacagcttcaggacaatatggacagtgggccccaaagctggccagacttcattattccggatcaatcaatgcctggagcaccaaggagccctttggcgcgccaggttctcctgctggctcccccacctcaacagaagaggggacaagcgaaagcgctacgcctgagagtggccctggctctgagccagccacctccggctctgaaacccctgcctcgagctcttggatcaaggtggatctgttggcaccaatgattattcacggcatcaagacccagggtgcccgtcagaagttctccagcctctacatctctcagtttatcatcatgtatagtcttgatgggaagaagtggcagacttatcgaggaaattccactggaaccttaatggtcttctttggcaatgtggattcatctgggataaaacacaatatttttaaccctccaattattgctcgatacatccgtttgcacccaactcattatagcattcgcagcactcttcgcatggagttgatgggctgtgatttaaatagttgcagcatgccattgggaatggagagtaaagcaatatcagatgcacagattactgcttcatcctactttaccaatatgtttgccacctggtctccttcaaaagctcgacttcacctccaagggaggagtaatgcctggagacctcaggtgaataatccaaaagagtggctgcaagtggacttccagaagacaatgaaagtcacaggagtaactactcagggagtaaaatctctgcttaccagcatgtatgtgaaggagttcctcatctccagcagtcaagatggccatcagtggactctcttttttcagaatggcaaagtaaaggtttttcagggaaatcaagactccttcacacctgtggtgaactctctagacccaccgttactgactcgctaccttcgaattcacccccagagttgggtgcaccagattgccctgaggatggaggttctgggctgcgaggcacaggacctctacggcgccggatcacctggggccgaaacggccgaacaaaaactcatctcagaagaggatctgtcacctgcaaccggtcatcatcaccatcaccattga

SEQ ID NO: 667 - protein, 1511 aa, synthetic construct
  REGION 1..1511: note = Description of Artificial Sequence: Synthetic polypeptide
ATRRYYLGAVELSWDYMQSDLGELPVDARFPPRVPKSFPFNTSVVYKKTLFVEFTDHLFNIAKPRPPWMGLLGPTIQAEVYDTVVITLKNMASHPVSLHAVGVSYWKASEGAEYDDQTSQREKEDDKVFPGGSHTYVWQVLKENGPMASDPLCLTYSYLSHVDLVKDLNSGLIGALLVCREGSLAKEKTQTLHKFILLFAVFDEGKSWHSETKNSLMQDRDAASARAWPKMHTVNGYVNRSLPGLIGCHRKSVYWHVIGMGTTPEVHSIFLEGHTFLVRNHRQASLEISPITFLTAQTLLMDLGQFLLFCHISSHQHDGMEAYVKVDSCPEEPQLRMKNNEEAEDYDDDLTDSEMDVVRFDDDNSPSFIQIRSVAKKHPKTWVHYIAAEEEDWDYAPLVLAPDDRSYKSQYLNNGPQRIGRKYKKVRFMAYTDETFKTREAIQHESGILGPLLYGEVGDTLLIIFKNQASRPYNIYPHGITDVRPLYSRRLPKGVKHLKDFPILPGEIFKYKWTVTVEDGPTKSDPRCLTRYYSSFVNMERDLASGLIGPLLICYKESVDQRGNQIMSDKRNVILFSVFDENRSWYLTENIQRFLPNPAGVQLEDPEFQASNIMHSINGYVFDSLQLSVCLHEVAYWYILSIGAQTDFLSVFFSGYTFKHKMVYEDTLTLFPFSGETVFMSMENPGLWILGCHNSDFRNRGMTALLKVSSCDKNTGDYYEDSYEDISAYLLSKNNAIEPRSFSQNPPVLKRHQREITRTTLQSDQEEIDYDDTISVEMKKEDFDIYDEDENQSPRSFQKKTRHYFIAAVERLWDYGMSSSPHVLRNRAQSGSVPQFKKVVFQEFTDGSFTQPLYRGELNEHLGLLGPYIRAEVEDNIMVTFRNQASRPYSFYSSLISYEEDQRQGAEPRKNFVKPNETKTYFWKVQHHMAPTKDEFDCKAWAYFSDVDLEKDVHSGLIGPLLVCHTNTLNPAHGRQVTVQEFALFFTIFDETKSWYFTENMERNCRAPCNIQMEDPTFKENYRFHAINGYIMDTLPGLVMAQDQRIRWYLLSMGSNENIHSIHFSGHVFTVRKKEEYKMALYNLYPGVFETVEMLPSKAGIWRVECLIGEHLHAGMSTLFLVYSNKCQTPLGMASGHIRDFQITASGQYGQWAPKLARLHYSGSINAWSTKEPFSWIKVDLLAPMIIHGIKTQGARQKFSSLYISQFIIMYSLDGKKGAPGSPAGSPTSTEEGTSESATPESGPGSEPATSGSETPASSWQTYRGNSTGTLMVFFGNVDSSGIKHNIFNPPIIARYIRLHPTHYSIRSTLRMELMGCDLNSCSMPLGMESKAISDAQITASSYFTNMFATWSPSKARLHLQGRSNAWRPQVNNPKEWLQVDFQKTMKVTGVTTQGVKSLLTSMYVKEFLISSSQDGHQWTLFFQNGKVKVFQGNQDSFTPVVNSLDPPLLTRYLRIHPQSWVHQIALRMEVLGCEAQDLYGAGSPGAETAEQKLISEEDLSPATGHHHHHH

SEQ ID NO: 668 - DNA, 4536 bp, synthetic construct
  misc_feature 1..4536: note = Description of Artificial Sequence: Synthetic polynucleotide
  source 1..4536: mol_type = other DNA
gccaccagaagatactacctgggtgcagtggaactgtcatgggactatatgcaaagtgatctcggtgagctgcctgtggacgcaagatttcctcctagagtgccaaaatcttttccattcaacacctcagtcgtgtacaaaaagactctgtttgtagaattcacggatcaccttttcaacatcgctaagccaaggccaccctggatgggtctgctaggtcctaccatccaggctgaggtttatgatacagtggtcattacacttaagaacatggcttcccatcctgtcagtcttcatgctgttggtgtatcctactggaaagcttctgagggagctgaatatgatgatcagaccagtcaaagggagaaagaagatgataaagtcttccctggtggaagccatacatatgtctggcaggtcctgaaagagaatggtccaatggcctctgacccactgtgccttacctactcatatctttctcatgtggacctggtaaaagacttgaattcaggcctcattggagccctactagtatgtagagaagggagtctggccaaggaaaagacacagaccttgcacaaatttatactactttttgctgtatttgatgaagggaaaagttggcactcagaaacaaagaactccttgatgcaggatagggatgctgcatctgctcgggcctggcctaaaatgcacacagtcaatggttatgtaaacaggtctctgccaggtctgattggatgccacaggaaatcagtctattggcatgtgattggaatgggcaccactcctgaagtgcactcaatattcctcgaaggtcacacatttcttgtgaggaaccatcgccaggctagcttggaaatctcgccaataactttccttactgctcaaacactcttgatggaccttggacagtttctactgttttgtcatatctcttcccaccaacatgatggcatggaagcttatgtcaaagtagacagctgtccagaggaaccccaactacgaatgaaaaataatgaagaagcggaagactatgatgatgatcttactgattctgaaatggatgtggtcaggtttgatgatgacaactctccttcctttatccaaattcgctcagttgccaagaagcatcctaaaacttgggtacattacattgctgctgaagaggaggactgggactatgctcccttagtcctcgcccccgatgacagaagttataaaagtcaatatttgaacaatggccctcagcggattggtaggaagtacaaaaaagtccgatttatggcatacacagatgaaacctttaagactcgtgaagctattcagcatgaatcaggaatcttgggacctttactttatggggaagttggagacacactgttgattatatttaagaatcaagcaagcagaccatataacatctaccctcacggaatcactgatgtccgtcctttgtattcaaggagattaccaaaaggtgtaaaacatttgaaggattttccaattctgccaggagaaatattcaaatataaatggacagtgactgtagaagatgggccaactaaatcagatcctcggtgcctgacccgctattactctagtttcgttaatatggagagagatctagcttcaggactcattggccctctcctcatctgctacaaagaatctgtagatcaaagaggaaaccagataatgtcagacaagaggaatgtcatcctgttttctgtatttgatgagaaccgaagctggtacctcacagagaatatacaacgctttctccccaatccagctggagtgcagcttgaggatccagagttccaagcctccaacatcatgcacagcatcaatggctatgtttttgatagtttgcagttgtcagtttgtttgcatgaggtggcatactggtacattctaagcattggagcacagactgacttcctttctgtcttcttctctggatataccttcaaacacaaaatggtctatgaagacacactcaccctattcccattctcaggagaaactgtcttcatgtcgatggaaaacccaggtctatggattctggggtgccacaactcagactttcggaacagaggcatgaccgccttactgaaggtttctagttgtgacaagaacactggtgattattacgaggacagttatgaagatatttcagcatacttgctgagtaaaaacaatgccattgaaccaagaagcttctctcaaaacccaccagtcttgaaacgccatcaacgggaaataactcgtactactcttcagtcagatcaagaggaaatcgattatgatgataccatatcagttgaaatgaagaaggaagattttgacatttatgatgaggatgaaaatcagagcccccgcagctttcaaaagaaaacacgacactattttattgctgcagtggagaggctctgggattatgggatgagtagctccccacatgttctaagaaacagggctcagagtggcagtgtccctcagttcaagaaagttgttttccaggaatttactgatggctcctttactcagcccttataccgtggagaactaaatgaacatttgggactcctggggccatatataagagcagaagttgaagataatatcatggtaactttcagaaatcaggcctctcgtccctattccttctattctagccttatttcttatgaggaagatcagaggcaaggagcagaacctagaaaaaactttgtcaagcctaatgaaaccaaaacttacttttggaaagtgcaacatcatatggcacccactaaagatgagtttgactgcaaagcctgggcttatttctctgatgttgacctggaaaaagatgtgcactcaggcctgattggaccccttctggtctgccacactaacacactgaaccctgctcatgggagacaagtgacagtacaggaatttgctctgtttttcaccatctttgatgagaccaaaagctggtacttcactgaaaatatggaaagaaactgcagggctccctgcaatatccagatggaagatcccacttttaaagagaattatcgcttccatgcaatcaatggctacataatggatacactacctggcttagtaatggctcaggatcaaaggattcgatggtatctgctcagcatgggcagcaatgaaaacatccattctattcatttcagtggacatgtgttcactgtacgaaaaaaagaggagtataaaatggcactgtacaatctctatccaggtgtttttgagacagtggaaatgttaccatccaaagctggaatttggcgggtggaatgccttattggcgagcatctacatgctgggatgagcacactttttctggtgtacagcaataagtgtcagactcccctgggaatggcttctggacacattagagattttcagattacagcttcaggacaatatggacagtgggccccaaagctggccagacttcattattccggatcaatcaatgcctggagcaccaaggagcccttttcttggatcaaggtggatctgttggcaccaatgattattcacggcatcaagacccagggtgcccgtcagaagttctccagcctctacatctctcagtttatcatcatgtatagtcttgatgggaagaagggcgcgccaggttctcctgctggctcccccacctcaacagaagaggggacaagcgaaagcgctacgcctgagagtggccctggctctgagccagccacctccggctctgaaacccctgcctcgagctggcagacttatcgaggaaattccactggaaccttaatggtcttctttggcaatgtggattcatctgggataaaacacaatatttttaaccctccaattattgctcgatacatccgtttgcacccaactcattatagcattcgcagcactcttcgcatggagttgatgggctgtgatttaaatagttgcagcatgccattgggaatggagagtaaagcaatatcagatgcacagattactgcttcatcctactttaccaatatgtttgccacctggtctccttcaaaagctcgacttcacctccaagggaggagtaatgcctggagacctcaggtgaataatccaaaagagtggctgcaagtggacttccagaagacaatgaaagtcacaggagtaactactcagggagtaaaatctctgcttaccagcatgtatgtgaaggagttcctcatctccagcagtcaagatggccatcagtggactctcttttttcagaatggcaaagtaaaggtttttcagggaaatcaagactccttcacacctgtggtgaactctctagacccaccgttactgactcgctaccttcgaattcacccccagagttgggtgcaccagattgccctgaggatggaggttctgggctgcgaggcacaggacctctacggcgccggatcacctggggccgaaacggccgaacaaaaactcatctcagaagaggatctgtcacctgcaaccggtcatcatcaccatcaccattga

SEQ ID NO: 669 - protein, 1511 aa, synthetic construct
  REGION 1..1511: note = Description of Artificial Sequence: Synthetic polypeptide
ATRRYYLGAVELSWDYMQSDLGELPVDARFPPRVPKSFPFNTSVVYKKTLFVEFTDHLFNIAKPRPPWMGLLGPTIQAEVYDTVVITLKNMASHPVSLHAVGVSYWKASEGAEYDDQTSQREKEDDKVFPGGSHTYVWQVLKENGPMASDPLCLTYSYLSHVDLVKDLNSGLIGALLVCREGSLAKEKTQTLHKFILLFAVFDEGKSWHSETKNSLMQDRDAASARAWPKMHTVNGYVNRSLPGLIGCHRKSVYWHVIGMGTTPEVHSIFLEGHTFLVRNHRQASLEISPITFLTAQTLLMDLGQFLLFCHISSHQHDGMEAYVKVDSCPEEPQLRMKNNEEAEDYDDDLTDSEMDVVRFDDDNSPSFIQIRSVAKKHPKTWVHYIAAEEEDWDYAPLVLAPDDRSYKSQYLNNGPQRIGRKYKKVRFMAYTDETFKTREAIQHESGILGPLLYGEVGDTLLIIFKNQASRPYNIYPHGITDVRPLYSRRLPKGVKHLKDFPILPGEIFKYKWTVTVEDGPTKSDPRCLTRYYSSFVNMERDLASGLIGPLLICYKESVDQRGNQIMSDKRNVILFSVFDENRSWYLTENIQRFLPNPAGVQLEDPEFQASNIMHSINGYVFDSLQLSVCLHEVAYWYILSIGAQTDFLSVFFSGYTFKHKMVYEDTLTLFPFSGETVFMSMENPGLWILGCHNSDFRNRGMTALLKVSSCDKNTGDYYEDSYEDISAYLLSKNNAIEPRSFSQNPPVLKRHQREITRTTLQSDQEEIDYDDTISVEMKKEDFDIYDEDENQSPRSFQKKTRHYFIAAVERLWDYGMSSSPHVLRNRAQSGSVPQFKKVVFQEFTDGSFTQPLYRGELNEHLGLLGPYIRAEVEDNIMVTFRNQASRPYSFYSSLISYEEDQRQGAEPRKNFVKPNETKTYFWKVQHHMAPTKDEFDCKAWAYFSDVDLEKDVHSGLIGPLLVCHTNTLNPAHGRQVTVQEFALFFTIFDETKSWYFTENMERNCRAPCNIQMEDPTFKENYRFHAINGYIMDTLPGLVMAQDQRIRWYLLSMGSNENIHSIHFSGHVFTVRKKEEYKMALYNLYPGVFETVEMLPSKAGIWRVECLIGEHLHAGMSTLFLVYSNKCQTPLGMASGHIRDFQITASGQYGQWAPKLARLHYSGSINAWSTKEPFSWIKVDLLAPMIIHGIKTQGARQKFSSLYISQFIIMYSLDGKKWQTYRGNSTGAPGSPAGSPTSTEEGTSESATPESGPGSEPATSGSETPASSGTLMVFFGNVDSSGIKHNIFNPPIIARYIRLHPTHYSIRSTLRMELMGCDLNSCSMPLGMESKAISDAQITASSYFTNMFATWSPSKARLHLQGRSNAWRPQVNNPKEWLQVDFQKTMKVTGVTTQGVKSLLTSMYVKEFLISSSQDGHQWTLFFQNGKVKVFQGNQDSFTPVVNSLDPPLLTRYLRIHPQSWVHQIALRMEVLGCEAQDLYGAGSPGAETAEQKLISEEDLSPATGHHHHHH

SEQ ID NO: 670 - DNA, 4536 bp, synthetic construct
  misc_feature 1..4536: note = Description of Artificial Sequence: Synthetic polynucleotide
  source 1..4536: mol_type = other DNA
gccaccagaagatactacctgggtgcagtggaactgtcatgggactatatgcaaagtgatctcggtgagctgcctgtggacgcaagatttcctcctagagtgccaaaatcttttccattcaacacctcagtcgtgtacaaaaagactctgtttgtagaattcacggatcaccttttcaacatcgctaagccaaggccaccctggatgggtctgctaggtcctaccatccaggctgaggtttatgatacagtggtcattacacttaagaacatggcttcccatcctgtcagtcttcatgctgttggtgtatcctactggaaagcttctgagggagctgaatatgatgatcagaccagtcaaagggagaaagaagatgataaagtcttccctggtggaagccatacatatgtctggcaggtcctgaaagagaatggtccaatggcctctgacccactgtgccttacctactcatatctttctcatgtggacctggtaaaagacttgaattcaggcctcattggagccctactagtatgtagagaagggagtctggccaaggaaaagacacagaccttgcacaaatttatactactttttgctgtatttgatgaagggaaaagttggcactcagaaacaaagaactccttgatgcaggatagggatgctgcatctgctcgggcctggcctaaaatgcacacagtcaatggttatgtaaacaggtctctgccaggtctgattggatgccacaggaaatcagtctattggcatgtgattggaatgggcaccactcctgaagtgcactcaatattcctcgaaggtcacacatttcttgtgaggaaccatcgccaggctagcttggaaatctcgccaataactttccttactgctcaaacactcttgatggaccttggacagtttctactgttttgtcatatctcttcccaccaacatgatggcatggaagcttatgtcaaagtagacagctgtccagaggaaccccaactacgaatgaaaaataatgaagaagcggaagactatgatgatgatcttactgattctgaaatggatgtggtcaggtttgatgatgacaactctccttcctttatccaaattcgctcagttgccaagaagcatcctaaaacttgggtacattacattgctgctgaagaggaggactgggactatgctcccttagtcctcgcccccgatgacagaagttataaaagtcaatatttgaacaatggccctcagcggattggtaggaagtacaaaaaagtccgatttatggcatacacagatgaaacctttaagactcgtgaagctattcagcatgaatcaggaatcttgggacctttactttatggggaagttggagacacactgttgattatatttaagaatcaagcaagcagaccatataacatctaccctcacggaatcactgatgtccgtcctttgtattcaaggagattaccaaaaggtgtaaaacatttgaaggattttccaattctgccaggagaaatattcaaatataaatggacagtgactgtagaagatgggccaactaaatcagatcctcggtgcctgacccgctattactctagtttcgttaatatggagagagatctagcttcaggactcattggccctctcctcatctgctacaaagaatctgtagatcaaagaggaaaccagataatgtcagacaagaggaatgtcatcctgttttctgtatttgatgagaaccgaagctggtacctcacagagaatatacaacgctttctccccaatccagctggagtgcagcttgaggatccagagttccaagcctccaacatcatgcacagcatcaatggctatgtttttgatagtttgcagttgtcagtttgtttgcatgaggtggcatactggtacattctaagcattggagcacagactgacttcctttctgtcttcttctctggatataccttcaaacacaaaatggtctatgaagacacactcaccctattcccattctcaggagaaactgtcttcatgtcgatggaaaacccaggtctatggattctggggtgccacaactcagactttcggaacagaggcatgaccgccttactgaaggtttctagttgtgacaagaacactggtgattattacgaggacagttatgaagatatttcagcatacttgctgagtaaaaacaatgccattgaaccaagaagcttctctcaaaacccaccagtcttgaaacgccatcaacgggaaataactcgtactactcttcagtcagatcaagaggaaatcgattatgatgataccatatcagttgaaatgaagaaggaagattttgacatttatgatgaggatgaaaatcagagcccccgcagctttcaaaagaaaacacgacactattttattgctgcagtggagaggctctgggattatgggatgagtagctccccacatgttctaagaaacagggctcagagtggcagtgtccctcagttcaagaaagttgttttccaggaatttactgatggctcctttactcagcccttataccgtggagaactaaatgaacatttgggactcctggggccatatataagagcagaagttgaagataatatcatggtaactttcagaaatcaggcctctcgtccctattccttctattctagccttatttcttatgaggaagatcagaggcaaggagcagaacctagaaaaaactttgtcaagcctaatgaaaccaaaacttacttttggaaagtgcaacatcatatggcacccactaaagatgagtttgactgcaaagcctgggcttatttctctgatgttgacctggaaaaagatgtgcactcaggcctgattggaccccttctggtctgccacactaacacactgaaccctgctcatgggagacaagtgacagtacaggaatttgctctgtttttcaccatctttgatgagaccaaaagctggtacttcactgaaaatatggaaagaaactgcagggctccctgcaatatccagatggaagatcccacttttaaagagaattatcgcttccatgcaatcaatggctacataatggatacactacctggcttagtaatggctcaggatcaaaggattcgatggtatctgctcagcatgggcagcaatgaaaacatccattctattcatttcagtggacatgtgttcactgtacgaaaaaaagaggagtataaaatggcactgtacaatctctatccaggtgtttttgagacagtggaaatgttaccatccaaagctggaatttggcgggtggaatgccttattggcgagcatctacatgctgggatgagcacactttttctggtgtacagcaataagtgtcagactcccctgggaatggcttctggacacattagagattttcagattacagcttcaggacaatatggacagtgggccccaaagctggccagacttcattattccggatcaatcaatgcctggagcaccaaggagcccttttcttggatcaaggtggatctgttggcaccaatgattattcacggcatcaagacccagggtgcccgtcagaagttctccagcctctacatctctcagtttatcatcatgtatagtcttgatgggaagaagtggcagacttatcgaggaaattccactggcgcgccaggttctcctgctggctcccccacctcaacagaagaggggacaagcgaaagcgctacgcctgagagtggccctggctctgagccagccacctccggctctgaaacccctgcctcgagcggaaccttaatggtcttctttggcaatgtggattcatctgggataaaacacaatatttttaaccctccaattattgctcgatacatccgtttgcacccaactcattatagcattcgcagcactcttcgcatggagttgatgggctgtgatttaaatagttgcagcatgccattgggaatggagagtaaagcaatatcagatgcacagattactgcttcatcctactttaccaatatgtttgccacctggtctccttcaaaagctcgacttcacctccaagggaggagtaatgcctggagacctcaggtgaataatccaaaagagtggctgcaagtggacttccagaagacaatgaaagtcacaggagtaactactcagggagtaaaatctctgcttaccagcatgtatgtgaaggagttcctcatctccagcagtcaagatggccatcagtggactctcttttttcagaatggcaaagtaaaggtttttcagggaaatcaagactccttcacacctgtggtgaactctctagacccaccgttactgactcgctaccttcgaattcacccccagagttgggtgcaccagattgccctgaggatggaggttctgggctgcgaggcacaggacctctacggcgccggatcacctggggccgaaacggccgaacaaaaactcatctcagaagaggatctgtcacctgcaaccggtcatcatcaccatcaccattga

SEQ ID NO: 671 - protein, 1511 aa, synthetic construct
  REGION 1..1511: note = Description of Artificial Sequence: Synthetic polypeptide
ATRRYYLGAVELSWDYMQSDLGELPVDARFPPRVPKSFPFNTSVVYKKTLFVEFTDHLFNIAKPRPPWMGLLGPTIQAEVYDTVVITLKNMASHPVSLHAVGVSYWKASEGAEYDDQTSQREKEDDKVFPGGSHTYVWQVLKENGPMASDPLCLTYSYLSHVDLVKDLNSGLIGALLVCREGSLAKEKTQTLHKFILLFAVFDEGKSWHSETKNSLMQDRDAASARAWPKMHTVNGYVNRSLPGLIGCHRKSVYWHVIGMGTTPEVHSIFLEGHTFLVRNHRQASLEISPITFLTAQTLLMDLGQFLLFCHISSHQHDGMEAYVKVDSCPEEPQLRMKNNEEAEDYDDDLTDSEMDVVRFDDDNSPSFIQIRSVAKKHPKTWVHYIAAEEEDWDYAPLVLAPDDRSYKSQYLNNGPQRIGRKYKKVRFMAYTDETFKTREAIQHESGILGPLLYGEVGDTLLIIFKNQASRPYNIYPHGITDVRPLYSRRLPKGVKHLKDFPILPGEIFKYKWTVTVEDGPTKSDPRCLTRYYSSFVNMERDLASGLIGPLLICYKESVDQRGNQIMSDKRNVILFSVFDENRSWYLTENIQRFLPNPAGVQLEDPEFQASNIMHSINGYVFDSLQLSVCLHEVAYWYILSIGAQTDFLSVFFSGYTFKHKMVYEDTLTLFPFSGETVFMSMENPGLWILGCHNSDFRNRGMTALLKVSSCDKNTGDYYEDSYEDISAYLLSKNNAIEPRSFSQNPPVLKRHQREITRTTLQSDQEEIDYDDTISVEMKKEDFDIYDEDENQSPRSFQKKTRHYFIAAVERLWDYGMSSSPHVLRNRAQSGSVPQFKKVVFQEFTDGSFTQPLYRGELNEHLGLLGPYIRAEVEDNIMVTFRNQASRPYSFYSSLISYEEDQRQGAEPRKNFVKPNETKTYFWKVQHHMAPTKDEFDCKAWAYFSDVDLEKDVHSGLIGPLLVCHTNTLNPAHGRQVTVQEFALFFTIFDETKSWYFTENMERNCRAPCNIQMEDPTFKENYRFHAINGYIMDTLPGLVMAQDQRIRWYLLSMGSNENIHSIHFSGHVFTVRKKEEYKMALYNLYPGVFETVEMLPSKAGIWRVECLIGEHLHAGMSTLFLVYSNKCQTPLGMASGHIRDFQITASGQYGQWAPKLARLHYSGSINAWSTKEPFSWIKVDLLAPMIIHGIKTQGARQKFSSLYISQFIIMYSLDGKKWQTYRGNSTGTLMVFFGNVDSSGIKHNIFNPPIIARYIRLHPTHYSIRSTLRMELMGCDLGAPGSPAGSPTSTEEGTSESATPESGPGSEPATSGSETPASSNSCSMPLGMESKAISDAQITASSYFTNMFATWSPSKARLHLQGRSNAWRPQVNNPKEWLQVDFQKTMKVTGVTTQGVKSLLTSMYVKEFLISSSQDGHQWTLFFQNGKVKVFQGNQDSFTPVVNSLDPPLLTRYLRIHPQSWVHQIALRMEVLGCEAQDLYGAGSPGAETAEQKLISEEDLSPATGHHHHHH

SEQ ID NO: 672 - DNA, 4536 bp, synthetic construct
  misc_feature 1..4536: note = Description of Artificial Sequence: Synthetic polynucleotide
  source 1..4536: mol_type = other DNA
gccaccagaagatactacctgggtgcagtggaactgtcatgggactatatgcaaagtgatctcggtgagctgcctgtggacgcaagatttcctcctagagtgccaaaatcttttccattcaacacctcagtcgtgtacaaaaagactctgtttgtagaattcacggatcaccttttcaacatcgctaagccaaggccaccctggatgggtctgctaggtcctaccatccaggctgaggtttatgatacagtggtcattacacttaagaacatggcttcccatcctgtcagtcttcatgctgttggtgtatcctactggaaagcttctgagggagctgaatatgatgatcagaccagtcaaagggagaaagaagatgataaagtcttccctggtggaagccatacatatgtctggcaggtcctgaaagagaatggtccaatggcctctgacccactgtgccttacctactcatatctttctcatgtggacctggtaaaagacttgaattcaggcctcattggagccctactagtatgtagagaagggagtctggccaaggaaaagacacagaccttgcacaaatttatactactttttgctgtatttgatgaagggaaaagttggcactcagaaacaaagaactccttgatgcaggatagggatgctgcatctgctcgggcctggcctaaaatgcacacagtcaatggttatgtaaacaggtctctgccaggtctgattggatgccacaggaaatcagtctattggcatgtgattggaatgggcaccactcctgaagtgcactcaatattcctcgaaggtcacacatttcttgtgaggaaccatcgccaggctagcttggaaatctcgccaataactttccttactgctcaaacactcttgatggaccttggacagtttctactgttttgtcatatctcttcccaccaacatgatggcatggaagcttatgtcaaagtagacagctgtccagaggaaccccaactacgaatgaaaaataatgaagaagcggaagactatgatgatgatcttactgattctgaaatggatgtggtcaggtttgatgatgacaactctccttcctttatccaaattcgctcagttgccaagaagcatcctaaaacttgggtacattacattgctgctgaagaggaggactgggactatgctcccttagtcctcgcccccgatgacagaagttataaaagtcaatatttgaacaatggccctcagcggattggtaggaagtacaaaaaagtccgatttatggcatacacagatgaaacctttaagactcgtgaagctattcagcatgaatcaggaatcttgggacctttactttatggggaagttggagacacactgttgattatatttaagaatcaagcaagcagaccatataacatctaccctcacggaatcactgatgtccgtcctttgtattcaaggagattaccaaaaggtgtaaaacatttgaaggattttccaattctgccaggagaaatattcaaatataaatggacagtgactgtagaagatgggccaactaaatcagatcctcggtgcctgacccgctattactctagtttcgttaatatggagagagatctagcttcaggactcattggccctctcctcatctgctacaaagaatctgtagatcaaagaggaaaccagataatgtcagacaagaggaatgtcatcctgttttctgtatttgatgagaaccgaagctggtacctcacagagaatatacaacgctttctccccaatccagctggagtgcagcttgaggatccagagttccaagcctccaacatcatgcacagcatcaatggctatgtttttgatagtttgcagttgtcagtttgtttgcatgaggtggcatactggtacattctaagcattggagcacagactgacttcctttctgtcttcttctctggatataccttcaaacacaaaatggtctatgaagacacactcaccctattcccattctcaggagaaactgtcttcatgtcgatggaaaacccaggtctatggattctggggtgccacaactcagactttcggaacagaggcatgaccgccttactgaaggtttctagttgtgacaagaacactggtgattattacgaggacagttatgaagatatttcagcatacttgctgagtaaaaacaatgccattgaaccaagaagcttctctcaaaacccaccagtcttgaaacgccatcaacgggaaataactcgtactactcttcagtcagatcaagaggaaatcgattatgatgataccatatcagttgaaatgaagaaggaagattttgacatttatgatgaggatgaaaatcagagcccccgcagctttcaaaagaaaacacgacactattttattgctgcagtggagaggctctgggattatgggatgagtagctccccacatgttctaagaaacagggctcagagtggcagtgtccctcagttcaagaaagttgttttccaggaatttactgatggctcctttactcagcccttataccgtggagaactaaatgaacatttgggactcctggggccatatataagagcagaagttgaagataatatcatggtaactttcagaaatcaggcctctcgtccctattccttctattctagccttatttcttatgaggaagatcagaggcaaggagcagaacctagaaaaaactttgtcaagcctaatgaaaccaaaacttacttttggaaagtgcaacatcatatggcacccactaaagatgagtttgactgcaaagcctgggcttatttctctgatgttgacctggaaaaagatgtgcactcaggcctgattggaccccttctggtctgccacactaacacactgaaccctgctcatgggagacaagtgacagtacaggaatttgctctgtttttcaccatctttgatgagaccaaaagctggtacttcactgaaaatatggaaagaaactgcagggctccctgcaatatccagatggaagatcccacttttaaagagaattatcgcttccatgcaatcaatggctacataatggatacactacctggcttagtaatggctcaggatcaaaggattcgatggtatctgctcagcatgggcagcaatgaaaacatccattctattcatttcagtggacatgtgttcactgtacgaaaaaaagaggagtataaaatggcactgtacaatctctatccaggtgtttttgagacagtggaaatgttaccatccaaagctggaatttggcgggtggaatgccttattggcgagcatctacatgctgggatgagcacactttttctggtgtacagcaataagtgtcagactcccctgggaatggcttctggacacattagagattttcagattacagcttcaggacaatatggacagtgggccccaaagctggccagacttcattattccggatcaatcaatgcctggagcaccaaggagcccttttcttggatcaaggtggatctgttggcaccaatgattattcacggcatcaagacccagggtgcccgtcagaagttctccagcctctacatctctcagtttatcatcatgtatagtcttgatgggaagaagtggcagacttatcgaggaaattccactggaaccttaatggtcttctttggcaatgtggattcatctgggataaaacacaatatttttaaccctccaattattgctcgatacatccgtttgcacccaactcattatagcattcgcagcactcttcgcatggagttgatgggctgtgatttaggcgcgccaggttctcctgctggctcccccacctcaacagaagaggggacaagcgaaagcgctacgcctgagagtggccctggctctgagccagccacctccggctctgaaacccctgcctcgagcaatagttgcagcatgccattgggaatggagagtaaagcaatatcagatgcacagattactgcttcatcctactttaccaatatgtttgccacctggtctccttcaaaagctcgacttcacctccaagggaggagtaatgcctggagacctcaggtgaataatccaaaagagtggctgcaagtggacttccagaagacaatgaaagtcacaggagtaactactcagggagtaaaatctctgcttaccagcatgtatgtgaaggagttcctcatctccagcagtcaagatggccatcagtggactctcttttttcagaatggcaaagtaaaggtttttcagggaaatcaagactccttcacacctgtggtgaactctctagacccaccgttactgactcgctaccttcgaattcacccccagagttgggtgcaccagattgccctgaggatggaggttctgggctgcgaggcacaggacctctacggcgccggatcacctggggccgaaacggccgaacaaaaactcatctcagaagaggatctgtcacctgcaaccggtcatcatcaccatcaccattga

SEQ ID NO: 673 - protein, 1511 aa, synthetic construct
  REGION 1..1511: note = Description of Artificial Sequence: Synthetic polypeptide
ATRRYYLGAVELSWDYMQSDLGELPVDARFPPRVPKSFPFNTSVVYKKTLFVEFTDHLFNIAKPRPPWMGLLGPTIQAEVYDTVVITLKNMASHPVSLHAVGVSYWKASEGAEYDDQTSQREKEDDKVFPGGSHTYVWQVLKENGPMASDPLCLTYSYLSHVDLVKDLNSGLIGALLVCREGSLAKEKTQTLHKFILLFAVFDEGKSWHSETKNSLMQDRDAASARAWPKMHTVNGYVNRSLPGLIGCHRKSVYWHVIGMGTTPEVHSIFLEGHTFLVRNHRQASLEISPITFLTAQTLLMDLGQFLLFCHISSHQHDGMEAYVKVDSCPEEPQLRMKNNEEAEDYDDDLTDSEMDVVRFDDDNSPSFIQIRSVAKKHPKTWVHYIAAEEEDWDYAPLVLAPDDRSYKSQYLNNGPQRIGRKYKKVRFMAYTDETFKTREAIQHESGILGPLLYGEVGDTLLIIFKNQASRPYNIYPHGITDVRPLYSRRLPKGVKHLKDFPILPGEIFKYKWTVTVEDGPTKSDPRCLTRYYSSFVNMERDLASGLIGPLLICYKESVDQRGNQIMSDKRNVILFSVFDENRSWYLTENIQRFLPNPAGVQLEDPEFQASNIMHSINGYVFDSLQLSVCLHEVAYWYILSIGAQTDFLSVFFSGYTFKHKMVYEDTLTLFPFSGETVFMSMENPGLWILGCHNSDFRNRGMTALLKVSSCDKNTGDYYEDSYEDISAYLLSKNNAIEPRSFSQNPPVLKRHQREITRTTLQSDQEEIDYDDTISVEMKKEDFDIYDEDENQSPRSFQKKTRHYFIAAVERLWDYGMSSSPHVLRNRAQSGSVPQFKKVVFQEFTDGSFTQPLYRGELNEHLGLLGPYIRAEVEDNIMVTFRNQASRPYSFYSSLISYEEDQRQGAEPRKNFVKPNETKTYFWKVQHHMAPTKDEFDCKAWAYFSDVDLEKDVHSGLIGPLLVCHTNTLNPAHGRQVTVQEFALFFTIFDETKSWYFTENMERNCRAPCNIQMEDPTFKENYRFHAINGYIMDTLPGLVMAQDQRIRWYLLSMGSNENIHSIHFSGHVFTVRKKEEYKMALYNLYPGVFETVEMLPSKAGIWRVECLIGEHLHAGMSTLFLVYSNKCQTPLGMASGHIRDFQITASGQYGQWAPKLARLHYSGSINAWSTKEPFSWIKVDLLAPMIIHGIKTQGARQKFSSLYISQFIIMYSLDGKKWQTYRGNSTGTLMVFFGNVDSSGIKHNIFNPPIIARYIRLHPTHYSIRSTLRMELMGCDLNSCSMPLGMESKAISDAGAPGSPAGSPTSTEEGTSESATPESGPGSEPATSGSETPASSQITASSYFTNMFATWSPSKARLHLQGRSNAWRPQVNNPKEWLQVDFQKTMKVTGVTTQGVKSLLTSMYVKEFLISSSQDGHQWTLFFQNGKVKVFQGNQDSFTPVVNSLDPPLLTRYLRIHPQSWVHQIALRMEVLGCEAQDLYGAGSPGAETAEQKLISEEDLSPATGHHHHHH

SEQ ID NO: 674 - DNA, 4536 bp, synthetic construct
  misc_feature 1..4536: note = Description of Artificial Sequence: Synthetic polynucleotide
  source 1..4536: mol_type = other DNA
gccaccagaagatactacctgggtgcagtggaactgtcatgggactatatgcaaagtgatctcggtgagctgcctgtggacgcaagatttcctcctagagtgccaaaatcttttccattcaacacctcagtcgtgtacaaaaagactctgtttgtagaattcacggatcaccttttcaacatcgctaagccaaggccaccctggatgggtctgctaggtcctaccatccaggctgaggtttatgatacagtggtcattacacttaagaacatggcttcccatcctgtcagtcttcatgctgttggtgtatcctactggaaagcttctgagggagctgaatatgatgatcagaccagtcaaagggagaaagaagatgataaagtcttccctggtggaagccatacatatgtctggcaggtcctgaaagagaatggtccaatggcctctgacccactgtgccttacctactcatatctttctcatgtggacctggtaaaagacttgaattcaggcctcattggagccctactagtatgtagagaagggagtctggccaaggaaaagacacagaccttgcacaaatttatactactttttgctgtatttgatgaagggaaaagttggcactcagaaacaaagaactccttgatgcaggatagggatgctgcatctgctcgggcctggcctaaaatgcacacagtcaatggttatgtaaacaggtctctgccaggtctgattggatgccacaggaaatcagtctattggcatgtgattggaatgggcaccactcctgaagtgcactcaatattcctcgaaggtcacacatttcttgtgaggaaccatcgccaggctagcttggaaatctcgccaataactttccttactgctcaaacactcttgatggaccttggacagtttctactgttttgtcatatctcttcccaccaacatgatggcatggaagcttatgtcaaagtagacagctgtccagaggaaccccaactacgaatgaaaaataatgaagaagcggaagactatgatgatgatcttactgattctgaaatggatgtggtcaggtttgatgatgacaactctccttcctttatccaaattcgctcagttgccaagaagcatcctaaaacttgggtacattacattgctgctgaagaggaggactgggactatgctcccttagtcctcgcccccgatgacagaagttataaaagtcaatatttgaacaatggccctcagcggattggtaggaagtacaaaaaagtccgatttatggcatacacagatgaaacctttaagactcgtgaagctattcagcatgaatcaggaatcttgggacctttactttatggggaagttggagacacactgttgattatatttaagaatcaagcaagcagaccatataacatctaccctcacggaatcactgatgtccgtcctttgtattcaaggagattaccaaaaggtgtaaaacatttgaaggattttccaattctgccaggagaaatattcaaatataaatggacagtgactgtagaagatgggccaactaaatcagatcctcggtgcctgacccgctattactctagtttcgttaatatggagagagatctagcttcaggactcattggccctctcctcatctgctacaaagaatctgtagatcaaagaggaaaccagataatgtcagacaagaggaatgtcatcctgttttctgtatttgatgagaaccgaagctggtacctcacagagaatatacaacgctttctccccaatccagctggagtgcagcttgaggatccagagttccaagcctccaacatcatgcacagcatcaatggctatgtttttgatagtttgcagttgtcagtttgtttgcatgaggtggcatactggtacattctaagcattggagcacagactgacttcctttctgtcttcttctctggatataccttcaaacacaaaatggtctatgaagacacactcaccctattcccattctcaggagaaactgtcttcatgtcgatggaaaacccaggtctatggattctggggtgccacaactcagactttcggaacagaggcatgaccgccttactgaaggtttctagttgtgacaagaacactggtgattattacgaggacagttatgaagatatttcagcatacttgctgagtaaaaacaatgccattgaaccaagaagcttctctcaaaacccaccagtcttgaaacgccatcaacgggaaataactcgtactactcttcagtcagatcaagaggaaatcgattatgatgataccatatcagttgaaatgaagaaggaagattttgacatttatgatgaggatgaaaatcagagcccccgcagctttcaaaagaaaacacgacactattttattgctgcagtggagaggctctgggattatgggatgagtagctccccacatgttctaagaaacagggctcagagtggcagtgtccctcagttcaagaaagttgttttccaggaatttactgatggctcctttactcagcccttataccgtggagaactaaatgaacatttgggactcctggggccatatataagagcagaagttgaagataatatcatggtaactttcagaaatcaggcctctcgtccctattccttctattctagccttatttcttatgaggaagatcagaggcaaggagcagaacctagaaaaaactttgtcaagcctaatgaaaccaaaacttacttttggaaagtgcaacatcatatggcacccactaaagatgagtttgactgcaaagcctgggcttatttctctgatgttgacctggaaaaagatgtgcactcaggcctgattggaccccttctggtctgccacactaacacactgaaccctgctcatgggagacaagtgacagtacaggaatttgctctgtttttcaccatctttgatgagaccaaaagctggtacttcactgaaaatatggaaagaaactgcagggctccctgcaatatccagatggaagatcccacttttaaagagaattatcgcttccatgcaatcaatggctacataatggatacactacctggcttagtaatggctcaggatcaaaggattcgatggtatctgctcagcatgggcagcaatgaaaacatccattctattcatttcagtggacatgtgttcactgtacgaaaaaaagaggagtataaaatggcactgtacaatctctatccaggtgtttttgagacagtggaaatgttaccatccaaagctggaatttggcgggtggaatgccttattggcgagcatctacatgctgggatgagcacactttttctggtgtacagcaataagtgtcagactcccctgggaatggcttctggacacattagagattttcagattacagcttcaggacaatatggacagtgggccccaaagctggccagacttcattattccggatcaatcaatgcctggagcaccaaggagcccttttcttggatcaaggtggatctgttggcaccaatgattattcacggcatcaagacccagggtgcccgtcagaagttctccagcctctacatctctcagtttatcatcatgtatagtcttgatgggaagaagtggcagacttatcgaggaaattccactggaaccttaatggtcttctttggcaatgtggattcatctgggataaaacacaatatttttaaccctccaattattgctcgatacatccgtttgcacccaactcattatagcattcgcagcactcttcgcatggagttgatgggctgtgatttaaatagttgcagcatgccattgggaatggagagtaaagcaatatcagatgcaggcgcgccaggttctcctgctggctcccccacctcaacagaagaggggacaagcgaaagcgctacgcctgagagtggccctggctctgagccagccacctccggctctgaaacccctgcctcgagccagattactgcttcatcctactttaccaatatgtttgccacctggtctccttcaaaagctcgacttcacctccaagggaggagtaatgcctggagacctcaggtgaataatccaaaagagtggctgcaagtggacttccagaagacaatgaaagtcacaggagtaactactcagggagtaaaatctctgcttaccagcatgtatgtgaaggagttcctcatctccagcagtcaagatggccatcagtggactctcttttttcagaatggcaaagtaaaggtttttcagggaaatcaagactccttcacacctgtggtgaactctctagacccaccgttactgactcgctaccttcgaattcacccccagagttgggtgcaccagattgccctgaggatggaggttctgggctgcgaggcacaggacctctacggcgccggatcacctggggccgaaacggccgaacaaaaactcatctcagaagaggatctgtcacctgcaaccggtcatcatcaccatcaccattga

SEQ ID NO: 675 - protein, 1511 aa, synthetic construct
  REGION 1..1511: note = Description of Artificial Sequence: Synthetic polypeptide
ATRRYYLGAVELSWDYMQSDLGELPVDARFPPRVPKSFPFNTSVVYKKTLFVEFTDHLFNIAKPRPPWMGLLGPTIQAEVYDTVVITLKNMASHPVSLHAVGVSYWKASEGAEYDDQTSQREKEDDKVFPGGSHTYVWQVLKENGPMASDPLCLTYSYLSHVDLVKDLNSGLIGALLVCREGSLAKEKTQTLHKFILLFAVFDEGKSWHSETKNSLMQDRDAASARAWPKMHTVNGYVNRSLPGLIGCHRKSVYWHVIGMGTTPEVHSIFLEGHTFLVRNHRQASLEISPITFLTAQTLLMDLGQFLLFCHISSHQHDGMEAYVKVDSCPEEPQLRMKNNEEAEDYDDDLTDSEMDVVRFDDDNSPSFIQIRSVAKKHPKTWVHYIAAEEEDWDYAPLVLAPDDRSYKSQYLNNGPQRIGRKYKKVRFMAYTDETFKTREAIQHESGILGPLLYGEVGDTLLIIFKNQASRPYNIYPHGITDVRPLYSRRLPKGVKHLKDFPILPGEIFKYKWTVTVEDGPTKSDPRCLTRYYSSFVNMERDLASGLIGPLLICYKESVDQRGNQIMSDKRNVILFSVFDENRSWYLTENIQRFLPNPAGVQLEDPEFQASNIMHSINGYVFDSLQLSVCLHEVAYWYILSIGAQTDFLSVFFSGYTFKHKMVYEDTLTLFPFSGETVFMSMENPGLWILGCHNSDFRNRGMTALLKVSSCDKNTGDYYEDSYEDISAYLLSKNNAIEPRSFSQNPPVLKRHQREITRTTLQSDQEEIDYDDTISVEMKKEDFDIYDEDENQSPRSFQKKTRHYFIAAVERLWDYGMSSSPHVLRNRAQSGSVPQFKKVVFQEFTDGSFTQPLYRGELNEHLGLLGPYIRAEVEDNIMVTFRNQASRPYSFYSSLISYEEDQRQGAEPRKNFVKPNETKTYFWKVQHHMAPTKDEFDCKAWAYFSDVDLEKDVHSGLIGPLLVCHTNTLNPAHGRQVTVQEFALFFTIFDETKSWYFTENMERNCRAPCNIQMEDPTFKENYRFHAINGYIMDTLPGLVMAQDQRIRWYLLSMGSNENIHSIHFSGHVFTVRKKEEYKMALYNLYPGVFETVEMLPSKAGIWRVECLIGEHLHAGMSTLFLVYSNKCQTPLGMASGHIRDFQITASGQYGQWAPKLARLHYSGSINAWSTKEPFSWIKVDLLAPMIIHGIKTQGARQKFSSLYISQFIIMYSLDGKKWQTYRGNSTGTLMVFFGNVDSSGIKHNIFNPPIIARYIRLHPTHYSIRSTLRMELMGCDLNSCSMPLGMESKAISDAQITASSYFTNMFATWSPSKARLHLQGRSNAWRPQVNNPKGAPGSPAGSPTSTEEGTSESATPESGPGSEPATSGSETPASSEWLQVDFQKTMKVTGVTTQGVKSLLTSMYVKEFLISSSQDGHQWTLFFQNGKVKVFQGNQDSFTPVVNSLDPPLLTRYLRIHPQSWVHQIALRMEVLGCEAQDLYGAGSPGAETAEQKLISEEDLSPATGHHHHHH

SEQ ID NO: 676 - DNA, 4536 bp, synthetic construct
  misc_feature 1..4536: note = Description of Artificial Sequence: Synthetic polynucleotide
  source 1..4536: mol_type = other DNA
gccaccagaagatactacctgggtgcagtggaactgtcatgggactatatgcaaagtgatctcggtgagctgcctgtggacgcaagatttcctcctagagtgccaaaatcttttccattcaacacctcagtcgtgtacaaaaagactctgtttgtagaattcacggatcaccttttcaacatcgctaagccaaggccaccctggatgggtctgctaggtcctaccatccaggctgaggtttatgatacagtggtcattacacttaagaacatggcttcccatcctgtcagtcttcatgctgttggtgtatcctactggaaagcttctgagggagctgaatatgatgatcagaccagtcaaagggagaaagaagatgataaagtcttccctggtggaagccatacatatgtctggcaggtcctgaaagagaatggtccaatggcctctgacccactgtgccttacctactcatatctttctcatgtggacctggtaaaagacttgaattcaggcctcattggagccctactagtatgtagagaagggagtctggccaaggaaaagacacagaccttgcacaaatttatactactttttgctgtatttgatgaagggaaaagttggcactcagaaacaaagaactccttgatgcaggatagggatgctgcatctgctcgggcctggcctaaaatgcacacagtcaatggttatgtaaacaggtctctgccaggtctgattggatgccacaggaaatcagtctattggcatgtgattggaatgggcaccactcctgaagtgcactcaatattcctcgaaggtcacacatttcttgtgaggaaccatcgccaggctagcttggaaatctcgccaataactttccttactgctcaaacactcttgatggaccttggacagtttctactgttttgtcatatctcttcccaccaacatgatggcatggaagcttatgtcaaagtagacagctgtccagaggaaccccaactacgaatgaaaaataatgaagaagcggaagactatgatgatgatcttactgattctgaaatggatgtggtcaggtttgatgatgacaactctccttcctttatccaaattcgctcagttgccaagaagcatcctaaaacttgggtacattacattgctgctgaagaggaggactgggactatgctcccttagtcctcgcccccgatgacagaagttataaaagtcaatatttgaacaatggccctcagcggattggtaggaagtacaaaaaagtccgatttatggcatacacagatgaaacctttaagactcgtgaagctattcagcatgaatcaggaatcttgggacctttactttatggggaagttggagacacactgttgattatatttaagaatcaagcaagcagaccatataacatctaccctcacggaatcactgatgtccgtcctttgtattcaaggagattaccaaaaggtgtaaaacatttgaaggattttccaattctgccaggagaaatattcaaatataaatggacagtgactgtagaagatgggccaactaaatcagatcctcggtgcctgacccgctattactctagtttcgttaatatggagagagatctagcttcaggactcattggccctctcctcatctgctacaaagaatctgtagatcaaagaggaaaccagataatgtcagacaagaggaatgtcatcctgttttctgtatttgatgagaaccgaagctggtacctcacagagaatatacaacgctttctccccaatccagctggagtgcagcttgaggatccagagttccaagcctccaacatcatgcacagcatcaatggctatgtttttgatagtttgcagttgtcagtttgtttgcatgaggtggcatactggtacattctaagcattggagcacagactgacttcctttctgtcttcttctctggatataccttcaaacacaaaatggtctatgaagacacactcaccctattcccattctcaggagaaactgtcttcatgtcgatggaaaacccaggtctatggattctggggtgccacaactcagactttcggaacagaggcatgaccgccttactgaaggtttctagttgtgacaagaacactggtgattattacgaggacagttatgaagatatttcagcatacttgctgagtaaaaacaatgccattgaaccaagaagcttctctcaaaacccaccagtcttgaaacgccatcaacgggaaataactcgtactactcttcagtcagatcaagaggaaatcgattatgatgataccatatcagttgaaatgaagaaggaagattttgacatttatgatgaggatgaaaatcagagcccccgcagctttcaaaagaaaacacgacactattttattgctgcagtggagaggctctgggattatgggatgagtagctccccacatgttctaagaaacagggctcagagtggcagtgtccctcagttcaagaaagttgttttccaggaatttactgatggctcctttactcagcccttataccgtggagaactaaatgaacatttgggactcctggggccatatataagagcagaagttgaagataatatcatggtaactttcagaaatcaggcctctcgtccctattccttctattctagccttatttcttatgaggaagatcagaggcaaggagcagaacctagaaaaaactttgtcaagcctaatgaaaccaaaacttacttttggaaagtgcaacatcatatggcacccactaaagatgagtttgactgcaaagcctgggcttatttctctgatgttgacctggaaaaagatgtgcactcaggcctgattggaccccttctggtctgccacactaacacactgaaccctgctcatgggagacaagtgacagtacaggaatttgctctgtttttcaccatctttgatgagaccaaaagctggtacttcactgaaaatatggaaagaaactgcagggctccctgcaatatccagatggaagatcccacttttaaagagaattatcgcttccatgcaatcaatggctacataatggatacactacctggcttagtaatggctcaggatcaaaggattcgatggtatctgctcagcatgggcagcaatgaaaacatccattctattcatttcagtggacatgtgttcactgtacgaaaaaaagaggagtataaaatggcactgtacaatctctatccaggtgtttttgagacagtggaaatgttaccatccaaagctggaatttggcgggtggaatgccttattggcgagcatctacatgctgggatgagcacactttttctggtgtacagcaataagtgtcagactcccctgggaatggcttctggacacattagagattttcagattacagcttcaggacaatatggacagtgggccccaaagctggccagacttcattattccggatcaatcaatgcctggagcaccaaggagcccttttcttggatcaaggtggatctgttggcaccaatgattattcacggcatcaagacccagggtgcccgtcagaagttctccagcctctacatctctcagtttatcatcatgtatagtcttgatgggaagaagtggcagacttatcgaggaaattccactggaaccttaatggtcttctttggcaatgtggattcatctgggataaaacacaatatttttaaccctccaattattgctcgatacatccgtttgcacccaactcattatagcattcgcagcactcttcgcatggagttgatgggctgtgatttaaatagttgcagcatgccattgggaatggagagtaaagcaatatcagatgcacagattactgcttcatcctactttaccaatatgtttgccacctggtctccttcaaaagctcgacttcacctccaagggaggagtaatgcctggagacctcaggtgaataatccaaaaggcgcgccaggttctcctgctggctcccccacctcaacagaagaggggacaagcgaaagcgctacgcctgagagtggccctggctctgagccagccacctccggctctgaaacccctgcctcgagcgagtggctgcaagtggacttccagaagacaatgaaagtcacaggagtaactactcagggagtaaaatctctgcttaccagcatgtatgtgaaggagttcctcatctccagcagtcaagatggccatcagtggactctcttttttcagaatggcaaagtaaaggtttttcagggaaatcaagactccttcacacctgtggtgaactctctagacccaccgttactgactcgctaccttcgaattcacccccagagttgggtgcaccagattgccctgaggatggaggttctgggctgcgaggcacaggacctctacggcgccggatcacctggggccgaaacggccgaacaaaaactcatctcagaagaggatctgtcacctgcaaccggtcatcatcaccatcaccattga

SEQ ID NO: 677 - protein, 1511 aa, synthetic construct
  REGION 1..1511: note = Description of Artificial Sequence: Synthetic polypeptide
ATRRYYLGAVELSWDYMQSDLGELPVDARFPPRVPKSFPFNTSVVYKKTLFVEFTDHLFNIAKPRPPWMGLLGPTIQAEVYDTVVITLKNMASHPVSLHAVGVSYWKASEGAEYDDQTSQREKEDDKVFPGGSHTYVWQVLKENGPMASDPLCLTYSYLSHVDLVKDLNSGLIGALLVCREGSLAKEKTQTLHKFILLFAVFDEGKSWHSETKNSLMQDRDAASARAWPKMHTVNGYVNRSLPGLIGCHRKSVYWHVIGMGTTPEVHSIFLEGHTFLVRNHRQASLEISPITFLTAQTLLMDLGQFLLFCHISSHQHDGMEAYVKVDSCPEEPQLRMKNNEEAEDYDDDLTDSEMDVVRFDDDNSPSFIQIRSVAKKHPKTWVHYIAAEEEDWDYAPLVLAPDDRSYKSQYLNNGPQRIGRKYKKVRFMAYTDETFKTREAIQHESGILGPLLYGEVGDTLLIIFKNQASRPYNIYPHGITDVRPLYSRRLPKGVKHLKDFPILPGEIFKYKWTVTVEDGPTKSDPRCLTRYYSSFVNMERDLASGLIGPLLICYKESVDQRGNQIMSDKRNVILFSVFDENRSWYLTENIQRFLPNPAGVQLEDPEFQASNIMHSINGYVFDSLQLSVCLHEVAYWYILSIGAQTDFLSVFFSGYTFKHKMVYEDTLTLFPFSGETVFMSMENPGLWILGCHNSDFRNRGMTALLKVSSCDKNTGDYYEDSYEDISAYLLSKNNAIEPRSFSQNPPVLKRHQREITRTTLQSDQEEIDYDDTISVEMKKEDFDIYDEDENQSPRSFQKKTRHYFIAAVERLWDYGMSSSPHVLRNRAQSGSVPQFKKVVFQEFTDGSFTQPLYRGELNEHLGLLGPYIRAEVEDNIMVTFRNQASRPYSFYSSLISYEEDQRQGAEPRKNFVKPNETKTYFWKVQHHMAPTKDEFDCKAWAYFSDVDLEKDVHSGLIGPLLVCHTNTLNPAHGRQVTVQEFALFFTIFDETKSWYFTENMERNCRAPCNIQMEDPTFKENYRFHAINGYIMDTLPGLVMAQDQRIRWYLLSMGSNENIHSIHFSGHVFTVRKKEEYKMALYNLYPGVFETVEMLPSKAGIWRVECLIGEHLHAGMSTLFLVYSNKCQTPLGMASGHIRDFQITASGQYGQWAPKLARLHYSGSINAWSTKEPFSWIKVDLLAPMIIHGIKTQGARQKFSSLYISQFIIMYSLDGKKWQTYRGNSTGTLMVFFGNVDSSGIKHNIFNPPIIARYIRLHPTHYSIRSTLRMELMGCDLNSCSMPLGMESKAISDAQITASSYFTNMFATWSPSKARLHLQGRSNAWRPQVNNPKEWLQVDFQKTMKVTGVTTQGVKSLLTSMYVKEFLISSSQDGHQWTLFFQNGAPGSPAGSPTSTEEGTSESATPESGPGSEPATSGSETPASSGKVKVFQGNQDSFTPVVNSLDPPLLTRYLRIHPQSWVHQIALRMEVLGCEAQDLYGAGSPGAETAEQKLISEEDLSPATGHHHHHH

SEQ ID NO: 678 - DNA, 4536 bp, synthetic construct
  misc_feature 1..4536: note = Description of Artificial Sequence: Synthetic polynucleotide
  source 1..4536: mol_type = other DNA
gccaccagaagatactacctgggtgcagtggaactgtcatgggactatatgcaaagtgatctcggtgagctgcctgtggacgcaagatttcctcctagagtgccaaaatcttttccattcaacacctcagtcgtgtacaaaaagactctgtttgtagaattcacggatcaccttttcaacatcgctaagccaaggccaccctggatgggtctgctaggtcctaccatccaggctgaggtttatgatacagtggtcattacacttaagaacatggcttcccatcctgtcagtcttcatgctgttggtgtatcctactggaaagcttctgagggagctgaatatgatgatcagaccagtcaaagggagaaagaagatgataaagtcttccctggtggaagccatacatatgtctggcaggtcctgaaagagaatggtccaatggcctctgacccactgtgccttacctactcatatctttctcatgtggacctggtaaaagacttgaattcaggcctcattggagccctactagtatgtagagaagggagtctggccaaggaaaagacacagaccttgcacaaatttatactactttttgctgtatttgatgaagggaaaagttggcactcagaaacaaagaactccttgatgcaggatagggatgctgcatctgctcgggcctggcctaaaatgcacacagtcaatggttatgtaaacaggtctctgccaggtctgattggatgccacaggaaatcagtctattggcatgtgattggaatgggcaccactcctgaagtgcactcaatattcctcgaaggtcacacatttcttgtgaggaaccatcgccaggctagcttggaaatctcgccaataactttccttactgctcaaacactcttgatggaccttggacagtttctactgttttgtcatatctcttcccaccaacatgatggcatggaagcttatgtcaaagtagacagctgtccagaggaaccccaactacgaatgaaaaataatgaagaagcggaagactatgatgatgatcttactgattctgaaatggatgtggtcaggtttgatgatgacaactctccttcctttatccaaattcgctcagttgccaagaagcatcctaaaacttgggtacattacattgctgctgaagaggaggactgggactatgctcccttagtcctcgcccccgatgacagaagttataaaagtcaatatttgaacaatggccctcagcggattggtaggaagtacaaaaaagtccgatttatggcatacacagatgaaacctttaagactcgtgaagctattcagcatgaatcaggaatcttgggacctttactttatggggaagttggagacacactgttgattatatttaagaatcaagcaagcagaccatataacatctaccctcacggaatcactgatgtccgtcctttgtattcaaggagattaccaaaaggtgtaaaacatttgaaggattttccaattctgccaggagaaatattcaaatataaatggacagtgactgtagaagatgggccaactaaatcagatcctcggtgcctgacccgctattactctagtttcgttaatatggagagagatctagcttcaggactcattggccctctcctcatctgctacaaagaatctgtagatcaaagaggaaaccagataatgtcagacaagaggaatgtcatcctgttttctgtatttgatgagaaccgaagctggtacctcacagagaatatacaacgctttctccccaatccagctggagtgcagcttgaggatccagagttccaagcctccaacatcatgcacagcatcaatggctatgtttttgatagtttgcagttgtcagtttgtttgcatgaggtggcatactggtacattctaagcattggagcacagactgacttcctttctgtcttcttctctggatataccttcaaacacaaaatggtctatgaagacacactcaccctattcccattctcaggagaaactgtcttcatgtcgatggaaaacccaggtctatggattctggggtgccacaactcagactttcggaacagaggcatgaccgccttactgaaggtttctagttgtgacaagaacactggtgattattacgaggacagttatgaagatatttcagcatacttgctgagtaaaaacaatgccattgaaccaagaagcttctctcaaaacccaccagtcttgaaacgccatcaacgggaaataactcgtactactcttcagtcagatcaagaggaaatcgattatgatgataccatatcagttgaaatgaagaaggaagattttgacatttatgatgaggatgaaaatcagagcccccgcagctttcaaaagaaaacacgacactattttattgctgcagtggagaggctctgggattatgggatgagtagctccccacatgttctaagaaacagggctcagagtggcagtgtccctcagttcaagaaagttgttttccaggaatttactgatggctcctttactcagcccttataccgtggagaactaaatgaacatttgggactcctggggccatatataagagcagaagttgaagataatatcatggtaactttcagaaatcaggcctctcgtccctattccttctattctagccttatttcttatgaggaagatcagaggcaaggagcagaacctagaaaaaactttgtcaagcctaatgaaaccaaaacttacttttggaaagtgcaacatcatatggcacccactaaagatgagtttgactgcaaagcctgggcttatttctctgatgttgacctggaaaaagatgtgcactcaggcctgattggaccccttctggtctgccacactaacacactgaaccctgctcatgggagacaagtgacagtacaggaatttgctctgtttttcaccatctttgatgagaccaaaagctggtacttcactgaaaatatggaaagaaactgcagggctccctgcaatatccagatggaagatcccacttttaaagagaattatcgcttccatgcaatcaatggctacataatggatacactacctggcttagtaatggctcaggatcaaaggattcgatggtatctgctcagcatgggcagcaatgaaaacatccattctattcatttcagtggacatgtgttcactgtacgaaaaaaagaggagtataaaatggcactgtacaatctctatccaggtgtttttgagacagtggaaatgttaccatccaaagctggaatttggcgggtggaatgccttattggcgagcatctacatgctgggatgagcacactttttctggtgtacagcaataagtgtcagactcccctgggaatggcttctggacacattagagattttcagattacagcttcaggacaatatggacagtgggccccaaagctggccagacttcattattccggatcaatcaatgcctggagcaccaaggagcccttttcttggatcaaggtggatctgttggcaccaatgattattcacggcatcaagacccagggtgcccgtcagaagttctccagcctctacatctctcagtttatcatcatgtatagtcttgatgggaagaagtggcagacttatcgaggaaattccactggaaccttaatggtcttctttggcaatgtggattcatctgggataaaacacaatatttttaaccctccaattattgctcgatacatccgtttgcacccaactcattatagcattcgcagcactcttcgcatggagttgatgggctgtgatttaaatagttgcagcatgccattgggaatggagagtaaagcaatatcagatgcacagattactgcttcatcctactttaccaatatgtttgccacctggtctccttcaaaagctcgacttcacctccaagggaggagtaatgcctggagacctcaggtgaataatccaaaagagtggctgcaagtggacttccagaagacaatgaaagtcacaggagtaactactcagggagtaaaatctctgcttaccagcatgtatgtgaaggagttcctcatctccagcagtcaagatggccatcagtggactctcttttttcagaatggcgcgccaggttctcctgctggctcccccacctcaacagaagaggggacaagcgaaagcgctacgcctgagagtggccctggctctgagccagccacctccggctctgaaacccctgcctcgagcggcaaagtaaaggtttttcagggaaatcaagactccttcacacctgtggtgaactctctagacccaccgttactgactcgctaccttcgaattcacccccagagttgggtgcaccagattgccctgaggatggaggttctgggctgcgaggcacaggacctctacggcgccggatcacctggggccgaaacggccgaacaaaaactcatctcagaagaggatctgtcacctgcaaccggtcatcatcaccatcaccattga

SEQ ID NO: 679 - protein, 1762 aa, synthetic construct
  REGION 1..1762: note = Description of Artificial Sequence: Synthetic polypeptide
ATRRYYLGAVELSWDYMQSDLGELPVDARFPPRVPKSFPFNTSVVYKKTLFVEFTDHLFNIAKPRPPWMGLLGPTIQAEVYDTVVITLKNMASHPVSLHAVGVSYWKASEGAEYDDQTSQREKEDDKVFPGGSHTYVWQVLKENGPMASDPLCLTYSYLSHVDLVKDLNSGLIGALLVCREGSLAKEKTQTLHKFILLFAVFDEGKSWHSETKNSLMQDRDAASARAWPKMHTVNGYVNRSLPGLIGCHRKSVYWHVIGMGTTPEVHSIFLEGHTFLVRNHRQASLEISPITFLTAQTLLMDLGQFLLFCHISSHQHDGMEAYVKVDSCPEEPQLRMKNNEEAEDYDDDLTDSEMDVVRFDDDNSPSFIQIRSVAKKHPKTWVHYIAAEEEDWDYAPLVLAPDDRSYKSQYLNNGPQRIGRKYKKVRFMAYTDETFKTREAIQHESGILGPLLYGEVGDTLLIIFKNQASRPYNIYPHGITDVRPLYSRRLPKGVKHLKDFPILPGEIFKYKWTVTVEDGPTKSDPRCLTRYYSSFVNMERDLASGLIGPLLICYKESVDQRGNQIMSDKRNVILFSVFDENRSWYLTENIQRFLPNPAGVQLEDPEFQASNIMHSINGYVFDSLQLSVCLHEVAYWYILSIGAQTDFLSVFFSGYTFKHKMVYEDTLTLFPFSGETVFMSMENPGLWILGCHNSDFRNRGMTALLKVSSCDKNTGDYYEDSYEDISAYLLSKNNAIEPRSFSQNPPVLKRHQREITRTTLQSDQEEIDYDDTISVEMKKEDFDIYDEDENQSPRSFQKKTRHYFIAAVERLWDYGMSSSPHVLRNRAQSGSVPQFKKVVFQEFTDGSFTQPLYRGELNEHLGLLGPYIRAEVEDNIMVTFRNQASRPYSFYSSLISYEEDQRQGAEPRKNFVKPNETKTYFWKVQHHMAPTKDEFDCKAWAYFSDVDLEKDVHSGLIGPLLVCHTNTLNPAHGRQVTVQEFALFFTIFDETKSWYFTENMERNCRAPCNIQMEDPTFKENYRFHAINGYIMDTLPGLVMAQDQRIRWYLLSMGSNENIHSIHFSGHVFTVRKKEEYKMALYNLYPGVFETVEMLPSKAGIWRVECLIGEHLHAGMSTLFLVYSNKCQTPLGMASGHIRDFQITASGQYGQWAPKLARLHYSGSINAWSTKEPFSWIKVDLLAPMIIHGIKTQGARQKFSSLYISQFIIMYSLDGKKWQTYRGNSTGTLMVFFGNVDSSGIKHNIFNPPIIARYIRLHPTHYSIRSTLRMELMGCDLNSCSMPLGMESKAISDAQITASSYFTNMFATWSPSKARLHLQGRSNAWRPQVNNPKEWLQVDFQKTMKVTGVTTQGVKSLLTSMYVKEFLISSSQDGHQWTLFFQNGKVKVFQGNQDSFTPVVNSLDPPLLTRYLRIHPQSWVHQIALRMEVLGCEAQDLYGAGSPGAETAGTSESATPESGPGSEPATSGSETPGTSESATPESGPGSEPATSGSETPGTSESATPESGPGTSTEPSEGSAPGSPAGSPTSTEEGTSESATPESGPGSEPATSGSETPGTSESATPESGPGSPAGSPTSTEEGSPAGSPTSTEEGTSTEPSEGSAPGTSESATPESGPGTSESATPESGPGTSESATPESGPGSEPATSGSETPGSEPATSGSETPGSPAGSPTSTEEGTSTEPSEGSAPGTSTEPSEGSAPGSEPATSGSETPGTSESATPESGPGTSTEPSEGSAPGAETAEQKLISEEDLSPATGHHHHHH

SEQ ID NO: 680 - DNA, 5289 bp, synthetic construct
  misc_feature 1..5289: note = Description of Artificial Sequence: Synthetic polynucleotide
  source 1..5289: mol_type = other DNA
gccaccagaagatactacctgggtgcagtggaactgtcatgggactatatgcaaagtgatctcggtgagctgcctgtggacgcaagatttcctcctagagtgccaaaatcttttccattcaacacctcagtcgtgtacaaaaagactctgtttgtagaattcacggatcaccttttcaacatcgctaagccaaggccaccctggatgggtctgctaggtcctaccatccaggctgaggtttatgatacagtggtcattacacttaagaacatggcttcccatcctgtcagtcttcatgctgttggtgtatcctactggaaagcttctgagggagctgaatatgatgatcagaccagtcaaagggagaaagaagatgataaagtcttccctggtggaagccatacatatgtctggcaggtcctgaaagagaatggtccaatggcctctgacccactgtgccttacctactcatatctttctcatgtggacctggtaaaagacttgaattcaggcctcattggagccctactagtatgtagagaagggagtctggccaaggaaaagacacagaccttgcacaaatttatactactttttgctgtatttgatgaagggaaaagttggcactcagaaacaaagaactccttgatgcaggatagggatgctgcatctgctcgggcctggcctaaaatgcacacagtcaatggttatgtaaacaggtctctgccaggtctgattggatgccacaggaaatcagtctattggcatgtgattggaatgggcaccactcctgaagtgcactcaatattcctcgaaggtcacacatttcttgtgaggaaccatcgccaggctagcttggaaatctcgccaataactttccttactgctcaaacactcttgatggaccttggacagtttctactgttttgtcatatctcttcccaccaacatgatggcatggaagcttatgtcaaagtagacagctgtccagaggaaccccaactacgaatgaaaaataatgaagaagcggaagactatgatgatgatcttactgattctgaaatggatgtggtcaggtttgatgatgacaactctccttcctttatccaaattcgctcagttgccaagaagcatcctaaaacttgggtacattacattgctgctgaagaggaggactgggactatgctcccttagtcctcgcccccgatgacagaagttataaaagtcaatatttgaacaatggccctcagcggattggtaggaagtacaaaaaagtccgatttatggcatacacagatgaaacctttaagactcgtgaagctattcagcatgaatcaggaatcttgggacctttactttatggggaagttggagacacactgttgattatatttaagaatcaagcaagcagaccatataacatctaccctcacggaatcactgatgtccgtcctttgtattcaaggagattaccaaaaggtgtaaaacatttgaaggattttccaattctgccaggagaaatattcaaatataaatggacagtgactgtagaagatgggccaactaaatcagatcctcggtgcctgacccgctattactctagtttcgttaatatggagagagatctagcttcaggactcattggccctctcctcatctgctacaaagaatctgtagatcaaagaggaaaccagataatgtcagacaagaggaatgtcatcctgttttctgtatttgatgagaaccgaagctggtacctcacagagaatatacaacgctttctccccaatccagctggagtgcagcttgaggatccagagttccaagcctccaacatcatgcacagcatcaatggctatgtttttgatagtttgcagttgtcagtttgtttgcatgaggtggcatactggtacattctaagcattggagcacagactgacttcctttctgtcttcttctctggatataccttcaaacacaaaatggtctatgaagacacactcaccctattcccattctcaggagaaactgtcttcatgtcgatggaaaacccaggtctatggattctggggtgccacaactcagactttcggaacagaggcatgaccgccttactgaaggtttctagttgtgacaagaacactggtgattattacgaggacagttatgaagatatttcagcatacttgctgagtaaaaacaatgccattgaaccaagaagcttctctcaaaacccaccagtcttgaaacgccatcaacgggaaataactcgtactactcttcagtcagatcaagaggaaatcgattatgatgataccatatcagttgaaatgaagaaggaagattttgacatttatgatgaggatgaaaatcagagcccccgcagctttcaaaagaaaacacgacactattttattgctgcagtggagaggctctgggattatgggatgagtagctccccacatgttctaagaaacagggctcagagtggcagtgtccctcagttcaagaaagttgttttccaggaatttactgatggctcctttactcagcccttataccgtggagaactaaatgaacatttgggactcctggggccatatataagagcagaagttgaagataatatcatggtaactttcagaaatcaggcctctcgtccctattccttctattctagccttatttcttatgaggaagatcagaggcaaggagcagaacctagaaaaaactttgtcaagcctaatgaaaccaaaacttacttttggaaagtgcaacatcatatggcacccactaaagatgagtttgactgcaaagcctgggcttatttctctgatgttgacctggaaaaagatgtgcactcaggcctgattggaccccttctggtctgccacactaacacactgaaccctgctcatgggagacaagtgacagtacaggaatttgctctgtttttcaccatctttgatgagaccaaaagctggtacttcactgaaaatatggaaagaaactgcagggctccctgcaatatccagatggaagatcccacttttaaagagaattatcgcttccatgcaatcaatggctacataatggatacactacctggcttagtaatggctcaggatcaaaggattcgatggtatctgctcagcatgggcagcaatgaaaacatccattctattcatttcagtggacatgtgttcactgtacgaaaaaaagaggagtataaaatggcactgtacaatctctatccaggtgtttttgagacagtggaaatgttaccatccaaagctggaatttggcgggtggaatgccttattggcgagcatctacatgctgggatgagcacactttttctggtgtacagcaataagtgtcagactcccctgggaatggcttctggacacattagagattttcagattacagcttcaggacaatatggacagtgggccccaaagctggccagacttcattattccggatcaatcaatgcctggagcaccaaggagcccttttcttggatcaaggtggatctgttggcaccaatgattattcacggcatcaagacccagggtgcccgtcagaagttctccagcctctacatctctcagtttatcatcatgtatagtcttgatgggaagaagtggcagacttatcgaggaaattccactggaaccttaatggtcttctttggcaatgtggattcatctgggataaaacacaatatttttaaccctccaattattgctcgatacatccgtttgcacccaactcattatagcattcgcagcactcttcgcatggagttgatgggctgtgatttaaatagttgcagcatgccattgggaatggagagtaaagcaatatcagatgcacagattactgcttcatcctactttaccaatatgtttgccacctggtctccttcaaaagctcgacttcacctccaagggaggagtaatgcctggagacctcaggtgaataatccaaaagagtggctgcaagtggacttccagaagacaatgaaagtcacaggagtaactactcagggagtaaaatctctgcttaccagcatgtatgtgaaggagttcctcatctccagcagtcaagatggccatcagtggactctcttttttcagaatggcaaagtaaaggtttttcagggaaatcaagactccttcacacctgtggtgaactctctagacccaccgttactgactcgctaccttcgaattcacccccagagttgggtgcaccagattgccctgaggatggaggttctgggctgcgaggcacaggacctctacggcgccggatcacctggggccgaaacggccggtacctcagagtctgctacccccgagtcagggccaggatcagagccagccacctccgggtctgagacacccgggacttccgagagtgccacccctgagtccggacccgggtccgagcccgccacttccggctccgaaactcccggcacaagcgagagcgctaccccagagtcaggaccaggaacatctacagagccctctgaaggctccgctccagggtccccagccggcagtcccactagcaccgaggagggaacctctgaaagcgccacacccgaatcagggccagggtctgagcctgctaccagcggcagcgagacaccaggcacctctgagtccgccacaccagagtccggacccggatctcccgctgggagccccacctccactgaggagggatctcctgctggctctccaacatctactgaggaaggtacctcaaccgagccatccgagggatcagctcccggcacctcagagtcggcaaccccggagtctggacccggaacttccgaaagtgccacaccagagtccggtcccgggacttcagaatcagcaacacccgagtccggccctgggtctgaacccgccacaagtggtagtgagacaccaggatcagaacctgctacctcagggtcagagacacccggatctccggcaggctcaccaacctccactgaggagggcaccagcacagaaccaagcgagggctccgcacccggaacaagcactgaacccagtgagggttcagcacccggctctgagccggccacaagtggcagtgagacacccggcacttcagagagtgccacccccgagagtggcccaggcactagtaccgagccctctgaaggcagtgcgccaggggccgaaacggccgaacaaaaactcatctcagaagaggatctgtcacctgcaaccggtcatcatcaccatcaccattga

SEQ ID NO: 681 - protein, 1762 aa, synthetic construct
  REGION 1..1762: note = Description of Artificial Sequence: Synthetic polypeptide
ATRRYYLGAVELSWDYMQSDLGELPVDARFPPRVPKSFPFNTSVVYKKTLFVEFTDHLFNIAKPRPPWMGLLGPTIQAEVYDTVVITLKNMASHPVSLHAVGVSYWKASEGAEYDDQTSQREKEDDKVFPGGSHTYVWQVLKENGPMASDPLCLTYSYLSHVDLVKDLNSGLIGALLVCREGSLAKEKTQTLHKFILLFAVFDEGKSWHSETKNSLMQDRDAASARAWPKMHTVNGYVNRSLPGLIGCHRKSVYWHVIGMGTTPEVHSIFLEGHTFLVRNHRQASLEISPITFLTAQTLLMDLGQFLLFCHISSHQHDGMEAYVKVDSCPEEPQLRMKNNEEAEDYDDDLTDSEMDVVRFDDDNSPSFIQIRSVAKKHPKTWVHYIAAEEEDWDYAPLVLAPDDRSYKSQYLNNGPQRIGRKYKKVRFMAYTDETFKTREAIQHESGILGPLLYGEVGDTLLIIFKNQASRPYNIYPHGITDVRPLYSRRLPKGVKHLKDFPILPGEIFKYKWTVTVEDGPTKSDPRCLTRYYSSFVNMERDLASGLIGPLLICYKESVDQRGNQIMSDKRNVILFSVFDENRSWYLTENIQRFLPNPAGVQLEDPEFQASNIMHSINGYVFDSLQLSVCLHEVAYWYILSIGAQTDFLSVFFSGYTFKHKMVYEDTLTLFPFSGETVFMSMENPGLWILGCHNSDFRNRGMTALLKVSSCDKNTGDYYEDSYEDISAYLLSKNNAIEPRSFSQNPPVLKRHQREITRTTLQSDQEEIDYDDTISVEMKKEDFDIYDEDENQSPRSFQKKTRHYFIAAVERLWDYGMSSSPHVLRNRAQSGSVPQFKKVVFQEFTDGSFTQPLYRGELNEHLGLLGPYIRAEVEDNIMVTFRNQASRPYSFYSSLISYEEDQRQGAEPRKNFVKPNETKTYFWKVQHHMAPTKDEFDCKAWAYFSDVDLEKDVHSGLIGPLLVCHTNTLNPAHGRQVTVQEFALFFTIFDETKSWYFTENMERNCRAPCNIQMEDPTFKENYRFHAINGYIMDTLPGLVMAQDQRIRWYLLSMGSNENIHSIHFSGHVFTVRKKEEYKMALYNLYPGVFETVEMLPSKAGIWRVECLIGEHLHAGMSTLFLVYSNKCQTPLGMASGHIRDFQITASGQYGQWAPKLARLHYSGSINAWSTKEPFSWIKVDLLAPMIIHGIKTQGARQKFSSLYISQFIIMYSLDGKKWQTYRGNSTGTLMVFFGNVDSSGIKHNIFNPPIIARYIRLHPTHYSIRSTLRMELMGCDLNSCSMPLGMESKAISDAQITASSYFTNMFATWSPSKARLHLQGRSNAWRPQVNNPKEWLQVDFQKTMKVTGVTTQGVKSLLTSMYVKEFLISSSQDGHQWTLFFQNGKVKVFQGNQDSFTPVVNSLDPPLLTRYLRIHPQSWVHQIALRMEVLGCEAQDLYGAGSPGAETAPGASPGTSSTGSPGASPGTSSTGSPGTPGSGTASSSPGSSTPSGATGSPGTPGSGTASSSPGSSTPSGATGSPGTPGSGTASSSPGSSTPSGATGSPGSSTPSGATGSPGSSPSASTGTGPGSSPSASTGTGPGASPGTSSTGSPGTPGSGTASSSPGSSTPSGATGSPGSSPSASTGTGPGSSPSASTGTGPGASPGTSSTGSPGASPGTSSTGSPGSSTPSGATGSPGSSPSASTGTGPGASPGTSSTGSPGSSPSASTGTGPGTPGSGTASSSPGSSTPSGATGSGAETAEQKLISEEDLSPATGHHHHHH

SEQ ID NO: 682 - DNA, 5289 bp, synthetic construct
  misc_feature 1..5289: note = Description of Artificial Sequence: Synthetic polynucleotide
  source 1..5289: mol_type = other DNA
gccaccagaagatactacctgggtgcagtggaactgtcatgggactatatgcaaagtgatctcggtgagctgcctgtggacgcaagatttcctcctagagtgccaaaatcttttccattcaacacctcagtcgtgtacaaaaagactctgtttgtagaattcacggatcaccttttcaacatcgctaagccaaggccaccctggatgggtctgctaggtcctaccatccaggctgaggtttatgatacagtggtcattacacttaagaacatggcttcccatcctgtcagtcttcatgctgttggtgtatcctactggaaagcttctgagggagctgaatatgatgatcagaccagtcaaagggagaaagaagatgataaagtcttccctggtggaagccatacatatgtctggcaggtcctgaaagagaatggtccaatggcctctgacccactgtgccttacctactcatatctttctcatgtggacctggtaaaagacttgaattcaggcctcattggagccctactagtatgtagagaagggagtctggccaaggaaaagacacagaccttgcacaaatttatactactttttgctgtatttgatgaagggaaaagttggcactcagaaacaaagaactccttgatgcaggatagggatgctgcatctgctcgggcctggcctaaaatgcacacagtcaatggttatgtaaacaggtctctgccaggtctgattggatgccacaggaaatcagtctattggcatgtgattggaatgggcaccactcctgaagtgcactcaatattcctcgaaggtcacacatttcttgtgaggaaccatcgccaggctagcttggaaatctcgccaataactttccttactgctcaaacactcttgatggaccttggacagtttctactgttttgtcatatctcttcccaccaacatgatggcatggaagcttatgtcaaagtagacagctgtccagaggaaccccaactacgaatgaaaaataatgaagaagcggaagactatgatgatgatcttactgattctgaaatggatgtggtcaggtttgatgatgacaactctccttcctttatccaaattcgctcagttgccaagaagcatcctaaaacttgggtacattacattgctgctgaagaggaggactgggactatgctcccttagtcctcgcccccgatgacagaagttataaaagtcaatatttgaacaatggccctcagcggattggtaggaagtacaaaaaagtccgatttatggcatacacagatgaaacctttaagactcgtgaagctattcagcatgaatcaggaatcttgggacctttactttatggggaagttggagacacactgttgattatatttaagaatcaagcaagcagaccatataacatctaccctcacggaatcactgatgtccgtcctttgtattcaaggagattaccaaaaggtgtaaaacatttgaaggattttccaattctgccaggagaaatattcaaatataaatggacagtgactgtagaagatgggccaactaaatcagatcctcggtgcctgacccgctattactctagtttcgttaatatggagagagatctagcttcaggactcattggccctctcctcatctgctacaaagaatctgtagatcaaagaggaaaccagataatgtcagacaagaggaatgtcatcctgttttctgtatttgatgagaaccgaagctggtacctcacagagaatatacaacgctttctccccaatccagctggagtgcagcttgaggatccagagttccaagcctccaacatcatgcacagcatcaatggctatgtttttgatagtttgcagttgtcagtttgtttgcatgaggtggcatactggtacattctaagcattggagcacagactgacttcctttctgtcttcttctctggatataccttcaaacacaaaatggtctatgaagacacactcaccctattcccattctcaggagaaactgtcttcatgtcgatggaaaacccaggtctatggattctggggtgccacaactcagactttcggaacagaggcatgaccgccttactgaaggtttctagttgtgacaagaacactggtgattattacgaggacagttatgaagatatttcagcatacttgctgagtaaaaacaatgccattgaaccaagaagcttctctcaaaacccaccagtcttgaaacgccatcaacgggaaataactcgtactactcttcagtcagatcaagaggaaatcgattatgatgataccatatcagttgaaatgaagaaggaagattttgacatttatgatgaggatgaaaatcagagcccccgcagctttcaaaagaaaacacgacactattttattgctgcagtggagaggctctgggattatgggatgagtagctccccacatgttctaagaaacagggctcagagtggcagtgtccctcagttcaagaaagttgttttccaggaatttactgatggctcctttactcagcccttataccgtggagaactaaatgaacatttgggactcctggggccatatataagagcagaagttgaagataatatcatggtaactttcagaaatcaggcctctcgtccctattccttctattctagccttatttcttatgaggaagatcagaggcaaggagcagaacctagaaaaaactttgtcaagcctaatgaaaccaaaacttacttttggaaagtgcaacatcatatggcacccactaaagatgagtttgactgcaaagcctgggcttatttctctgatgttgacctggaaaaagatgtgcactcaggcctgattggaccccttctggtctgccacactaacacactgaaccctgctcatgggagacaagtgacagtacaggaatttgctctgtttttcaccatctttgatgagaccaaaagctggtacttcactgaaaatatggaaagaaactgcagggctccctgcaatatccagatggaagatcccacttttaaagagaattatcgcttccatgcaatcaatggctacataatggatacactacctggcttagtaatggctcaggatcaaaggattcgatggtatctgctcagcatgggcagcaatgaaaacatccattctattcatttcagtggacatgtgttcactgtacgaaaaaaagaggagtataaaatggcactgtacaatctctatccaggtgtttttgagacagtggaaatgttaccatccaaagctggaatttggcgggtggaatgccttattggcgagcatctacatgctgggatgagcacactttttctggtgtacagcaataagtgtcagactcccctgggaatggcttctggacacattagagattttcagattacagcttcaggacaatatggacagtgggccccaaagctggccagacttcattattccggatcaatcaatgcctggagcaccaaggagcccttttcttggatcaaggtggatctgttggcaccaatgattattcacggcatcaagacccagggtgcccgtcagaagttctccagcctctacatctctcagtttatcatcatgtatagtcttgatgggaagaagtggcagacttatcgaggaaattccactggaaccttaatggtcttctttggcaatgtggattcatctgggataaaacacaatatttttaaccctccaattattgctcgatacatccgtttgcacccaactcattatagcattcgcagcactcttcgcatggagttgatgggctgtgatttaaatagttgcagcatgccattgggaatggagagtaaagcaatatcagatgcacagattactgcttcatcctactttaccaatatgtttgccacctggtctccttcaaaagctcgacttcacctccaagggaggagtaatgcctggagacctcaggtgaataatccaaaagagtggctgcaagtggacttccagaagacaatgaaagtcacaggagtaactactcagggagtaaaatctctgcttaccagcatgtatgtgaaggagttcctcatctccagcagtcaagatggccatcagtggactctcttttttcagaatggcaaagtaaaggtttttcagggaaatcaagactccttcacacctgtggtgaactctctagacccaccgttactgactcgctaccttcgaattcacccccagagttgggtgcaccagattgccctgaggatggaggttctgggctgcgaggcacaggacctctacggcgccggatcacctggggccgaaacggccccgggagcgtcacccggtacgtcctcaacggggagccctggggcatcacccggcacgtcctcgacagggtcccccggaacaccgggttcggggactgcgtcgtcgtcacccggttcgtcaacacccagcggtgcgacgggttccccgggaacccccggatcaggaacagcgtcgtcgagccccggaagctcgaccccgtcaggagcgaccgggtcgccaggaacgcctgggtcgggtactgcctcatcgtcgccgggttcatcgacgccctccggagcaacaggttcacccgggtcgtccacccccagcggagcgactggatcaccgggatcgagcccgtcggcatcgacaggaacaggtcccggtagctccccatcggcctccacggggacggggcctggtgcgtcaccggggacaagcagcacgggttcgccgggaacgccagggtcagggaccgcgtcgtcgagcccagggtcgtccaccccaagcggggctactgggtccccgggtagctcgccgagcgcatcaacgggaaccggaccgggcagctccccctcagcgtcgacagggacaggccctggcgcgagcccgggaacatcgtcgacggggtcacccggagcatcgccagggacctcgtcaactggctcgcctggatcgtcaacgccctcgggagccacggggtcgcccggatcatccccgtccgcctcaactggcacaggccctggtgcttcccctggaacgtccagcacaggctcccccggttccagcccttccgcttcgactgggactggacccggaaccccgggatcggggacagcgtcaagctcgcccggaagctccacgccttcgggggcaaccgggtcaggggccgaaacggccgaacaaaaactcatctcagaagaggatctgtcacctgcaaccggtcatcatcaccatcaccattga

SEQ ID NO: 683 - protein, 1619 aa, synthetic construct
  REGION 1..1619: note = Description of Artificial Sequence: Synthetic polypeptide
ATRRYYLGAVELSWDYMQSDLGELPVDARFPPRVPKSFPFNTSVVYKKTLFVEFTDHLFNIAKPRPPWMGLLGPTIQAEVYDTVVITLKNMASHPVSLHAVGVSYWKASEGAEYDDQTSQREKEDDKVFPGGSHTYVWQVLKENGPMASDPLCLTYSYLSHVDLVKDLNSGLIGALLVCREGSLAKEKTQTLHKFILLFAVFDEGKSWHSETKNSLMQDRDAASARAWPKMHTVNGYVNRSLPGLIGCHRKSVYWHVIGMGTTPEVHSIFLEGHTFLVRNHRQASLEISPITFLTAQTLLMDLGQFLLFCHISSHQHDGMEAYVKVDSCPEEPQLRMKNNEEAEDYDDDLTDSEMDVVRFDDDNSPSFIQIRSVAKKHPKTWVHYIAAEEEDWDYAPLVLAPDGAPTSTEPSEGSAPGSPAGSPTSTEEGTSTEPSEGSAPGTSTEPSEGSAPGTSESATPESGPGTSTEPSEGSAPGTSESATPESGPGSEPATSGSETPGTSTEPSEGSAPGTSTEPSEGSAPGTSESATPESGPGTSESATPESGPGASSDRSYKSQYLNNGPQRIGRKYKKVRFMAYTDETFKTREAIQHESGILGPLLYGEVGDTLLIIFKNQASRPYNIYPHGITDVRPLYSRRLPKGVKHLKDFPILPGEIFKYKWTVTVEDGPTKSDPRCLTRYYSSFVNMERDLASGLIGPLLICYKESVDQRGNQIMSDKRNVILFSVFDENRSWYLTENIQRFLPNPAGVQLEDPEFQASNIMHSINGYVFDSLQLSVCLHEVAYWYILSIGAQTDFLSVFFSGYTFKHKMVYEDTLTLFPFSGETVFMSMENPGLWILGCHNSDFRNRGMTALLKVSSCDKNTGDYYEDSYEDISAYLLSKNNAIEPRSFSQNPPVLKRHQREITRTTLQSDQEEIDYDDTISVEMKKEDFDIYDEDENQSPRSFQKKTRHYFIAAVERLWDYGMSSSPHVLRNRAQSGSVPQFKKVVFQEFTDGSFTQPLYRGELNEHLGLLGPYIRAEVEDNIMVTFRNQASRPYSFYSSLISYEEDQRQGAEPRKNFVKPNETKTYFWKVQHHMAPTKDEFDCKAWAYFSDVDLEKDVHSGLIGPLLVCHTNTLNPAHGRQVTVQEFALFFTIFDETKSWYFTENMERNCRAPCNIQMEDPTFKENYRFHAINGYIMDTLPGLVMAQDQRIRWYLLSMGSNENIHSIHFSGHVFTVRKKEEYKMALYNLYPGVFETVEMLPSKAGIWRVECLIGEHLHAGMSTLFLVYSNKCQTPLGMASGHIRDFQITASGQYGQWAPKLARLHYSGSINAWSTKEPFSWIKVDLLAPMIIHGIKTQGARQKFSSLYISQFIIMYSLDGKKWQTYRGNSTGTLMVFFGNVDSSGIKHNIFNPPIIARYIRLHPTHYSIRSTLRMELMGCDLNSCSMPLGMESKAISDAQITASSYFTNMFATWSPSKARLHLQGRSNAWRPQVNNPKEWLQVDFQKTMKVTGVTTQGVKSLLTSMYVKEFLISSSQDGHQWTLFFQNGKVKVFQGNQDSFTPVVNSLDPPLLTRYLRIHPQSWVHQIALRMEVLGCEAQDLYGAGSPGAETAEQKLISEEDLSPATGHHHHHH

SEQ ID NO: 684 - DNA, 4860 bp, synthetic construct
  misc_feature 1..4860: note = Description of Artificial Sequence: Synthetic polynucleotide
  source 1..4860: mol_type = other DNA
gccaccagaagatactacctgggtgcagtggaactgtcatgggactatatgcaaagtgatctcggtgagctgcctgtggacgcaagatttcctcctagagtgccaaaatcttttccattcaacacctcagtcgtgtacaaaaagactctgtttgtagaattcacggatcaccttttcaacatcgctaagccaaggccaccctggatgggtctgctaggtcctaccatccaggctgaggtttatgatacagtggtcattacacttaagaacatggcttcccatcctgtcagtcttcatgctgttggtgtatcctactggaaagcttctgagggagctgaatatgatgatcagaccagtcaaagggagaaagaagatgataaagtcttccctggtggaagccatacatatgtctggcaggtcctgaaagagaatggtccaatggcctctgacccactgtgccttacctactcatatctttctcatgtggacctggtaaaagacttgaattcaggcctcattggagccctactagtatgtagagaagggagtctggccaaggaaaagacacagaccttgcacaaatttatactactttttgctgtatttgatgaagggaaaagttggcactcagaaacaaagaactccttgatgcaggatagggatgctgcatctgctcgggcctggcctaaaatgcacacagtcaatggttatgtaaacaggtctctgccaggtctgattggatgccacaggaaatcagtctattggcatgtgattggaatgggcaccactcctgaagtgcactcaatattcctcgaaggtcacacatttcttgtgaggaaccatcgccaggctagcttggaaatctcgccaataactttccttactgctcaaacactcttgatggaccttggacagtttctactgttttgtcatatctcttcccaccaacatgatggcatggaagcttatgtcaaagtagacagctgtccagaggaaccccaactacgaatgaaaaataatgaagaagcggaagactatgatgatgatcttactgattctgaaatggatgtggtcaggtttgatgatgacaactctccttcctttatccaaattcgctcagttgccaagaagcatcctaaaacttgggtacattacattgctgctgaagaggaggactgggactatgctcccttagtcctcgcccccgatggcgcgccaaccagtacggagccgtccgaggggagcgcaccaggaagcccggctgggagcccgacttctaccgaagagggtacatctaccgaaccaagtgaaggttcagcaccaggcacctcaacagaaccctctgagggctcggcgcctggtacaagtgagtccgccaccccagaatccgggcctgggacaagcacagaaccttcggaagggagtgcccctggaacatccgaatcggcaaccccagaatcagggccaggatctgagcccgcgacttcgggctccgagacgcctgggacatccaccgagccctccgaaggatcagccccaggcaccagcacggagccctctgagggaagcgcacctggtaccagcgaaagcgcaactcccgaatcaggtcccggtacgagcgagtcggcgaccccggagagcgggccaggtgcctcgagcgacagaagttataaaagtcaatatttgaacaatggccctcagcggattggtaggaagtacaaaaaagtccgatttatggcatacacagatgaaacctttaagactcgtgaagctattcagcatgaatcaggaatcttgggacctttactttatggggaagttggagacacactgttgattatatttaagaatcaagcaagcagaccatataacatctaccctcacggaatcactgatgtccgtcctttgtattcaaggagattaccaaaaggtgtaaaacatttgaaggattttccaattctgccaggagaaatattcaaatataaatggacagtgactgtagaagatgggccaactaaatcagatcctcggtgcctgacccgctattactctagtttcgttaatatggagagagatctagcttcaggactcattggccctctcctcatctgctacaaagaatctgtagatcaaagaggaaaccagataatgtcagacaagaggaatgtcatcctgttttctgtatttgatgagaaccgaagctggtacctcacagagaatatacaacgctttctccccaatccagctggagtgcagcttgaggatccagagttccaagcctccaacatcatgcacagcatcaatggctatgtttttgatagtttgcagttgtcagtttgtttgcatgaggtggcatactggtacattctaagcattggagcacagactgacttcctttctgtcttcttctctggatataccttcaaacacaaaatggtctatgaagacacactcaccctattcccattctcaggagaaactgtcttcatgtcgatggaaaacccaggtctatggattctggggtgccacaactcagactttcggaacagaggcatgaccgccttactgaaggtttctagttgtgacaagaacactggtgattattacgaggacagttatgaagatatttcagcatacttgctgagtaaaaacaatgccattgaaccaagaagcttctctcaaaacccaccagtcttgaaacgccatcaacgggaaataactcgtactactcttcagtcagatcaagaggaaatcgattatgatgataccatatcagttgaaatgaagaaggaagattttgacatttatgatgaggatgaaaatcagagcccccgcagctttcaaaagaaaacacgacactattttattgctgcagtggagaggctctgggattatgggatgagtagctccccacatgttctaagaaacagggctcagagtggcagtgtccctcagttcaagaaagttgttttccaggaatttactgatggctcctttactcagcccttataccgtggagaactaaatgaacatttgggactcctggggccatatataagagcagaagttgaagataatatcatggtaactttcagaaatcaggcctctcgtccctattccttctattctagccttatttcttatgaggaagatcagaggcaaggagcagaacctagaaaaaactttgtcaagcctaatgaaaccaaaacttacttttggaaagtgcaacatcatatggcacccactaaagatgagtttgactgcaaagcctgggcttatttctctgatgttgacctggaaaaagatgtgcactcaggcctgattggaccccttctggtctgccacactaacacactgaaccctgctcatgggagacaagtgacagtacaggaatttgctctgtttttcaccatctttgatgagaccaaaagctggtacttcactgaaaatatggaaagaaactgcagggctccctgcaatatccagatggaagatcccacttttaaagagaattatcgcttccatgcaatcaatggctacataatggatacactacctggcttagtaatggctcaggatcaaaggattcgatggtatctgctcagcatgggcagcaatgaaaacatccattctattcatttcagtggacatgtgttcactgtacgaaaaaaagaggagtataaaatggcactgtacaatctctatccaggtgtttttgagacagtggaaatgttaccatccaaagctggaatttggcgggtggaatgccttattggcgagcatctacatgctgggatgagcacactttttctggtgtacagcaataagtgtcagactcccctgggaatggcttctggacacattagagattttcagattacagcttcaggacaatatggacagtgggccccaaagctggccagacttcattattccggatcaatcaatgcctggagcaccaaggagcccttttcttggatcaaggtggatctgttggcaccaatgattattcacggcatcaagacccagggtgcccgtcagaagttctccagcctctacatctctcagtttatcatcatgtatagtcttgatgggaagaagtggcagacttatcgaggaaattccactggaaccttaatggtcttctttggcaatgtggattcatctgggataaaacacaatatttttaaccctccaattattgctcgatacatccgtttgcacccaactcattatagcattcgcagcactcttcgcatggagttgatgggctgtgatttaaatagttgcagcatgccattgggaatggagagtaaagcaatatcagatgcacagattactgcttcatcctactttaccaatatgtttgccacctggtctccttcaaaagctcgacttcacctccaagggaggagtaatgcctggagacctcaggtgaataatccaaaagagtggctgcaagtggacttccagaagacaatgaaagtcacaggagtaactactcagggagtaaaatctctgcttaccagcatgtatgtgaaggagttcctcatctccagcagtcaagatggccatcagtggactctcttttttcagaatggcaaagtaaaggtttttcagggaaatcaagactccttcacacctgtggtgaactctctagacccaccgttactgactcgctaccttcgaattcacccccagagttgggtgcaccagattgccctgaggatggaggttctgggctgcgaggcacaggacctctacggcgccggatcacctggggccgaaacggccgaacaaaaactcatctcagaagaggatctgtcacctgcaaccggtcatcatcaccatcaccattga

SEQ ID NO: 685 - protein, 1619 aa, synthetic construct
  REGION 1..1619: note = Description of Artificial Sequence: Synthetic polypeptide
ATRRYYLGAVELSWDYMQSDLGELPVDARFPPRVPKSFPFNTSVVYKKTLFVEFTDHLFNIAKPRPPWMGLLGPTIQAEVYDTVVITLKNMASHPVSLHAVGVSYWKASEGAEYDDQTSQREKEDDKVFPGGSHTYVWQVLKENGPMASDPLCLTYSYLSHVDLVKDLNSGLIGALLVCREGSLAKEKTQTLHKFILLFAVFDEGKSWHSETKNSLMQDRDAASARAWPKMHTVNGYVNRSLPGLIGCHRKSVYWHVIGMGTTPEVHSIFLEGHTFLVRNHRQASLEISPITFLTAQTLLMDLGQFLLFCHISSHQHDGMEAYVKVDSCPEEPQLRMKNNEEAEDYDDDLTDSEMDVVRFDDDNSPSFIQIRSVAKKHPKTWVHYIAAEEEDWDYAPLVLAPDDRSYKSQYLNNGPQRIGRKYKKVRFMAYTDETFKTREAIQHESGILGPLLYGEVGDTLLIIFKNQASRPYNIYPHGITDVRPLYSRRLPKGVKHLKDFPILPGEIFKYKWTVTVEDGPTKSDPRCLTRYYSSFVNMERDLASGLIGPLLICYKESVDQRGNQIMSDKRNVILFSVFDENRSWYLTENIQRFLPNPAGAPTSTEPSEGSAPGSPAGSPTSTEEGTSTEPSEGSAPGTSTEPSEGSAPGTSESATPESGPGTSTEPSEGSAPGTSESATPESGPGSEPATSGSETPGTSTEPSEGSAPGTSTEPSEGSAPGTSESATPESGPGTSESATPESGPGASSGVQLEDPEFQASNIMHSINGYVFDSLQLSVCLHEVAYWYILSIGAQTDFLSVFFSGYTFKHKMVYEDTLTLFPFSGETVFMSMENPGLWILGCHNSDFRNRGMTALLKVSSCDKNTGDYYEDSYEDISAYLLSKNNAIEPRSFSQNPPVLKRHQREITRTTLQSDQEEIDYDDTISVEMKKEDFDIYDEDENQSPRSFQKKTRHYFIAAVERLWDYGMSSSPHVLRNRAQSGSVPQFKKVVFQEFTDGSFTQPLYRGELNEHLGLLGPYIRAEVEDNIMVTFRNQASRPYSFYSSLISYEEDQRQGAEPRKNFVKPNETKTYFWKVQHHMAPTKDEFDCKAWAYFSDVDLEKDVHSGLIGPLLVCHTNTLNPAHGRQVTVQEFALFFTIFDETKSWYFTENMERNCRAPCNIQMEDPTFKENYRFHAINGYIMDTLPGLVMAQDQRIRWYLLSMGSNENIHSIHFSGHVFTVRKKEEYKMALYNLYPGVFETVEMLPSKAGIWRVECLIGEHLHAGMSTLFLVYSNKCQTPLGMASGHIRDFQITASGQYGQWAPKLARLHYSGSINAWSTKEPFSWIKVDLLAPMIIHGIKTQGARQKFSSLYISQFIIMYSLDGKKWQTYRGNSTGTLMVFFGNVDSSGIKHNIFNPPIIARYIRLHPTHYSIRSTLRMELMGCDLNSCSMPLGMESKAISDAQITASSYFTNMFATWSPSKARLHLQGRSNAWRPQVNNPKEWLQVDFQKTMKVTGVTTQGVKSLLTSMYVKEFLISSSQDGHQWTLFFQNGKVKVFQGNQDSFTPVVNSLDPPLLTRYLRIHPQSWVHQIALRMEVLGCEAQDLYGAGSPGAETAEQKLISEEDLSPATGHHHHHH

SEQ ID NO: 686 - DNA, 4860 bp, synthetic construct
  misc_feature 1..4860: note = Description of Artificial Sequence: Synthetic polynucleotide
  source 1..4860: mol_type = other DNA
gccaccagaagatactacctgggtgcagtggaactgtcatgggactatatgcaaagtgatctcggtgagctgcctgtggacgcaagatttcctcctagagtgccaaaatcttttccattcaacacctcagtcgtgtacaaaaagactctgtttgtagaattcacggatcaccttttcaacatcgctaagccaaggccaccctggatgggtctgctaggtcctaccatccaggctgaggtttatgatacagtggtcattacacttaagaacatggcttcccatcctgtcagtcttcatgctgttggtgtatcctactggaaagcttctgagggagctgaatatgatgatcagaccagtcaaagggagaaagaagatgataaagtcttccctggtggaagccatacatatgtctggcaggtcctgaaagagaatggtccaatggcctctgacccactgtgccttacctactcatatctttctcatgtggacctggtaaaagacttgaattcaggcctcattggagccctactagtatgtagagaagggagtctggccaaggaaaagacacagaccttgcacaaatttatactactttttgctgtatttgatgaagggaaaagttggcactcagaaacaaagaactccttgatgcaggatagggatgctgcatctgctcgggcctggcctaaaatgcacacagtcaatggttatgtaaacaggtctctgccaggtctgattggatgccacaggaaatcagtctattggcatgtgattggaatgggcaccactcctgaagtgcactcaatattcctcgaaggtcacacatttcttgtgaggaaccatcgccaggctagcttggaaatctcgccaataactttccttactgctcaaacactcttgatggaccttggacagtttctactgttttgtcatatctcttcccaccaacatgatggcatggaagcttatgtcaaagtagacagctgtccagaggaaccccaactacgaatgaaaaataatgaagaagcggaagactatgatgatgatcttactgattctgaaatggatgtggtcaggtttgatgatgacaactctccttcctttatccaaattcgctcagttgccaagaagcatcctaaaacttgggtacattacattgctgctgaagaggaggactgggactatgctcccttagtcctcgcccccgatgacagaagttataaaagtcaatatttgaacaatggccctcagcggattggtaggaagtacaaaaaagtccgatttatggcatacacagatgaaacctttaagactcgtgaagctattcagcatgaatcaggaatcttgggacctttactttatggggaagttggagacacactgttgattatatttaagaatcaagcaagcagaccatataacatctaccctcacggaatcactgatgtccgtcctttgtattcaaggagattaccaaaaggtgtaaaacatttgaaggattttccaattctgccaggagaaatattcaaatataaatggacagtgactgtagaagatgggccaactaaatcagatcctcggtgcctgacccgctattactctagtttcgttaatatggagagagatctagcttcaggactcattggccctctcctcatctgctacaaagaatctgtagatcaaagaggaaaccagataatgtcagacaagaggaatgtcatcctgttttctgtatttgatgagaaccgaagctggtacctcacagagaatatacaacgctttctccccaatccagctggcgcgccaaccagtacggagccgtccgaggggagcgcaccaggaagcccggctgggagcccgacttctaccgaagagggtacatctaccgaaccaagtgaaggttcagcaccaggcacctcaacagaaccctctgagggctcggcgcctggtacaagtgagtccgccaccccagaatccgggcctgggacaagcacagaaccttcggaagggagtgcccctggaacatccgaatcggcaaccccagaatcagggccaggatctgagcccgcgacttcgggctccgagacgcctgggacatccaccgagccctccgaaggatcagccccaggcaccagcacggagccctctgagggaagcgcacctggtaccagcgaaagcgcaactcccgaatcaggtcccggtacgagcgagtcggcgaccccggagagcgggccaggtgcctcgagcggagtgcagcttgaggatccagagttccaagcctccaacatcatgcacagcatcaatggctatgtttttgatagtttgcagttgtcagtttgtttgcatgaggtggcatactggtacattctaagcattggagcacagactgacttcctttctgtcttcttctctggatataccttcaaacacaaaatggtctatgaagacacactcaccctattcccattctcaggagaaactgtcttcatgtcgatggaaaacccaggtctatggattctggggtgccacaactcagactttcggaacagaggcatgaccgccttactgaaggtttctagttgtgacaagaacactggtgattattacgaggacagttatgaagatatttcagcatacttgctgagtaaaaacaatgccattgaaccaagaagcttctctcaaaacccaccagtcttgaaacgccatcaacgggaaataactcgtactactcttcagtcagatcaagaggaaatcgattatgatgataccatatcagttgaaatgaagaaggaagattttgacatttatgatgaggatgaaaatcagagcccccgcagctttcaaaagaaaacacgacactattttattgctgcagtggagaggctctgggattatgggatgagtagctccccacatgttctaagaaacagggctcagagtggcagtgtccctcagttcaagaaagttgttttccaggaatttactgatggctcctttactcagcccttataccgtggagaactaaatgaacatttgggactcctggggccatatataagagcagaagttgaagataatatcatggtaactttcagaaatcaggcctctcgtccctattccttctattctagccttatttcttatgaggaagatcagaggcaaggagcagaacctagaaaaaactttgtcaagcctaatgaaaccaaaacttacttttggaaagtgcaacatcatatggcacccactaaagatgagtttgactgcaaagcctgggcttatttctctgatgttgacctggaaaaagatgtgcactcaggcctgattggaccccttctggtctgccacactaacacactgaaccctgctcatgggagacaagtgacagtacaggaatttgctctgtttttcaccatctttgatgagaccaaaagctggtacttcactgaaaatatggaaagaaactgcagggctccctgcaatatccagatggaagatcccacttttaaagagaattatcgcttccatgcaatcaatggctacataatggatacactacctggcttagtaatggctcaggatcaaaggattcgatggtatctgctcagcatgggcagcaatgaaaacatccattctattcatttcagtggacatgtgttcactgtacgaaaaaaagaggagtataaaatggcactgtacaatctctatccaggtgtttttgagacagtggaaatgttaccatccaaagctggaatttggcgggtggaatgccttattggcgagcatctacatgctgggatgagcacactttttctggtgtacagcaataagtgtcagactcccctgggaatggcttctggacacattagagattttcagattacagcttcaggacaatatggacagtgggccccaaagctggccagacttcattattccggatcaatcaatgcctggagcaccaaggagcccttttcttggatcaaggtggatctgttggcaccaatgattattcacggcatcaagacccagggtgcccgtcagaagttctccagcctctacatctctcagtttatcatcatgtatagtcttgatgggaagaagtggcagacttatcgaggaaattccactggaaccttaatggtcttctttggcaatgtggattcatctgggataaaacacaatatttttaaccctccaattattgctcgatacatccgtttgcacccaactcattatagcattcgcagcactcttcgcatggagttgatgggctgtgatttaaatagttgcagcatgccattgggaatggagagtaaagcaatatcagatgcacagattactgcttcatcctactttaccaatatgtttgccacctggtctccttcaaaagctcgacttcacctccaagggaggagtaatgcctggagacctcaggtgaataatccaaaagagtggctgcaagtggacttccagaagacaatgaaagtcacaggagtaactactcagggagtaaaatctctgcttaccagcatgtatgtgaaggagttcctcatctccagcagtcaagatggccatcagtggactctcttttttcagaatggcaaagtaaaggtttttcagggaaatcaagactccttcacacctgtggtgaactctctagacccaccgttactgactcgctaccttcgaattcacccccagagttgggtgcaccagattgccctgaggatggaggttctgggctgcgaggcacaggacctctacggcgccggatcacctggggccgaaacggccgaacaaaaactcatctcagaagaggatctgtcacctgcaaccggtcatcatcaccatcaccattga

SEQ ID NO: 687 - protein, 1619 aa, synthetic construct
  REGION 1..1619: note = Description of Artificial Sequence: Synthetic polypeptide
ATRRYYLGAVELSWDYMQSDLGELPVDARFPPRVPKSFPFNTSVVYKKTLFVEFTDHLFNIAKPRPPWMGLLGPTIQAEVYDTVVITLKNMASHPVSLHAVGVSYWKASEGAEYDDQTSQREKEDDKVFPGGSHTYVWQVLKENGPMASDPLCLTYSYLSHVDLVKDLNSGLIGALLVCREGSLAKEKTQTLHKFILLFAVFDEGKSWHSETKNSLMQDRDAASARAWPKMHTVNGYVNRSLPGLIGCHRKSVYWHVIGMGTTPEVHSIFLEGHTFLVRNHRQASLEISPITFLTAQTLLMDLGQFLLFCHISSHQHDGMEAYVKVDSCPEEPQLRMKNNEEAEDYDDDLTDSEMDVVRFDDDNSPSFIQIRSVAKKHPKTWVHYIAAEEEDWDYAPLVLAPDGAPGASPGTSSTGSPGSSPSASTGTGPGSSPSASTGTGPGTPGSGTASSSPGSSTPSGATGSPGSSPSASTGTGPGASPGTSSTGSPGTPGSGTASSSPGSSTPSGATGSPGTPGSGTASSSPGASPGTSSTGSPGASPGTSSTGSPASSDRSYKSQYLNNGPQRIGRKYKKVRFMAYTDETFKTREAIQHESGILGPLLYGEVGDTLLIIFKNQASRPYNIYPHGITDVRPLYSRRLPKGVKHLKDFPILPGEIFKYKWTVTVEDGPTKSDPRCLTRYYSSFVNMERDLASGLIGPLLICYKESVDQRGNQIMSDKRNVILFSVFDENRSWYLTENIQRFLPNPAGVQLEDPEFQASNIMHSINGYVFDSLQLSVCLHEVAYWYILSIGAQTDFLSVFFSGYTFKHKMVYEDTLTLFPFSGETVFMSMENPGLWILGCHNSDFRNRGMTALLKVSSCDKNTGDYYEDSYEDISAYLLSKNNAIEPRSFSQNPPVLKRHQREITRTTLQSDQEEIDYDDTISVEMKKEDFDIYDEDENQSPRSFQKKTRHYFIAAVERLWDYGMSSSPHVLRNRAQSGSVPQFKKVVFQEFTDGSFTQPLYRGELNEHLGLLGPYIRAEVEDNIMVTFRNQASRPYSFYSSLISYEEDQRQGAEPRKNFVKPNETKTYFWKVQHHMAPTKDEFDCKAWAYFSDVDLEKDVHSGLIGPLLVCHTNTLNPAHGRQVTVQEFALFFTIFDETKSWYFTENMERNCRAPCNIQMEDPTFKENYRFHAINGYIMDTLPGLVMAQDQRIRWYLLSMGSNENIHSIHFSGHVFTVRKKEEYKMALYNLYPGVFETVEMLPSKAGIWRVECLIGEHLHAGMSTLFLVYSNKCQTPLGMASGHIRDFQITASGQYGQWAPKLARLHYSGSINAWSTKEPFSWIKVDLLAPMIIHGIKTQGARQKFSSLYISQFIIMYSLDGKKWQTYRGNSTGTLMVFFGNVDSSGIKHNIFNPPIIARYIRLHPTHYSIRSTLRMELMGCDLNSCSMPLGMESKAISDAQITASSYFTNMFATWSPSKARLHLQGRSNAWRPQVNNPKEWLQVDFQKTMKVTGVTTQGVKSLLTSMYVKEFLISSSQDGHQWTLFFQNGKVKVFQGNQDSFTPVVNSLDPPLLTRYLRIHPQSWVHQIALRMEVLGCEAQDLYGAGSPGAETAEQKLISEEDLSPATGHHHHHH

SEQ ID NO: 688 - DNA, 4860 bp, synthetic construct
  misc_feature 1..4860: note = Description of Artificial Sequence: Synthetic polynucleotide
  source 1..4860: mol_type = other DNA
gccaccagaagatactacctgggtgcagtggaactgtcatgggactatatgcaaagtgatctcggtgagctgcctgtggacgcaagatttcctcctagagtgccaaaatcttttccattcaacacctcagtcgtgtacaaaaagactctgtttgtagaattcacggatcaccttttcaacatcgctaagccaaggccaccctggatgggtctgctaggtcctaccatccaggctgaggtttatgatacagtggtcattacacttaagaacatggcttcccatcctgtcagtcttcatgctgttggtgtatcctactggaaagcttctgagggagctgaatatgatgatcagaccagtcaaagggagaaagaagatgataaagtcttccctggtggaagccatacatatgtctggcaggtcctgaaagagaatggtccaatggcctctgacccactgtgccttacctactcatatctttctcatgtggacctggtaaaagacttgaattcaggcctcattggagccctactagtatgtagagaagggagtctggccaaggaaaagacacagaccttgcacaaatttatactactttttgctgtatttgatgaagggaaaagttggcactcagaaacaaagaactccttgatgcaggatagggatgctgcatctgctcgggcctggcctaaaatgcacacagtcaatggttatgtaaacaggtctctgccaggtctgattggatgccacaggaaatcagtctattggcatgtgattggaatgggcaccactcctgaagtgcactcaatattcctcgaaggtcacacatttcttgtgaggaaccatcgccaggctagcttggaaatctcgccaataactttccttactgctcaaacactcttgatggaccttggacagtttctactgttttgtcatatctcttcccaccaacatgatggcatggaagcttatgtcaaagtagacagctgtccagaggaaccccaactacgaatgaaaaataatgaagaagcggaagactatgatgatgatcttactgattctgaaatggatgtggtcaggtttgatgatgacaactctccttcctttatccaaattcgctcagttgccaagaagcatcctaaaacttgggtacattacattgctgctgaagaggaggactgggactatgctcccttagtcctcgcccccgatggcgcgccaggtgcctcgccgggaacatcatcaactggttcacccgggtcatccccctcggcctcaaccgggacgggtcccggctcatcccccagcgccagcactggaacaggtcctggcactcctggttccggtacggcatcgtcatccccgggaagctcaacaccgtccggagcgacaggatcacctggctcgtcaccttcggcgtcaactggaacggggccaggggcctcacccggaacgtcctcgactgggtcgcctggtacgccgggatcaggaacggcctcatcctcgcctgggtcctcaacgccctcgggtgcgactggttcgccgggaactcctggctcggggacggcctcgtcgtcgcctggggcatcaccggggacgagctccacggggtcccctggagcgtcaccggggacctcctcgacaggtagcccggcctcgagcgacagaagttataaaagtcaatatttgaacaatggccctcagcggattggtaggaagtacaaaaaagtccgatttatggcatacacagatgaaacctttaagactcgtgaagctattcagcatgaatcaggaatcttgggacctttactttatggggaagttggagacacactgttgattatatttaagaatcaagcaagcagaccatataacatctaccctcacggaatcactgatgtccgtcctttgtattcaaggagattaccaaaaggtgtaaaacatttgaaggattttccaattctgccaggagaaatattcaaatataaatggacagtgactgtagaagatgggccaactaaatcagatcctcggtgcctgacccgctattactctagtttcgttaatatggagagagatctagcttcaggactcattggccctctcctcatctgctacaaagaatctgtagatcaaagaggaaaccagataatgtcagacaagaggaatgtcatcctgttttctgtatttgatgagaaccgaagctggtacctcacagagaatatacaacgctttctccccaatccagctggagtgcagcttgaggatccagagttccaagcctccaacatcatgcacagcatcaatggctatgtttttgatagtttgcagttgtcagtttgtttgcatgaggtggcatactggtacattctaagcattggagcacagactgacttcctttctgtcttcttctctggatataccttcaaacacaaaatggtctatgaagacacactcaccctattcccattctcaggagaaactgtcttcatgtcgatggaaaacccaggtctatggattctggggtgccacaactcagactttcggaacagaggcatgaccgccttactgaaggtttctagttgtgacaagaacactggtgattattacgaggacagttatgaagatatttcagcatacttgctgagtaaaaacaatgccattgaaccaagaagcttctctcaaaacccaccagtcttgaaacgccatcaacgggaaataactcgtactactcttcagtcagatcaagaggaaatcgattatgatgataccatatcagttgaaatgaagaaggaagattttgacatttatgatgaggatgaaaatcagagcccccgcagctttcaaaagaaaacacgacactattttattgctgcagtggagaggctctgggattatgggatgagtagctccccacatgttctaagaaacagggctcagagtggcagtgtccctcagttcaagaaagttgttttccaggaatttactgatggctcctttactcagcccttataccgtggagaactaaatgaacatttgggactcctggggccatatataagagcagaagttgaagataatatcatggtaactttcagaaatcaggcctctcgtccctattccttctattctagccttatttcttatgaggaagatcagaggcaaggagcagaacctagaaaaaactttgtcaagcctaatgaaaccaaaacttacttttggaaagtgcaacatcatatggcacccactaaagatgagtttgactgcaaagcctgggcttatttctctgatgttgacctggaaaaagatgtgcactcaggcctgattggaccccttctggtctgccacactaacacactgaaccctgctcatgggagacaagtgacagtacaggaatttgctctgtttttcaccatctttgatgagaccaaaagctggtacttcactgaaaatatggaaagaaactgcagggctccctgcaatatccagatggaagatcccacttttaaagagaattatcgcttccatgcaatcaatggctacataatggatacactacctggcttagtaatggctcaggatcaaaggattcgatggtatctgctcagcatgggcagcaatgaaaacatccattctattcatttcagtggacatgtgttcactgtacgaaaaaaagaggagtataaaatggcactgtacaatctctatccaggtgtttttgagacagtggaaatgttaccatccaaagctggaatttggcgggtggaatgccttattggcgagcatctacatgctgggatgagcacactttttctggtgtacagcaataagtgtcagactcccctgggaatggcttctggacacattagagattttcagattacagcttcaggacaatatggacagtgggccccaaagctggccagacttcattattccggatcaatcaatgcctggagcaccaaggagcccttttcttggatcaaggtggatctgttggcaccaatgattattcacggcatcaagacccagggtgcccgtcagaagttctccagcctctacatctctcagtttatcatcatgtatagtcttgatgggaagaagtggcagacttatcgaggaaattccactggaaccttaatggtcttctttggcaatgtggattcatctgggataaaacacaatatttttaaccctccaattattgctcgatacatccgtttgcacccaactcattatagcattcgcagcactcttcgcatggagttgatgggctgtgatttaaatagttgcagcatgccattgggaatggagagtaaagcaatatcagatgcacagattactgcttcatcctactttaccaatatgtttgccacctggtctccttcaaaagctcgacttcacctccaagggaggagtaatgcctggagacctcaggtgaataatccaaaagagtggctgcaagtggacttccagaagacaatgaaagtcacaggagtaactactcagggagtaaaatctctgcttaccagcatgtatgtgaaggagttcctcatctccagcagtcaagatggccatcagtggactctcttttttcagaatggcaaagtaaaggtttttcagggaaatcaagactccttcacacctgtggtgaactctctagacccaccgttactgactcgctaccttcgaattcacccccagagttgggtgcaccagattgccctgaggatggaggttctgggctgcgaggcacaggacctctacggcgccggatcacctggggccgaaacggccgaacaaaaactcatctcagaagaggatctgtcacctgcaaccggtcatcatcaccatcaccattga

SEQ ID NO: 689 - protein, 1619 aa, synthetic construct
  REGION 1..1619: note = Description of Artificial Sequence: Synthetic polypeptide
ATRRYYLGAVELSWDYMQSDLGELPVDARFPPRVPKSFPFNTSVVYKKTLFVEFTDHLFNIAKPRPPWMGLLGPTIQAEVYDTVVITLKNMASHPVSLHAVGVSYWKASEGAEYDDQTSQREKEDDKVFPGGSHTYVWQVLKENGPMASDPLCLTYSYLSHVDLVKDLNSGLIGALLVCREGSLAKEKTQTLHKFILLFAVFDEGKSWHSETKNSLMQDRDAASARAWPKMHTVNGYVNRSLPGLIGCHRKSVYWHVIGMGTTPEVHSIFLEGHTFLVRNHRQASLEISPITFLTAQTLLMDLGQFLLFCHISSHQHDGMEAYVKVDSCPEEPQLRMKNNEEAEDYDDDLTDSEMDVVRFDDDNSPSFIQIRSVAKKHPKTWVHYIAAEEEDWDYAPLVLAPDDRSYKSQYLNNGPQRIGRKYKKVRFMAYTDETFKTREAIQHESGILGPLLYGEVGDTLLIIFKNQASRPYNIYPHGITDVRPLYSRRLPKGVKHLKDFPILPGEIFKYKWTVTVEDGPTKSDPRCLTRYYSSFVNMERDLASGLIGPLLICYKESVDQRGNQIMSDKRNVILFSVFDENRSWYLTENIQRFLPNPAGAPGASPGTSSTGSPGSSPSASTGTGPGSSPSASTGTGPGTPGSGTASSSPGSSTPSGATGSPGSSPSASTGTGPGASPGTSSTGSPGTPGSGTASSSPGSSTPSGATGSPGTPGSGTASSSPGASPGTSSTGSPGASPGTSSTGSPASSGVQLEDPEFQASNIMHSINGYVFDSLQLSVCLHEVAYWYILSIGAQTDFLSVFFSGYTFKHKMVYEDTLTLFPFSGETVFMSMENPGLWILGCHNSDFRNRGMTALLKVSSCDKNTGDYYEDSYEDISAYLLSKNNAIEPRSFSQNPPVLKRHQREITRTTLQSDQEEIDYDDTISVEMKKEDFDIYDEDENQSPRSFQKKTRHYFIAAVERLWDYGMSSSPHVLRNRAQSGSVPQFKKVVFQEFTDGSFTQPLYRGELNEHLGLLGPYIRAEVEDNIMVTFRNQASRPYSFYSSLISYEEDQRQGAEPRKNFVKPNETKTYFWKVQHHMAPTKDEFDCKAWAYFSDVDLEKDVHSGLIGPLLVCHTNTLNPAHGRQVTVQEFALFFTIFDETKSWYFTENMERNCRAPCNIQMEDPTFKENYRFHAINGYIMDTLPGLVMAQDQRIRWYLLSMGSNENIHSIHFSGHVFTVRKKEEYKMALYNLYPGVFETVEMLPSKAGIWRVECLIGEHLHAGMSTLFLVYSNKCQTPLGMASGHIRDFQITASGQYGQWAPKLARLHYSGSINAWSTKEPFSWIKVDLLAPMIIHGIKTQGARQKFSSLYISQFIIMYSLDGKKWQTYRGNSTGTLMVFFGNVDSSGIKHNIFNPPIIARYIRLHPTHYSIRSTLRMELMGCDLNSCSMPLGMESKAISDAQITASSYFTNMFATWSPSKARLHLQGRSNAWRPQVNNPKEWLQVDFQKTMKVTGVTTQGVKSLLTSMYVKEFLISSSQDGHQWTLFFQNGKVKVFQGNQDSFTPVVNSLDPPLLTRYLRIHPQSWVHQIALRMEVLGCEAQDLYGAGSPGAETAEQKLISEEDLSPATGHHHHHH

SEQ ID NO: 690 - DNA, 4860 bp, synthetic construct
  misc_feature 1..4860: note = Description of Artificial Sequence: Synthetic polynucleotide
  source 1..4860: mol_type = other DNA
gccaccagaagatactacctgggtgcagtggaactgtcatgggactatatgcaaagtgatctcggtgagctgcctgtggacgcaagatttcctcctagagtgccaaaatcttttccattcaacacctcagtcgtgtacaaaaagactctgtttgtagaattcacggatcaccttttcaacatcgctaagccaaggccaccctggatgggtctgctaggtcctaccatccaggctgaggtttatgatacagtggtcattacacttaagaacatggcttcccatcctgtcagtcttcatgctgttggtgtatcctactggaaagcttctgagggagctgaatatgatgatcagaccagtcaaagggagaaagaagatgataaagtcttccctggtggaagccatacatatgtctggcaggtcctgaaagagaatggtccaatggcctctgacccactgtgccttacctactcatatctttctcatgtggacctggtaaaagacttgaattcaggcctcattggagccctactagtatgtagagaagggagtctggccaaggaaaagacacagaccttgcacaaatttatactactttttgctgtatttgatgaagggaaaagttggcactcagaaacaaagaactccttgatgcaggatagggatgctgcatctgctcgggcctggcctaaaatgcacacagtcaatggttatgtaaacaggtctctgccaggtctgattggatgccacaggaaatcagtctattggcatgtgattggaatgggcaccactcctgaagtgcactcaatattcctcgaaggtcacacatttcttgtgaggaaccatcgccaggctagcttggaaatctcgccaataactttccttactgctcaaacactcttgatggaccttggacagtttctactgttttgtcatatctcttcccaccaacatgatggcatggaagcttatgtcaaagtagacagctgtccagaggaaccccaactacgaatgaaaaataatgaagaagcggaagactatgatgatgatcttactgattctgaaatggatgtggtcaggtttgatgatgacaactctccttcctttatccaaattcgctcagttgccaagaagcatcctaaaacttgggtacattacattgctgctgaagaggaggactgggactatgctcccttagtcctcgcccccgatgacagaagttataaaagtcaatatttgaacaatggccctcagcggattggtaggaagtacaaaaaagtccgatttatggcatacacagatgaaacctttaagactcgtgaagctattcagcatgaatcaggaatcttgggacctttactttatggggaagttggagacacactgttgattatatttaagaatcaagcaagcagaccatataacatctaccctcacggaatcactgatgtccgtcctttgtattcaaggagattaccaaaaggtgtaaaacatttgaaggattttccaattctgccaggagaaatattcaaatataaatggacagtgactgtagaagatgggccaactaaatcagatcctcggtgcctgacccgctattactctagtttcgttaatatggagagagatctagcttcaggactcattggccctctcctcatctgctacaaagaatctgtagatcaaagaggaaaccagataatgtcagacaagaggaatgtcatcctgttttctgtatttgatgagaaccgaagctggtacctcacagagaatatacaacgctttctccccaatccagctggcgcgccaggtgcctcgccgggaacatcatcaactggttcacccgggtcatccccctcggcctcaaccgggacgggtcccggctcatcccccagcgccagcactggaacaggtcctggcactcctggttccggtacggcatcgtcatccccgggaagctcaacaccgtccggagcgacaggatcacctggctcgtcaccttcggcgtcaactggaacggggccaggggcctcacccggaacgtcctcgactgggtcgcctggtacgccgggatcaggaacggcctcatcctcgcctgggtcctcaacgccctcgggtgcgactggttcgccgggaactcctggctcggggacggcctcgtcgtcgcctggggcatcaccggggacgagctccacggggtcccctggagcgtcaccggggacctcctcgacaggtagcccggcctcgagcggagtgcagcttgaggatccagagttccaagcctccaacatcatgcacagcatcaatggctatgtttttgatagtttgcagttgtcagtttgtttgcatgaggtggcatactggtacattctaagcattggagcacagactgacttcctttctgtcttcttctctggatataccttcaaacacaaaatggtctatgaagacacactcaccctattcccattctcaggagaaactgtcttcatgtcgatggaaaacccaggtctatggattctggggtgccacaactcagactttcggaacagaggcatgaccgccttactgaaggtttctagttgtgacaagaacactggtgattattacgaggacagttatgaagatatttcagcatacttgctgagtaaaaacaatgccattgaaccaagaagcttctctcaaaacccaccagtcttgaaacgccatcaacgggaaataactcgtactactcttcagtcagatcaagaggaaatcgattatgatgataccatatcagttgaaatgaagaaggaagattttgacatttatgatgaggatgaaaatcagagcccccgcagctttcaaaagaaaacacgacactattttattgctgcagtggagaggctctgggattatgggatgagtagctccccacatgttctaagaaacagggctcagagtggcagtgtccctcagttcaagaaagttgttttccaggaatttactgatggctcctttactcagcccttataccgtggagaactaaatgaacatttgggactcctggggccatatataagagcagaagttgaagataatatcatggtaactttcagaaatcaggcctctcgtccctattccttctattctagccttatttcttatgaggaagatcagaggcaaggagcagaacctagaaaaaactttgtcaagcctaatgaaaccaaaacttacttttggaaagtgcaacatcatatggcacccactaaagatgagtttgactgcaaagcctgggcttatttctctgatgttgacctggaaaaagatgtgcactcaggcctgattggaccccttctggtctgccacactaacacactgaaccctgctcatgggagacaagtgacagtacaggaatttgctctgtttttcaccatctttgatgagaccaaaagctggtacttcactgaaaatatggaaagaaactgcagggctccctgcaatatccagatggaagatcccacttttaaagagaattatcgcttccatgcaatcaatggctacataatggatacactacctggcttagtaatggctcaggatcaaaggattcgatggtatctgctcagcatgggcagcaatgaaaacatccattctattcatttcagtggacatgtgttcactgtacgaaaaaaagaggagtataaaatggcactgtacaatctctatccaggtgtttttgagacagtggaaatgttaccatccaaagctggaatttggcgggtggaatgccttattggcgagcatctacatgctgggatgagcacactttttctggtgtacagcaataagtgtcagactcccctgggaatggcttctggacacattagagattttcagattacagcttcaggacaatatggacagtgggccccaaagctggccagacttcattattccggatcaatcaatgcctggagcaccaaggagcccttttcttggatcaaggtggatctgttggcaccaatgattattcacggcatcaagacccagggtgcccgtcagaagttctccagcctctacatctctcagtttatcatcatgtatagtcttgatgggaagaagtggcagacttatcgaggaaattccactggaaccttaatggtcttctttggcaatgtggattcatctgggataaaacacaatatttttaaccctccaattattgctcgatacatccgtttgcacccaactcattatagcattcgcagcactcttcgcatggagttgatgggctgtgatttaaatagttgcagcatgccattgggaatggagagtaaagcaatatcagatgcacagattactgcttcatcctactttaccaatatgtttgccacctggtctccttcaaaagctcgacttcacctccaagggaggagtaatgcctggagacctcaggtgaataatccaaaagagtggctgcaagtggacttccagaagacaatgaaagtcacaggagtaactactcagggagtaaaatctctgcttaccagcatgtatgtgaaggagttcctcatctccagcagtcaagatggccatcagtggactctcttttttcagaatggcaaagtaaaggtttttcagggaaatcaagactccttcacacctgtggtgaactctctagacccaccgttactgactcgctaccttcgaattcacccccagagttgggtgcaccagattgccctgaggatggaggttctgggctgcgaggcacaggacctctacggcgccggatcacctggggccgaaacggccgaacaaaaactcatctcagaagaggatctgtcacctgcaaccggtcatcatcaccatcaccattga

SEQ ID NO: 691 - protein, 1619 aa, synthetic construct
  REGION 1..1619: note = Description of Artificial Sequence: Synthetic polypeptide
ATRRYYLGAVELSWDYMQSDLGELPVDARFPPRVPKSFPFNTSVVYKKTLFVEFTDHLFNIAKPRPPWMGLLGPTIQAEVYDTVVITLKNMASHPVSLHAVGVSYWKASEGAEYDDQTSQREKEDDKVFPGGSHTYVWQVLKENGPMASDPLCLTYSYLSHVDLVKDLNSGLIGALLVCREGSLAKEKTQTLHKFILLFAVFDEGKSWHSETKNSLMQDRDAASARAWPKMHTVNGYVNRSLPGLIGCHRKSVYWHVIGMGTTPEVHSIFLEGHTFLVRNHRQASLEISPITFLTAQTLLMDLGQFLLFCHISSHQHDGMEAYVKVDSCPEEPQLRMKNNEEAEDYDDDLTDSEMDVVRFDDDNSPSFIQIRSVAKKHPKTWVHYIAAEEEDWDYAPLVLAPDDRSYKSQYLNNGPQRIGRKYKKVRFMAYTDETFKTREAIQHESGILGPLLYGEVGDTLLIIFKNQASRPYNIYPHGITDVRPLYSRRLPKGVKHLKDFPILPGEIFKYKWTVTVEDGPTKSDPRCLTRYYSSFVNMERDLASGLIGPLLICYKESVDQRGNQIMSDKRNVILFSVFDENRSWYLTENIQRFLPNPAGVQLEDPEFQASNIMHSINGYVFDSLQLSVCLHEVAYWYILSIGAQTDFLSVFFSGYTFKHKMVYEDTLTLFPFSGETVFMSMENPGLWILGCHNSDFRNRGMTALLKVSSCDKNTGDYYEDSYEDISAYLLSKNNAIEPRSFSQNGAPSPAGSPTSTEEGTSESATPESGPGSEPATSGSETPGTSESATPESGPGTSTEPSEGSAPGTSTEPSEGSAPGTSTEPSEGSAPGTSTEPSEGSAPGTSTEPSEGSAPGTSTEPSEGSAPGSPAGSPTSTEEGTSTEPSEGSAPGASSPPVLKRHQREITRTTLQSDQEEIDYDDTISVEMKKEDFDIYDEDENQSPRSFQKKTRHYFIAAVERLWDYGMSSSPHVLRNRAQSGSVPQFKKVVFQEFTDGSFTQPLYRGELNEHLGLLGPYIRAEVEDNIMVTFRNQASRPYSFYSSLISYEEDQRQGAEPRKNFVKPNETKTYFWKVQHHMAPTKDEFDCKAWAYFSDVDLEKDVHSGLIGPLLVCHTNTLNPAHGRQVTVQEFALFFTIFDETKSWYFTENMERNCRAPCNIQMEDPTFKENYRFHAINGYIMDTLPGLVMAQDQRIRWYLLSMGSNENIHSIHFSGHVFTVRKKEEYKMALYNLYPGVFETVEMLPSKAGIWRVECLIGEHLHAGMSTLFLVYSNKCQTPLGMASGHIRDFQITASGQYGQWAPKLARLHYSGSINAWSTKEPFSWIKVDLLAPMIIHGIKTQGARQKFSSLYISQFIIMYSLDGKKWQTYRGNSTGTLMVFFGNVDSSGIKHNIFNPPIIARYIRLHPTHYSIRSTLRMELMGCDLNSCSMPLGMESKAISDAQITASSYFTNMFATWSPSKARLHLQGRSNAWRPQVNNPKEWLQVDFQKTMKVTGVTTQGVKSLLTSMYVKEFLISSSQDGHQWTLFFQNGKVKVFQGNQDSFTPVVNSLDPPLLTRYLRIHPQSWVHQIALRMEVLGCEAQDLYGAGSPGAETAEQKLISEEDLSPATGHHHHHH

SEQ ID NO: 692 - DNA, 4860 bp, synthetic construct
  misc_feature 1..4860: note = Description of Artificial Sequence: Synthetic polynucleotide
  source 1..4860: mol_type = other DNA
gccaccagaagatactacctgggtgcagtggaactgtcatgggactatatgcaaagtgatctcggtgagctgcctgtggacgcaagatttcctcctagagtgccaaaatcttttccattcaacacctcagtcgtgtacaaaaagactctgtttgtagaattcacggatcaccttttcaacatcgctaagccaaggccaccctggatgggtctgctaggtcctaccatccaggctgaggtttatgatacagtggtcattacacttaagaacatggcttcccatcctgtcagtcttcatgctgttggtgtatcctactggaaagcttctgagggagctgaatatgatgatcagaccagtcaaagggagaaagaagatgataaagtcttccctggtggaagccatacatatgtctggcaggtcctgaaagagaatggtccaatggcctctgacccactgtgccttacctactcatatctttctcatgtggacctggtaaaagacttgaattcaggcctcattggagccctactagtatgtagagaagggagtctggccaaggaaaagacacagaccttgcacaaatttatactactttttgctgtatttgatgaagggaaaagttggcactcagaaacaaagaactccttgatgcaggatagggatgctgcatctgctcgggcctggcctaaaatgcacacagtcaatggttatgtaaacaggtctctgccaggtctgattggatgccacaggaaatcagtctattggcatgtgattggaatgggcaccactcctgaagtgcactcaatattcctcgaaggtcacacatttcttgtgaggaaccatcgccaggctagcttggaaatctcgccaataactttccttactgctcaaacactcttgatggaccttggacagtttctactgttttgtcatatctcttcccaccaacatgatggcatggaagcttatgtcaaagtagacagctgtccagaggaaccccaactacgaatgaaaaataatgaagaagcggaagactatgatgatgatcttactgattctgaaatggatgtggtcaggtttgatgatgacaactctccttcctttatccaaattcgctcagttgccaagaagcatcctaaaacttgggtacattacattgctgctgaagaggaggactgggactatgctcccttagtcctcgcccccgatgacagaagttataaaagtcaatatttgaacaatggccctcagcggattggtaggaagtacaaaaaagtccgatttatggcatacacagatgaaacctttaagactcgtgaagctattcagcatgaatcaggaatcttgggacctttactttatggggaagttggagacacactgttgattatatttaagaatcaagcaagcagaccatataacatctaccctcacggaatcactgatgtccgtcctttgtattcaaggagattaccaaaaggtgtaaaacatttgaaggattttccaattctgccaggagaaatattcaaatataaatggacagtgactgtagaagatgggccaactaaatcagatcctcggtgcctgacccgctattactctagtttcgttaatatggagagagatctagcttcaggactcattggccctctcctcatctgctacaaagaatctgtagatcaaagaggaaaccagataatgtcagacaagaggaatgtcatcctgttttctgtatttgatgagaaccgaagctggtacctcacagagaatatacaacgctttctccccaatccagctggagtgcagcttgaggatccagagttccaagcctccaacatcatgcacagcatcaatggctatgtttttgatagtttgcagttgtcagtttgtttgcatgaggtggcatactggtacattctaagcattggagcacagactgacttcctttctgtcttcttctctggatataccttcaaacacaaaatggtctatgaagacacactcaccctattcccattctcaggagaaactgtcttcatgtcgatggaaaacccaggtctatggattctggggtgccacaactcagactttcggaacagaggcatgaccgccttactgaaggtttctagttgtgacaagaacactggtgattattacgaggacagttatgaagatatttcagcatacttgctgagtaaaaacaatgccattgaaccaagaagcttctctcaaaacggcgcgccaagtcccgctggaagcccaactagcaccgaagaggggacctcagagtccgccacccccgagtccggccctggctctgagcctgccactagcggctccgagactcctggcacatccgaaagcgctacacccgagagtggacccggcacctctaccgagcccagtgagggctccgcccctggaacaagcaccgagcccagcgaaggcagcgccccagggacctccacagagcccagtgaaggcagtgctcctggcaccagcaccgaaccaagcgagggctctgcacccgggacctccaccgagccaagcgaaggctctgcccctggcacttccaccgagcccagcgaaggcagcgcccctgggagccccgctggctctcccaccagcactgaggagggcacatctaccgaaccaagtgaaggctctgcaccaggtgcctcgagcccaccagtcttgaaacgccatcaacgggaaataactcgtactactcttcagtcagatcaagaggaaatcgattatgatgataccatatcagttgaaatgaagaaggaagattttgacatttatgatgaggatgaaaatcagagcccccgcagctttcaaaagaaaacacgacactattttattgctgcagtggagaggctctgggattatgggatgagtagctccccacatgttctaagaaacagggctcagagtggcagtgtccctcagttcaagaaagttgttttccaggaatttactgatggctcctttactcagcccttataccgtggagaactaaatgaacatttgggactcctggggccatatataagagcagaagttgaagataatatcatggtaactttcagaaatcaggcctctcgtccctattccttctattctagccttatttcttatgaggaagatcagaggcaaggagcagaacctagaaaaaactttgtcaagcctaatgaaaccaaaacttacttttggaaagtgcaacatcatatggcacccactaaagatgagtttgactgcaaagcctgggcttatttctctgatgttgacctggaaaaagatgtgcactcaggcctgattggaccccttctggtctgccacactaacacactgaaccctgctcatgggagacaagtgacagtacaggaatttgctctgtttttcaccatctttgatgagaccaaaagctggtacttcactgaaaatatggaaagaaactgcagggctccctgcaatatccagatggaagatcccacttttaaagagaattatcgcttccatgcaatcaatggctacataatggatacactacctggcttagtaatggctcaggatcaaaggattcgatggtatctgctcagcatgggcagcaatgaaaacatccattctattcatttcagtggacatgtgttcactgtacgaaaaaaagaggagtataaaatggcactgtacaatctctatccaggtgtttttgagacagtggaaatgttaccatccaaagctggaatttggcgggtggaatgccttattggcgagcatctacatgctgggatgagcacactttttctggtgtacagcaataagtgtcagactcccctgggaatggcttctggacacattagagattttcagattacagcttcaggacaatatggacagtgggccccaaagctggccagacttcattattccggatcaatcaatgcctggagcaccaaggagcccttttcttggatcaaggtggatctgttggcaccaatgattattcacggcatcaagacccagggtgcccgtcagaagttctccagcctctacatctctcagtttatcatcatgtatagtcttgatgggaagaagtggcagacttatcgaggaaattccactggaaccttaatggtcttctttggcaatgtggattcatctgggataaaacacaatatttttaaccctccaattattgctcgatacatccgtttgcacccaactcattatagcattcgcagcactcttcgcatggagttgatgggctgtgatttaaatagttgcagcatgccattgggaatggagagtaaagcaatatcagatgcacagattactgcttcatcctactttaccaatatgtttgccacctggtctccttcaaaagctcgacttcacctccaagggaggagtaatgcctggagacctcaggtgaataatccaaaagagtggctgcaagtggacttccagaagacaatgaaagtcacaggagtaactactcagggagtaaaatctctgcttaccagcatgtatgtgaaggagttcctcatctccagcagtcaagatggccatcagtggactctcttttttcagaatggcaaagtaaaggtttttcagggaaatcaagactccttcacacctgtggtgaactctctagacccaccgttactgactcgctaccttcgaattcacccccagagttgggtgcaccagattgccctgaggatggaggttctgggctgcgaggcacaggacctctacggcgccggatcacctggggccgaaacggccgaacaaaaactcatctcagaagaggatctgtcacctgcaaccggtcatcatcaccatcaccattga

SEQ ID NO: 693 - protein, 1619 aa, synthetic construct
  REGION 1..1619: note = Description of Artificial Sequence: Synthetic polypeptide
ATRRYYLGAVELSWDYMQSDLGELPVDARFPPRVPKSFPFNTSVVYKKTLFVEFTDHLFNIAKPRPPWMGLLGPTIQAEVYDTVVITLKNMASHPVSLHAVGVSYWKASEGAEYDDQTSQREKEDDKVFPGGSHTYVWQVLKENGPMASDPLCLTYSYLSHVDLVKDLNSGLIGALLVCREGSLAKEKTQTLHKFILLFAVFDEGKSWHSETKNSLMQDRDAASARAWPKMHTVNGYVNRSLPGLIGCHRKSVYWHVIGMGTTPEVHSIFLEGHTFLVRNHRQASLEISPITFLTAQTLLMDLGQFLLFCHISSHQHDGMEAYVKVDSCPEEPQLRMKNNEEAEDYDDDLTDSEMDVVRFDDDNSPSFIQIRSVAKKHPKTWVHYIAAEEEDWDYAPLVLAPDDRSYKSQYLNNGPQRIGRKYKKVRFMAYTDETFKTREAIQHESGILGPLLYGEVGDTLLIIFKNQASRPYNIYPHGITDVRPLYSRRLPKGVKHLKDFPILPGEIFKYKWTVTVEDGPTKSDPRCLTRYYSSFVNMERDLASGLIGPLLICYKESVDQRGNQIMSDKRNVILFSVFDENRSWYLTENIQRFLPNPAGVQLEDPEFQASNIMHSINGYVFDSLQLSVCLHEVAYWYILSIGAQTDFLSVFFSGYTFKHKMVYEDTLTLFPFSGETVFMSMENPGLWILGCHNSDFRNRGMTALLKVSSCDKNTGDYYEDSYEDISAYLLSKNNAIEPRSFSQNGAPSPAGSPTSTEEGTSESATPESGPGSEPATSGSETPGTSESATPESGPGTSTEPSEGSAPGTSTEPSEGSAPGTSTEPSEGSAPGTSTEPSEGSAPGTSTEPSEGSAPGTSTEPSEGSAPGSPAGSPTSTEEGTSTEPSEGSAPGASSPPVLKRHQAEITRTTLQSDQEEIDYDDTISVEMKKEDFDIYDEDENQSPRSFQKKTRHYFIAAVERLWDYGMSSSPHVLRNRAQSGSVPQFKKVVFQEFTDGSFTQPLYRGELNEHLGLLGPYIRAEVEDNIMVTFRNQASRPYSFYSSLISYEEDQRQGAEPRKNFVKPNETKTYFWKVQHHMAPTKDEFDCKAWAYFSDVDLEKDVHSGLIGPLLVCHTNTLNPAHGRQVTVQEFALFFTIFDETKSWYFTENMERNCRAPCNIQMEDPTFKENYRFHAINGYIMDTLPGLVMAQDQRIRWYLLSMGSNENIHSIHFSGHVFTVRKKEEYKMALYNLYPGVFETVEMLPSKAGIWRVECLIGEHLHAGMSTLFLVYSNKCQTPLGMASGHIRDFQITASGQYGQWAPKLARLHYSGSINAWSTKEPFSWIKVDLLAPMIIHGIKTQGARQKFSSLYISQFIIMYSLDGKKWQTYRGNSTGTLMVFFGNVDSSGIKHNIFNPPIIARYIRLHPTHYSIRSTLRMELMGCDLNSCSMPLGMESKAISDAQITASSYFTNMFATWSPSKARLHLQGRSNAWRPQVNNPKEWLQVDFQKTMKVTGVTTQGVKSLLTSMYVKEFLISSSQDGHQWTLFFQNGKVKVFQGNQDSFTPVVNSLDPPLLTRYLRIHPQSWVHQIALRMEVLGCEAQDLYGAGSPGAETAEQKLISEEDLSPATGHHHHHH

SEQ ID NO: 694 - DNA, 4860 bp, synthetic construct
  misc_feature 1..4860: note = Description of Artificial Sequence: Synthetic polynucleotide
  source 1..4860: mol_type = other DNA
gccaccagaagatactacctgggtgcagtggaactgtcatgggactatatgcaaagtgatctcggtgagctgcctgtggacgcaagatttcctcctagagtgccaaaatcttttccattcaacacctcagtcgtgtacaaaaagactctgtttgtagaattcacggatcaccttttcaacatcgctaagccaaggccaccctggatgggtctgctaggtcctaccatccaggctgaggtttatgatacagtggtcattacacttaagaacatggcttcccatcctgtcagtcttcatgctgttggtgtatcctactggaaagcttctgagggagctgaatatgatgatcagaccagtcaaagggagaaagaagatgataaagtcttccctggtggaagccatacatatgtctggcaggtcctgaaagagaatggtccaatggcctctgacccactgtgccttacctactcatatctttctcatgtggacctggtaaaagacttgaattcaggcctcattggagccctactagtatgtagagaagggagtctggccaaggaaaagacacagaccttgcacaaatttatactactttttgctgtatttgatgaagggaaaagttggcactcagaaacaaagaactccttgatgcaggatagggatgctgcatctgctcgggcctggcctaaaatgcacacagtcaatggttatgtaaacaggtctctgccaggtctgattggatgccacaggaaatcagtctattggcatgtgattggaatgggcaccactcctgaagtgcactcaatattcctcgaaggtcacacatttcttgtgaggaaccatcgccaggctagcttggaaatctcgccaataactttccttactgctcaaacactcttgatggaccttggacagtttctactgttttgtcatatctcttcccaccaacatgatggcatggaagcttatgtcaaagtagacagctgtccagaggaaccccaactacgaatgaaaaataatgaagaagcggaagactatgatgatgatcttactgattctgaaatggatgtggtcaggtttgatgatgacaactctccttcctttatccaaattcgctcagttgccaagaagcatcctaaaacttgggtacattacattgctgctgaagaggaggactgggactatgctcccttagtcctcgcccccgatgacagaagttataaaagtcaatatttgaacaatggccctcagcggattggtaggaagtacaaaaaagtccgatttatggcatacacagatgaaacctttaagactcgtgaagctattcagcatgaatcaggaatcttgggacctttactttatggggaagttggagacacactgttgattatatttaagaatcaagcaagcagaccatataacatctaccctcacggaatcactgatgtccgtcctttgtattcaaggagattaccaaaaggtgtaaaacatttgaaggattttccaattctgccaggagaaatattcaaatataaatggacagtgactgtagaagatgggccaactaaatcagatcctcggtgcctgacccgctattactctagtttcgttaatatggagagagatctagcttcaggactcattggccctctcctcatctgctacaaagaatctgtagatcaaagaggaaaccagataatgtcagacaagaggaatgtcatcctgttttctgtatttgatgagaaccgaagctggtacctcacagagaatatacaacgctttctccccaatccagctggagtgcagcttgaggatccagagttccaagcctccaacatcatgcacagcatcaatggctatgtttttgatagtttgcagttgtcagtttgtttgcatgaggtggcatactggtacattctaagcattggagcacagactgacttcctttctgtcttcttctctggatataccttcaaacacaaaatggtctatgaagacacactcaccctattcccattctcaggagaaactgtcttcatgtcgatggaaaacccaggtctatggattctggggtgccacaactcagactttcggaacagaggcatgaccgccttactgaaggtttctagttgtgacaagaacactggtgattattacgaggacagttatgaagatatttcagcatacttgctgagtaaaaacaatgccattgaaccaagaagcttctctcaaaacggcgcgccaagtcccgctggaagcccaactagcaccgaagaggggacctcagagtccgccacccccgagtccggccctggctctgagcctgccactagcggctccgagactcctggcacatccgaaagcgctacacccgagagtggacccggcacctctaccgagcccagtgagggctccgcccctggaacaagcaccgagcccagcgaaggcagcgccccagggacctccacagagcccagtgaaggcagtgctcctggcaccagcaccgaaccaagcgagggctctgcacccgggacctccaccgagccaagcgaaggctctgcccctggcacttccaccgagcccagcgaaggcagcgcccctgggagccccgctggctctcccaccagcactgaggagggcacatctaccgaaccaagtgaaggctctgcaccaggtgcctcgagcccaccagtcttgaaacgccatcaagctgaaataactcgtactactcttcagtcagatcaagaggaaatcgattatgatgataccatatcagttgaaatgaagaaggaagattttgacatttatgatgaggatgaaaatcagagcccccgcagctttcaaaagaaaacacgacactattttattgctgcagtggagaggctctgggattatgggatgagtagctccccacatgttctaagaaacagggctcagagtggcagtgtccctcagttcaagaaagttgttttccaggaatttactgatggctcctttactcagcccttataccgtggagaactaaatgaacatttgggactcctggggccatatataagagcagaagttgaagataatatcatggtaactttcagaaatcaggcctctcgtccctattccttctattctagccttatttcttatgaggaagatcagaggcaaggagcagaacctagaaaaaactttgtcaagcctaatgaaaccaaaacttacttttggaaagtgcaacatcatatggcacccactaaagatgagtttgactgcaaagcctgggcttatttctctgatgttgacctggaaaaagatgtgcactcaggcctgattggaccccttctggtctgccacactaacacactgaaccctgctcatgggagacaagtgacagtacaggaatttgctctgtttttcaccatctttgatgagaccaaaagctggtacttcactgaaaatatggaaagaaactgcagggctccctgcaatatccagatggaagatcccacttttaaagagaattatcgcttccatgcaatcaatggctacataatggatacactacctggcttagtaatggctcaggatcaaaggattcgatggtatctgctcagcatgggcagcaatgaaaacatccattctattcatttcagtggacatgtgttcactgtacgaaaaaaagaggagtataaaatggcactgtacaatctctatccaggtgtttttgagacagtggaaatgttaccatccaaagctggaatttggcgggtggaatgccttattggcgagcatctacatgctgggatgagcacactttttctggtgtacagcaataagtgtcagactcccctgggaatggcttctggacacattagagattttcagattacagcttcaggacaatatggacagtgggccccaaagctggccagacttcattattccggatcaatcaatgcctggagcaccaaggagcccttttcttggatcaaggtggatctgttggcaccaatgattattcacggcatcaagacccagggtgcccgtcagaagttctccagcctctacatctctcagtttatcatcatgtatagtcttgatgggaagaagtggcagacttatcgaggaaattccactggaaccttaatggtcttctttggcaatgtggattcatctgggataaaacacaatatttttaaccctccaattattgctcgatacatccgtttgcacccaactcattatagcattcgcagcactcttcgcatggagttgatgggctgtgatttaaatagttgcagcatgccattgggaatggagagtaaagcaatatcagatgcacagattactgcttcatcctactttaccaatatgtttgccacctggtctccttcaaaagctcgacttcacctccaagggaggagtaatgcctggagacctcaggtgaataatccaaaagagtggctgcaagtggacttccagaagacaatgaaagtcacaggagtaactactcagggagtaaaatctctgcttaccagcatgtatgtgaaggagttcctcatctccagcagtcaagatggccatcagtggactctcttttttcagaatggcaaagtaaaggtttttcagggaaatcaagactccttcacacctgtggtgaactctctagacccaccgttactgactcgctaccttcgaattcacccccagagttgggtgcaccagattgccctgaggatggaggttctgggctgcgaggcacaggacctctacggcgccggatcacctggggccgaaacggccgaacaaaaactcatctcagaagaggatctgtcacctgcaaccggtcatcatcaccatcaccattga

SEQ ID NO: 695 - protein, 1619 aa, synthetic construct
  REGION 1..1619: note = Description of Artificial Sequence: Synthetic polypeptide
ATRRYYLGAVELSWDYMQSDLGELPVDARFPPRVPKSFPFNTSVVYKKTLFVEFTDHLFNIAKPRPPWMGLLGPTIQAEVYDTVVITLKNMASHPVSLHAVGVSYWKASEGAEYDDQTSQREKEDDKVFPGGSHTYVWQVLKENGPMASDPLCLTYSYLSHVDLVKDLNSGLIGALLVCREGSLAKEKTQTLHKFILLFAVFDEGKSWHSETKNSLMQDRDAASARAWPKMHTVNGYVNRSLPGLIGCHRKSVYWHVIGMGTTPEVHSIFLEGHTFLVRNHRQASLEISPITFLTAQTLLMDLGQFLLFCHISSHQHDGMEAYVKVDSCPEEPQLRMKNNEEAEDYDDDLTDSEMDVVRFDDDNSPSFIQIRSVAKKHPKTWVHYIAAEEEDWDYAPLVLAPDDRSYKSQYLNNGPQRIGRKYKKVRFMAYTDETFKTREAIQHESGILGPLLYGEVGDTLLIIFKNQASRPYNIYPHGITDVRPLYSRRLPKGVKHLKDFPILPGEIFKYKWTVTVEDGPTKSDPRCLTRYYSSFVNMERDLASGLIGPLLICYKESVDQRGNQIMSDKRNVILFSVFDENRSWYLTENIQRFLPNPAGVQLEDPEFQASNIMHSINGYVFDSLQLSVCLHEVAYWYILSIGAQTDFLSVFFSGYTFKHKMVYEDTLTLFPFSGETVFMSMENPGLWILGCHNSDFRNRGMTALLKVSSCDKNTGDYYEDSYEDISAYLLSKNNAIEPRSFSQNGAPGTPGSGTASSSPGSSTPSGATGSPGASPGTSSTGSPGTPGSGTASSSPGSSTPSGATGSPGSSPSASTGTGPGSSPSASTGTGPGSSTPSGATGSPGSSTPSGATGSPGASPGTSSTGSPGASPGTSSTGSPGASPGTSSTGSPASSPPVLKRHQREITRTTLQSDQEEIDYDDTISVEMKKEDFDIYDEDENQSPRSFQKKTRHYFIAAVERLWDYGMSSSPHVLRNRAQSGSVPQFKKVVFQEFTDGSFTQPLYRGELNEHLGLLGPYIRAEVEDNIMVTFRNQASRPYSFYSSLISYEEDQRQGAEPRKNFVKPNETKTYFWKVQHHMAPTKDEFDCKAWAYFSDVDLEKDVHSGLIGPLLVCHTNTLNPAHGRQVTVQEFALFFTIFDETKSWYFTENMERNCRAPCNIQMEDPTFKENYRFHAINGYIMDTLPGLVMAQDQRIRWYLLSMGSNENIHSIHFSGHVFTVRKKEEYKMALYNLYPGVFETVEMLPSKAGIWRVECLIGEHLHAGMSTLFLVYSNKCQTPLGMASGHIRDFQITASGQYGQWAPKLARLHYSGSINAWSTKEPFSWIKVDLLAPMIIHGIKTQGARQKFSSLYISQFIIMYSLDGKKWQTYRGNSTGTLMVFFGNVDSSGIKHNIFNPPIIARYIRLHPTHYSIRSTLRMELMGCDLNSCSMPLGMESKAISDAQITASSYFTNMFATWSPSKARLHLQGRSNAWRPQVNNPKEWLQVDFQKTMKVTGVTTQGVKSLLTSMYVKEFLISSSQDGHQWTLFFQNGKVKVFQGNQDSFTPVVNSLDPPLLTRYLRIHPQSWVHQIALRMEVLGCEAQDLYGAGSPGAETAEQKLISEEDLSPATGHHHHHH

SEQ ID NO: 696 - DNA, 4860 bp, synthetic construct
  misc_feature 1..4860: note = Description of Artificial Sequence: Synthetic polynucleotide
  source 1..4860: mol_type = other DNA
gccaccagaagatactacctgggtgcagtggaactgtcatgggactatatgcaaagtgatctcggtgagctgcctgtggacgcaagatttcctcctagagtgccaaaatcttttccattcaacacctcagtcgtgtacaaaaagactctgtttgtagaattcacggatcaccttttcaacatcgctaagccaaggccaccctggatgggtctgctaggtcctaccatccaggctgaggtttatgatacagtggtcattacacttaagaacatggcttcccatcctgtcagtcttcatgctgttggtgtatcctactggaaagcttctgagggagctgaatatgatgatcagaccagtcaaagggagaaagaagatgataaagtcttccctggtggaagccatacatatgtctggcaggtcctgaaagagaatggtccaatggcctctgacccactgtgccttacctactcatatctttctcatgtggacctggtaaaagacttgaattcaggcctcattggagccctactagtatgtagagaagggagtctggccaaggaaaagacacagaccttgcacaaatttatactactttttgctgtatttgatgaagggaaaagttggcactcagaaacaaagaactccttgatgcaggatagggatgctgcatctgctcgggcctggcctaaaatgcacacagtcaatggttatgtaaacaggtctctgccaggtctgattggatgccacaggaaatcagtctattggcatgtgattggaatgggcaccactcctgaagtgcactcaatattcctcgaaggtcacacatttcttgtgaggaaccatcgccaggctagcttggaaatctcgccaataactttccttactgctcaaacactcttgatggaccttggacagtttctactgttttgtcatatctcttcccaccaacatgatggcatggaagcttatgtcaaagtagacagctgtccagaggaaccccaactacgaatgaaaaataatgaagaagcggaagactatgatgatgatcttactgattctgaaatggatgtggtcaggtttgatgatgacaactctccttcctttatccaaattcgctcagttgccaagaagcatcctaaaacttgggtacattacattgctgctgaagaggaggactgggactatgctcccttagtcctcgcccccgatgacagaagttataaaagtcaatatttgaacaatggccctcagcggattggtaggaagtacaaaaaagtccgatttatggcatacacagatgaaacctttaagactcgtgaagctattcagcatgaatcaggaatcttgggacctttactttatggggaagttggagacacactgttgattatatttaagaatcaagcaagcagaccatataacatctaccctcacggaatcactgatgtccgtcctttgtattcaaggagattaccaaaaggtgtaaaacatttgaaggattttccaattctgccaggagaaatattcaaatataaatggacagtgactgtagaagatgggccaactaaatcagatcctcggtgcctgacccgctattactctagtttcgttaatatggagagagatctagcttcaggactcattggccctctcctcatctgctacaaagaatctgtagatcaaagaggaaaccagataatgtcagacaagaggaatgtcatcctgttttctgtatttgatgagaaccgaagctggtacctcacagagaatatacaacgctttctccccaatccagctggagtgcagcttgaggatccagagttccaagcctccaacatcatgcacagcatcaatggctatgtttttgatagtttgcagttgtcagtttgtttgcatgaggtggcatactggtacattctaagcattggagcacagactgacttcctttctgtcttcttctctggatataccttcaaacacaaaatggtctatgaagacacactcaccctattcccattctcaggagaaactgtcttcatgtcgatggaaaacccaggtctatggattctggggtgccacaactcagactttcggaacagaggcatgaccgccttactgaaggtttctagttgtgacaagaacactggtgattattacgaggacagttatgaagatatttcagcatacttgctgagtaaaaacaatgccattgaaccaagaagcttctctcaaaacggcgcgccaggtacaccgggcagcggcacggcttcgtcgtcacccggctcgtccacaccgtcgggagctacgggaagcccaggagcgtcaccgggaacgtcgtcaacggggtcaccgggtacgccaggtagcggcacggccagcagctcgccaggttcatcgaccccgtcgggagcgactgggtcgcccggatcaagcccgtcagcttccactggaacaggacccgggtcgtcgccgtcagcctcaacggggacaggacctggttcatcgacgccgtcaggggcgacaggctcgcccggatcgtcaacaccctcgggggcaacggggagccctggtgcgtcgcctggaacctcatccaccggaagcccgggggcctcgccgggtacgagctccacgggatcgcccggagcgtcccccggaacttcaagcacagggagccctgcctcgagcccaccagtcttgaaacgccatcaacgggaaataactcgtactactcttcagtcagatcaagaggaaatcgattatgatgataccatatcagttgaaatgaagaaggaagattttgacatttatgatgaggatgaaaatcagagcccccgcagctttcaaaagaaaacacgacactattttattgctgcagtggagaggctctgggattatgggatgagtagctccccacatgttctaagaaacagggctcagagtggcagtgtccctcagttcaagaaagttgttttccaggaatttactgatggctcctttactcagcccttataccgtggagaactaaatgaacatttgggactcctggggccatatataagagcagaagttgaagataatatcatggtaactttcagaaatcaggcctctcgtccctattccttctattctagccttatttcttatgaggaagatcagaggcaaggagcagaacctagaaaaaactttgtcaagcctaatgaaaccaaaacttacttttggaaagtgcaacatcatatggcacccactaaagatgagtttgactgcaaagcctgggcttatttctctgatgttgacctggaaaaagatgtgcactcaggcctgattggaccccttctggtctgccacactaacacactgaaccctgctcatgggagacaagtgacagtacaggaatttgctctgtttttcaccatctttgatgagaccaaaagctggtacttcactgaaaatatggaaagaaactgcagggctccctgcaatatccagatggaagatcccacttttaaagagaattatcgcttccatgcaatcaatggctacataatggatacactacctggcttagtaatggctcaggatcaaaggattcgatggtatctgctcagcatgggcagcaatgaaaacatccattctattcatttcagtggacatgtgttcactgtacgaaaaaaagaggagtataaaatggcactgtacaatctctatccaggtgtttttgagacagtggaaatgttaccatccaaagctggaatttggcgggtggaatgccttattggcgagcatctacatgctgggatgagcacactttttctggtgtacagcaataagtgtcagactcccctgggaatggcttctggacacattagagattttcagattacagcttcaggacaatatggacagtgggccccaaagctggccagacttcattattccggatcaatcaatgcctggagcaccaaggagcccttttcttggatcaaggtggatctgttggcaccaatgattattcacggcatcaagacccagggtgcccgtcagaagttctccagcctctacatctctcagtttatcatcatgtatagtcttgatgggaagaagtggcagacttatcgaggaaattccactggaaccttaatggtcttctttggcaatgtggattcatctgggataaaacacaatatttttaaccctccaattattgctcgatacatccgtttgcacccaactcattatagcattcgcagcactcttcgcatggagttgatgggctgtgatttaaatagttgcagcatgccattgggaatggagagtaaagcaatatcagatgcacagattactgcttcatcctactttaccaatatgtttgccacctggtctccttcaaaagctcgacttcacctccaagggaggagtaatgcctggagacctcaggtgaataatccaaaagagtggctgcaagtggacttccagaagacaatgaaagtcacaggagtaactactcagggagtaaaatctctgcttaccagcatgtatgtgaaggagttcctcatctccagcagtcaagatggccatcagtggactctcttttttcagaatggcaaagtaaaggtttttcagggaaatcaagactccttcacacctgtggtgaactctctagacccaccgttactgactcgctaccttcgaattcacccccagagttgggtgcaccagattgccctgaggatggaggttctgggctgcgaggcacaggacctctacggcgccggatcacctggggccgaaacggccgaacaaaaactcatctcagaagaggatctgtcacctgcaaccggtcatcatcaccatcaccattga

SEQ ID NO: 697 - protein, 1619 aa, synthetic construct
  REGION 1..1619: note = Description of Artificial Sequence: Synthetic polypeptide
ATRRYYLGAVELSWDYMQSDLGELPVDARFPPRVPKSFPFNTSVVYKKTLFVEFTDHLFNIAKPRPPWMGLLGPTIQAEVYDTVVITLKNMASHPVSLHAVGVSYWKASEGAEYDDQTSQREKEDDKVFPGGSHTYVWQVLKENGPMASDPLCLTYSYLSHVDLVKDLNSGLIGALLVCREGSLAKEKTQTLHKFILLFAVFDEGKSWHSETKNSLMQDRDAASARAWPKMHTVNGYVNRSLPGLIGCHRKSVYWHVIGMGTTPEVHSIFLEGHTFLVRNHRQASLEISPITFLTAQTLLMDLGQFLLFCHISSHQHDGMEAYVKVDSCPEEPQLRMKNNEEAEDYDDDLTDSEMDVVRFDDDNSPSFIQIRSVAKKHPKTWVHYIAAEEEDWDYAPLVLAPDDRSYKSQYLNNGPQRIGRKYKKVRFMAYTDETFKTREAIQHESGILGPLLYGEVGDTLLIIFKNQASRPYNIYPHGITDVRPLYSRRLPKGVKHLKDFPILPGEIFKYKWTVTVEDGPTKSDPRCLTRYYSSFVNMERDLASGLIGPLLICYKESVDQRGNQIMSDKRNVILFSVFDENRSWYLTENIQRFLPNPAGVQLEDPEFQASNIMHSINGYVFDSLQLSVCLHEVAYWYILSIGAQTDFLSVFFSGYTFKHKMVYEDTLTLFPFSGETVFMSMENPGLWILGCHNSDFRNRGMTALLKVSSCDKNTGDYYEDSYEDISAYLLSKNNAIEPRSFSQNGAPGTPGSGTASSSPGSSTPSGATGSPGASPGTSSTGSPGTPGSGTASSSPGSSTPSGATGSPGSSPSASTGTGPGSSPSASTGTGPGSSTPSGATGSPGSSTPSGATGSPGASPGTSSTGSPGASPGTSSTGSPGASPGTSSTGSPASSPPVLKRHQAEITRTTLQSDQEEIDYDDTISVEMKKEDFDIYDEDENQSPRSFQKKTRHYFIAAVERLWDYGMSSSPHVLRNRAQSGSVPQFKKVVFQEFTDGSFTQPLYRGELNEHLGLLGPYIRAEVEDNIMVTFRNQASRPYSFYSSLISYEEDQRQGAEPRKNFVKPNETKTYFWKVQHHMAPTKDEFDCKAWAYFSDVDLEKDVHSGLIGPLLVCHTNTLNPAHGRQVTVQEFALFFTIFDETKSWYFTENMERNCRAPCNIQMEDPTFKENYRFHAINGYIMDTLPGLVMAQDQRIRWYLLSMGSNENIHSIHFSGHVFTVRKKEEYKMALYNLYPGVFETVEMLPSKAGIWRVECLIGEHLHAGMSTLFLVYSNKCQTPLGMASGHIRDFQITASGQYGQWAPKLARLHYSGSINAWSTKEPFSWIKVDLLAPMIIHGIKTQGARQKFSSLYISQFIIMYSLDGKKWQTYRGNSTGTLMVFFGNVDSSGIKHNIFNPPIIARYIRLHPTHYSIRSTLRMELMGCDLNSCSMPLGMESKAISDAQITASSYFTNMFATWSPSKARLHLQGRSNAWRPQVNNPKEWLQVDFQKTMKVTGVTTQGVKSLLTSMYVKEFLISSSQDGHQWTLFFQNGKVKVFQGNQDSFTPVVNSLDPPLLTRYLRIHPQSWVHQIALRMEVLGCEAQDLYGAGSPGAETAEQKLISEEDLSPATGHHHHHH

SEQ ID NO: 698 - DNA, 4860 bp, synthetic construct
  misc_feature 1..4860: note = Description of Artificial Sequence: Synthetic polynucleotide
  source 1..4860: mol_type = other DNA
gccaccagaagatactacctgggtgcagtggaactgtcatgggactatatgcaaagtgatctcggtgagctgcctgtggacgcaagatttcctcctagagtgccaaaatcttttccattcaacacctcagtcgtgtacaaaaagactctgtttgtagaattcacggatcaccttttcaacatcgctaagccaaggccaccctggatgggtctgctaggtcctaccatccaggctgaggtttatgatacagtggtcattacacttaagaacatggcttcccatcctgtcagtcttcatgctgttggtgtatcctactggaaagcttctgagggagctgaatatgatgatcagaccagtcaaagggagaaagaagatgataaagtcttccctggtggaagccatacatatgtctggcaggtcctgaaagagaatggtccaatggcctctgacccactgtgccttacctactcatatctttctcatgtggacctggtaaaagacttgaattcaggcctcattggagccctactagtatgtagagaagggagtctggccaaggaaaagacacagaccttgcacaaatttatactactttttgctgtatttgatgaagggaaaagttggcactcagaaacaaagaactccttgatgcaggatagggatgctgcatctgctcgggcctggcctaaaatgcacacagtcaatggttatgtaaacaggtctctgccaggtctgattggatgccacaggaaatcagtctattggcatgtgattggaatgggcaccactcctgaagtgcactcaatattcctcgaaggtcacacatttcttgtgaggaaccatcgccaggctagcttggaaatctcgccaataactttccttactgctcaaacactcttgatggaccttggacagtttctactgttttgtcatatctcttcccaccaacatgatggcatggaagcttatgtcaaagtagacagctgtccagaggaaccccaactacgaatgaaaaataatgaagaagcggaagactatgatgatgatcttactgattctgaaatggatgtggtcaggtttgatgatgacaactctccttcctttatccaaattcgctcagttgccaagaagcatcctaaaacttgggtacattacattgctgctgaagaggaggactgggactatgctcccttagtcctcgcccccgatgacagaagttataaaagtcaatatttgaacaatggccctcagcggattggtaggaagtacaaaaaagtccgatttatggcatacacagatgaaacctttaagactcgtgaagctattcagcatgaatcaggaatcttgggacctttactttatggggaagttggagacacactgttgattatatttaagaatcaagcaagcagaccatataacatctaccctcacggaatcactgatgtccgtcctttgtattcaaggagattaccaaaaggtgtaaaacatttgaaggattttccaattctgccaggagaaatattcaaatataaatggacagtgactgtagaagatgggccaactaaatcagatcctcggtgcctgacccgctattactctagtttcgttaatatggagagagatctagcttcaggactcattggccctctcctcatctgctacaaagaatctgtagatcaaagaggaaaccagataatgtcagacaagaggaatgtcatcctgttttctgtatttgatgagaaccgaagctggtacctcacagagaatatacaacgctttctccccaatccagctggagtgcagcttgaggatccagagttccaagcctccaacatcatgcacagcatcaatggctatgtttttgatagtttgcagttgtcagtttgtttgcatgaggtggcatactggtacattctaagcattggagcacagactgacttcctttctgtcttcttctctggatataccttcaaacacaaaatggtctatgaagacacactcaccctattcccattctcaggagaaactgtcttcatgtcgatggaaaacccaggtctatggattctggggtgccacaactcagactttcggaacagaggcatgaccgccttactgaaggtttctagttgtgacaagaacactggtgattattacgaggacagttatgaagatatttcagcatacttgctgagtaaaaacaatgccattgaaccaagaagcttctctcaaaacggcgcgccaggtacaccgggcagcggcacggcttcgtcgtcacccggctcgtccacaccgtcgggagctacgggaagcccaggagcgtcaccgggaacgtcgtcaacggggtcaccgggtacgccaggtagcggcacggccagcagctcgccaggttcatcgaccccgtcgggagcgactgggtcgcccggatcaagcccgtcagcttccactggaacaggacccgggtcgtcgccgtcagcctcaacggggacaggacctggttcatcgacgccgtcaggggcgacaggctcgcccggatcgtcaacaccctcgggggcaacggggagccctggtgcgtcgcctggaacctcatccaccggaagcccgggggcctcgccgggtacgagctccacgggatcgcccggagcgtcccccggaacttcaagcacagggagccctgcctcgagcccaccagtcttgaaacgccatcaagctgaaataactcgtactactcttcagtcagatcaagaggaaatcgattatgatgataccatatcagttgaaatgaagaaggaagattttgacatttatgatgaggatgaaaatcagagcccccgcagctttcaaaagaaaacacgacactattttattgctgcagtggagaggctctgggattatgggatgagtagctccccacatgttctaagaaacagggctcagagtggcagtgtccctcagttcaagaaagttgttttccaggaatttactgatggctcctttactcagcccttataccgtggagaactaaatgaacatttgggactcctggggccatatataagagcagaagttgaagataatatcatggtaactttcagaaatcaggcctctcgtccctattccttctattctagccttatttcttatgaggaagatcagaggcaaggagcagaacctagaaaaaactttgtcaagcctaatgaaaccaaaacttacttttggaaagtgcaacatcatatggcacccactaaagatgagtttgactgcaaagcctgggcttatttctctgatgttgacctggaaaaagatgtgcactcaggcctgattggaccccttctggtctgccacactaacacactgaaccctgctcatgggagacaagtgacagtacaggaatttgctctgtttttcaccatctttgatgagaccaaaagctggtacttcactgaaaatatggaaagaaactgcagggctccctgcaatatccagatggaagatcccacttttaaagagaattatcgcttccatgcaatcaatggctacataatggatacactacctggcttagtaatggctcaggatcaaaggattcgatggtatctgctcagcatgggcagcaatgaaaacatccattctattcatttcagtggacatgtgttcactgtacgaaaaaaagaggagtataaaatggcactgtacaatctctatccaggtgtttttgagacagtggaaatgttaccatccaaagctggaatttggcgggtggaatgccttattggcgagcatctacatgctgggatgagcacactttttctggtgtacagcaataagtgtcagactcccctgggaatggcttctggacacattagagattttcagattacagcttcaggacaatatggacagtgggccccaaagctggccagacttcattattccggatcaatcaatgcctggagcaccaaggagcccttttcttggatcaaggtggatctgttggcaccaatgattattcacggcatcaagacccagggtgcccgtcagaagttctccagcctctacatctctcagtttatcatcatgtatagtcttgatgggaagaagtggcagacttatcgaggaaattccactggaaccttaatggtcttctttggcaatgtggattcatctgggataaaacacaatatttttaaccctccaattattgctcgatacatccgtttgcacccaactcattatagcattcgcagcactcttcgcatggagttgatgggctgtgatttaaatagttgcagcatgccattgggaatggagagtaaagcaatatcagatgcacagattactgcttcatcctactttaccaatatgtttgccacctggtctccttcaaaagctcgacttcacctccaagggaggagtaatgcctggagacctcaggtgaataatccaaaagagtggctgcaagtggacttccagaagacaatgaaagtcacaggagtaactactcagggagtaaaatctctgcttaccagcatgtatgtgaaggagttcctcatctccagcagtcaagatggccatcagtggactctcttttttcagaatggcaaagtaaaggtttttcagggaaatcaagactccttcacacctgtggtgaactctctagacccaccgttactgactcgctaccttcgaattcacccccagagttgggtgcaccagattgccctgaggatggaggttctgggctgcgaggcacaggacctctacggcgccggatcacctggggccgaaacggccgaacaaaaactcatctcagaagaggatctgtcacctgcaaccggtcatcatcaccatcaccattga

SEQ ID NO: 699 - protein, 1622 aa, synthetic construct
  REGION 1..1622: note = Description of Artificial Sequence: Synthetic polypeptide
ATRRYYLGAVELSWDYMQSDLGELPVDARFPPRVPKSFPFNTSVVYKKTLFVEFTDHLFNIAKPRPPWMGLLGPTIQAEVYDTVVITLKNMASHPVSLHAVGVSYWKASEGAEYDDQTSQREKEDDKVFPGGSHTYVWQVLKENGPMASDPLCLTYSYLSHVDLVKDLNSGLIGALLVCREGSLAKEKTQTLHKFILLFAVFDEGKSWHSETKNSLMQDRDAASARAWPKMHTVNGYVNRSLPGLIGCHRKSVYWHVIGMGTTPEVHSIFLEGHTFLVRNHRQASLEISPITFLTAQTLLMDLGQFLLFCHISSHQHDGMEAYVKVDSCPEEPQLRMKNNEEAEDYDDDLTDSEMDVVRFDDDNSPSFIQIRSVAKKHPKTWVHYIAAEEEDWDYAPLVLAPDDRSYKSQYLNNGPQRIGRKYKKVRFMAYTDETFKTREAIQHESGILGPLLYGEVGDTLLIIFKNQASRPYNIYPHGITDVRPLYSRRLPKGVKHLKDFPILPGEIFKYKWTVTVEDGPTKSDPRCLTRYYSSFVNMERDLASGLIGPLLICYKESVDQRGNQIMSDKRNVILFSVFDENRSWYLTENIQRFLPNPAGVQLEDPEFQASNIMHSINGYVFDSLQLSVCLHEVAYWYILSIGAQTDFLSVFFSGYTFKHKMVYEDTLTLFPFSGETVFMSMENPGLWILGCHNSDFRNRGMTALLKVSSCDKNTGDYYEDSYEDISAYLLSKNNAIEPRSFSQNPPVLKRHQREITRTTLQSDQEEIDYDDTISVEMKKEDFDIYDEDENQSPRSFQKKTRHYFIAAVERLWDYGMSSSPHVLRNRAQGAPTSESATPESGPGSEPATSGSETPGTSESATPESGPGSEPATSGSETPGTSESATPESGPGTSTEPSEGSAPGTSESATPESGPGSPAGSPTSTEEGSPAGSPTSTEEGSPAGSPTSTEEGTSESATPESGPGTSTEPSEGSAPGASSRAQSGSVPQFKKVVFQEFTDGSFTQPLYRGELNEHLGLLGPYIRAEVEDNIMVTFRNQASRPYSFYSSLISYEEDQRQGAEPRKNFVKPNETKTYFWKVQHHMAPTKDEFDCKAWAYFSDVDLEKDVHSGLIGPLLVCHTNTLNPAHGRQVTVQEFALFFTIFDETKSWYFTENMERNCRAPCNIQMEDPTFKENYRFHAINGYIMDTLPGLVMAQDQRIRWYLLSMGSNENIHSIHFSGHVFTVRKKEEYKMALYNLYPGVFETVEMLPSKAGIWRVECLIGEHLHAGMSTLFLVYSNKCQTPLGMASGHIRDFQITASGQYGQWAPKLARLHYSGSINAWSTKEPFSWIKVDLLAPMIIHGIKTQGARQKFSSLYISQFIIMYSLDGKKWQTYRGNSTGTLMVFFGNVDSSGIKHNIFNPPIIARYIRLHPTHYSIRSTLRMELMGCDLNSCSMPLGMESKAISDAQITASSYFTNMFATWSPSKARLHLQGRSNAWRPQVNNPKEWLQVDFQKTMKVTGVTTQGVKSLLTSMYVKEFLISSSQDGHQWTLFFQNGKVKVFQGNQDSFTPVVNSLDPPLLTRYLRIHPQSWVHQIALRMEVLGCEAQDLYGAGSPGAETAEQKLISEEDLSPATGHHHHHH

SEQ ID NO: 700 - DNA, 4869 bp, synthetic construct
  misc_feature 1..4869: note = Description of Artificial Sequence: Synthetic polynucleotide
  source 1..4869: mol_type = other DNA
gccaccagaagatactacctgggtgcagtggaactgtcatgggactatatgcaaagtgatctcggtgagctgcctgtggacgcaagatttcctcctagagtgccaaaatcttttccattcaacacctcagtcgtgtacaaaaagactctgtttgtagaattcacggatcaccttttcaacatcgctaagccaaggccaccctggatgggtctgctaggtcctaccatccaggctgaggtttatgatacagtggtcattacacttaagaacatggcttcccatcctgtcagtcttcatgctgttggtgtatcctactggaaagcttctgagggagctgaatatgatgatcagaccagtcaaagggagaaagaagatgataaagtcttccctggtggaagccatacatatgtctggcaggtcctgaaagagaatggtccaatggcctctgacccactgtgccttacctactcatatctttctcatgtggacctggtaaaagacttgaattcaggcctcattggagccctactagtatgtagagaagggagtctggccaaggaaaagacacagaccttgcacaaatttatactactttttgctgtatttgatgaagggaaaagttggcactcagaaacaaagaactccttgatgcaggatagggatgctgcatctgctcgggcctggcctaaaatgcacacagtcaatggttatgtaaacaggtctctgccaggtctgattggatgccacaggaaatcagtctattggcatgtgattggaatgggcaccactcctgaagtgcactcaatattcctcgaaggtcacacatttcttgtgaggaaccatcgccaggctagcttggaaatctcgccaataactttccttactgctcaaacactcttgatggaccttggacagtttctactgttttgtcatatctcttcccaccaacatgatggcatggaagcttatgtcaaagtagacagctgtccagaggaaccccaactacgaatgaaaaataatgaagaagcggaagactatgatgatgatcttactgattctgaaatggatgtggtcaggtttgatgatgacaactctccttcctttatccaaattcgctcagttgccaagaagcatcctaaaacttgggtacattacattgctgctgaagaggaggactgggactatgctcccttagtcctcgcccccgatgacagaagttataaaagtcaatatttgaacaatggccctcagcggattggtaggaagtacaaaaaagtccgatttatggcatacacagatgaaacctttaagactcgtgaagctattcagcatgaatcaggaatcttgggacctttactttatggggaagttggagacacactgttgattatatttaagaatcaagcaagcagaccatataacatctaccctcacggaatcactgatgtccgtcctttgtattcaaggagattaccaaaaggtgtaaaacatttgaaggattttccaattctgccaggagaaatattcaaatataaatggacagtgactgtagaagatgggccaactaaatcagatcctcggtgcctgacccgctattactctagtttcgttaatatggagagagatctagcttcaggactcattggccctctcctcatctgctacaaagaatctgtagatcaaagaggaaaccagataatgtcagacaagaggaatgtcatcctgttttctgtatttgatgagaaccgaagctggtacctcacagagaatatacaacgctttctccccaatccagctggagtgcagcttgaggatccagagttccaagcctccaacatcatgcacagcatcaatggctatgtttttgatagtttgcagttgtcagtttgtttgcatgaggtggcatactggtacattctaagcattggagcacagactgacttcctttctgtcttcttctctggatataccttcaaacacaaaatggtctatgaagacacactcaccctattcccattctcaggagaaactgtcttcatgtcgatggaaaacccaggtctatggattctggggtgccacaactcagactttcggaacagaggcatgaccgccttactgaaggtttctagttgtgacaagaacactggtgattattacgaggacagttatgaagatatttcagcatacttgctgagtaaaaacaatgccattgaaccaagaagcttctctcaaaacccaccagtcttgaaacgccatcaacgggaaataactcgtactactcttcagtcagatcaagaggaaatcgattatgatgataccatatcagttgaaatgaagaaggaagattttgacatttatgatgaggatgaaaatcagagcccccgcagctttcaaaagaaaacacgacactattttattgctgcagtggagaggctctgggattatgggatgagtagctccccacatgttctaagaaacagggctcagggcgcgccaacgtccgaaagtgctacccctgagtcaggccctggtagtgagcctgccacaagcggaagcgaaactccggggacctcagagtctgccactcccgaatcggggccaggctctgaaccggccacttcagggagcgaaacaccaggaacatcggagagcgctaccccggagagcgggccaggaactagtactgagcctagcgagggaagtgcacctggtacaagcgagtccgccacacccgagtctggccctggctctccagcgggctcacccacgagcactgaagagggctctcccgctggcagcccaacgtcgacagaagaaggatcaccagcaggctcccccacatcaacagaggagggtacatcagaatctgctactcccgagagtggacccggtacctccactgagcccagcgaggggagtgcaccaggtgcctcgagcagggctcagagtggcagtgtccctcagttcaagaaagttgttttccaggaatttactgatggctcctttactcagcccttataccgtggagaactaaatgaacatttgggactcctggggccatatataagagcagaagttgaagataatatcatggtaactttcagaaatcaggcctctcgtccctattccttctattctagccttatttcttatgaggaagatcagaggcaaggagcagaacctagaaaaaactttgtcaagcctaatgaaaccaaaacttacttttggaaagtgcaacatcatatggcacccactaaagatgagtttgactgcaaagcctgggcttatttctctgatgttgacctggaaaaagatgtgcactcaggcctgattggaccccttctggtctgccacactaacacactgaaccctgctcatgggagacaagtgacagtacaggaatttgctctgtttttcaccatctttgatgagaccaaaagctggtacttcactgaaaatatggaaagaaactgcagggctccctgcaatatccagatggaagatcccacttttaaagagaattatcgcttccatgcaatcaatggctacataatggatacactacctggcttagtaatggctcaggatcaaaggattcgatggtatctgctcagcatgggcagcaatgaaaacatccattctattcatttcagtggacatgtgttcactgtacgaaaaaaagaggagtataaaatggcactgtacaatctctatccaggtgtttttgagacagtggaaatgttaccatccaaagctggaatttggcgggtggaatgccttattggcgagcatctacatgctgggatgagcacactttttctggtgtacagcaataagtgtcagactcccctgggaatggcttctggacacattagagattttcagattacagcttcaggacaatatggacagtgggccccaaagctggccagacttcattattccggatcaatcaatgcctggagcaccaaggagcccttttcttggatcaaggtggatctgttggcaccaatgattattcacggcatcaagacccagggtgcccgtcagaagttctccagcctctacatctctcagtttatcatcatgtatagtcttgatgggaagaagtggcagacttatcgaggaaattccactggaaccttaatggtcttctttggcaatgtggattcatctgggataaaacacaatatttttaaccctccaattattgctcgatacatccgtttgcacccaactcattatagcattcgcagcactcttcgcatggagttgatgggctgtgatttaaatagttgcagcatgccattgggaatggagagtaaagcaatatcagatgcacagattactgcttcatcctactttaccaatatgtttgccacctggtctccttcaaaagctcgacttcacctccaagggaggagtaatgcctggagacctcaggtgaataatccaaaagagtggctgcaagtggacttccagaagacaatgaaagtcacaggagtaactactcagggagtaaaatctctgcttaccagcatgtatgtgaaggagttcctcatctccagcagtcaagatggccatcagtggactctcttttttcagaatggcaaagtaaaggtttttcagggaaatcaagactccttcacacctgtggtgaactctctagacccaccgttactgactcgctaccttcgaattcacccccagagttgggtgcaccagattgccctgaggatggaggttctgggctgcgaggcacaggacctctacggcgccggatcacctggggccgaaacggccgaacaaaaactcatctcagaagaggatctgtcacctgcaaccggtcatcatcaccatcaccattga

SEQ ID NO: 701 - protein, 1622 aa, synthetic construct
  REGION 1..1622: note = Description of Artificial Sequence: Synthetic polypeptide
ATRRYYLGAVELSWDYMQSDLGELPVDARFPPRVPKSFPFNTSVVYKKTLFVEFTDHLFNIAKPRPPWMGLLGPTIQAEVYDTVVITLKNMASHPVSLHAVGVSYWKASEGAEYDDQTSQREKEDDKVFPGGSHTYVWQVLKENGPMASDPLCLTYSYLSHVDLVKDLNSGLIGALLVCREGSLAKEKTQTLHKFILLFAVFDEGKSWHSETKNSLMQDRDAASARAWPKMHTVNGYVNRSLPGLIGCHRKSVYWHVIGMGTTPEVHSIFLEGHTFLVRNHRQASLEISPITFLTAQTLLMDLGQFLLFCHISSHQHDGMEAYVKVDSCPEEPQLRMKNNEEAEDYDDDLTDSEMDVVRFDDDNSPSFIQIRSVAKKHPKTWVHYIAAEEEDWDYAPLVLAPDDRSYKSQYLNNGPQRIGRKYKKVRFMAYTDETFKTREAIQHESGILGPLLYGEVGDTLLIIFKNQASRPYNIYPHGITDVRPLYSRRLPKGVKHLKDFPILPGEIFKYKWTVTVEDGPTKSDPRCLTRYYSSFVNMERDLASGLIGPLLICYKESVDQRGNQIMSDKRNVILFSVFDENRSWYLTENIQRFLPNPAGVQLEDPEFQASNIMHSINGYVFDSLQLSVCLHEVAYWYILSIGAQTDFLSVFFSGYTFKHKMVYEDTLTLFPFSGETVFMSMENPGLWILGCHNSDFRNRGMTALLKVSSCDKNTGDYYEDSYEDISAYLLSKNNAIEPRSFSQNPPVLKRHQREITRTTLQSDQEEIDYDDTISVEMKKEDFDIYDEDENQSPRSFQKKTRHYFIAAVERLWDYGMSSSPHVLRNRAQGAPGTPGSGTASSSPGASPGTSSTGSPGASPGTSSTGSPGASPGTSSTGSPGSSPSASTGTGPGTPGSGTASSSPGASPGTSSTGSPGASPGTSSTGSPGASPGTSSTGSPGSSTPSGATGSPGSSTPSGATGSPGASPGTSSTGSPASSRAQSGSVPQFKKVVFQEFTDGSFTQPLYRGELNEHLGLLGPYIRAEVEDNIMVTFRNQASRPYSFYSSLISYEEDQRQGAEPRKNFVKPNETKTYFWKVQHHMAPTKDEFDCKAWAYFSDVDLEKDVHSGLIGPLLVCHTNTLNPAHGRQVTVQEFALFFTIFDETKSWYFTENMERNCRAPCNIQMEDPTFKENYRFHAINGYIMDTLPGLVMAQDQRIRWYLLSMGSNENIHSIHFSGHVFTVRKKEEYKMALYNLYPGVFETVEMLPSKAGIWRVECLIGEHLHAGMSTLFLVYSNKCQTPLGMASGHIRDFQITASGQYGQWAPKLARLHYSGSINAWSTKEPFSWIKVDLLAPMIIHGIKTQGARQKFSSLYISQFIIMYSLDGKKWQTYRGNSTGTLMVFFGNVDSSGIKHNIFNPPIIARYIRLHPTHYSIRSTLRMELMGCDLNSCSMPLGMESKAISDAQITASSYFTNMFATWSPSKARLHLQGRSNAWRPQVNNPKEWLQVDFQKTMKVTGVTTQGVKSLLTSMYVKEFLISSSQDGHQWTLFFQNGKVKVFQGNQDSFTPVVNSLDPPLLTRYLRIHPQSWVHQIALRMEVLGCEAQDLYGAGSPGAETAEQKLISEEDLSPATGHHHHHH

SEQ ID NO: 702 - DNA, 4869 bp, synthetic construct
  misc_feature 1..4869: note = Description of Artificial Sequence: Synthetic polynucleotide
  source 1..4869: mol_type = other DNA
gccaccagaagatactacctgggtgcagtggaactgtcatgggactatatgcaaagtgatctcggtgagctgcctgtggacgcaagatttcctcctagagtgccaaaatcttttccattcaacacctcagtcgtgtacaaaaagactctgtttgtagaattcacggatcaccttttcaacatcgctaagccaaggccaccctggatgggtctgctaggtcctaccatccaggctgaggtttatgatacagtggtcattacacttaagaacatggcttcccatcctgtcagtcttcatgctgttggtgtatcctactggaaagcttctgagggagctgaatatgatgatcagaccagtcaaagggagaaagaagatgataaagtcttccctggtggaagccatacatatgtctggcaggtcctgaaagagaatggtccaatggcctctgacccactgtgccttacctactcatatctttctcatgtggacctggtaaaagacttgaattcaggcctcattggagccctactagtatgtagagaagggagtctggccaaggaaaagacacagaccttgcacaaatttatactactttttgctgtatttgatgaagggaaaagttggcactcagaaacaaagaactccttgatgcaggatagggatgctgcatctgctcgggcctggcctaaaatgcacacagtcaatggttatgtaaacaggtctctgccaggtctgattggatgccacaggaaatcagtctattggcatgtgattggaatgggcaccactcctgaagtgcactcaatattcctcgaaggtcacacatttcttgtgaggaaccatcgccaggctagcttggaaatctcgccaataactttccttactgctcaaacactcttgatggaccttggacagtttctactgttttgtcatatctcttcccaccaacatgatggcatggaagcttatgtcaaagtagacagctgtccagaggaaccccaactacgaatgaaaaataatgaagaagcggaagactatgatgatgatcttactgattctgaaatggatgtggtcaggtttgatgatgacaactctccttcctttatccaaattcgctcagttgccaagaagcatcctaaaacttgggtacattacattgctgctgaagaggaggactgggactatgctcccttagtcctcgcccccgatgacagaagttataaaagtcaatatttgaacaatggccctcagcggattggtaggaagtacaaaaaagtccgatttatggcatacacagatgaaacctttaagactcgtgaagctattcagcatgaatcaggaatcttgggacctttactttatggggaagttggagacacactgttgattatatttaagaatcaagcaagcagaccatataacatctaccctcacggaatcactgatgtccgtcctttgtattcaaggagattaccaaaaggtgtaaaacatttgaaggattttccaattctgccaggagaaatattcaaatataaatggacagtgactgtagaagatgggccaactaaatcagatcctcggtgcctgacccgctattactctagtttcgttaatatggagagagatctagcttcaggactcattggccctctcctcatctgctacaaagaatctgtagatcaaagaggaaaccagataatgtcagacaagaggaatgtcatcctgttttctgtatttgatgagaaccgaagctggtacctcacagagaatatacaacgctttctccccaatccagctggagtgcagcttgaggatccagagttccaagcctccaacatcatgcacagcatcaatggctatgtttttgatagtttgcagttgtcagtttgtttgcatgaggtggcatactggtacattctaagcattggagcacagactgacttcctttctgtcttcttctctggatataccttcaaacacaaaatggtctatgaagacacactcaccctattcccattctcaggagaaactgtcttcatgtcgatggaaaacccaggtctatggattctggggtgccacaactcagactttcggaacagaggcatgaccgccttactgaaggtttctagttgtgacaagaacactggtgattattacgaggacagttatgaagatatttcagcatacttgctgagtaaaaacaatgccattgaaccaagaagcttctctcaaaacccaccagtcttgaaacgccatcaacgggaaataactcgtactactcttcagtcagatcaagaggaaatcgattatgatgataccatatcagttgaaatgaagaaggaagattttgacatttatgatgaggatgaaaatcagagcccccgcagctttcaaaagaaaacacgacactattttattgctgcagtggagaggctctgggattatgggatgagtagctccccacatgttctaagaaacagggctcagggcgcgccaggtacacccggatcgggtacagcgtcatcgagccccggtgcgtcacctggtacgtcgagcacggggtcgccaggggcgtcccctgggacgtcctcaacaggctcgcccggtgcgtcacccggcacgtcgtccacgggttcacctggtagctccccttccgcgtccactggcaccgggcctggaactccggggagcggcacagcgagctcgtcgccgggagcatcgcctgggacatcgagcaccgggtcgccaggagcatcgcccggaacatccagcacaggaagccccggcgcgtcgcccgggacatcaagcacaggttccccgggatcgagcacgccgtccggagccactggatcaccagggagctcgacaccttccggcgcaacgggatcgcccggagccagcccgggtacgtcaagcactggctcccctgcctcgagcagggctcagagtggcagtgtccctcagttcaagaaagttgttttccaggaatttactgatggctcctttactcagcccttataccgtggagaactaaatgaacatttgggactcctggggccatatataagagcagaagttgaagataatatcatggtaactttcagaaatcaggcctctcgtccctattccttctattctagccttatttcttatgaggaagatcagaggcaaggagcagaacctagaaaaaactttgtcaagcctaatgaaaccaaaacttacttttggaaagtgcaacatcatatggcacccactaaagatgagtttgactgcaaagcctgggcttatttctctgatgttgacctggaaaaagatgtgcactcaggcctgattggaccccttctggtctgccacactaacacactgaaccctgctcatgggagacaagtgacagtacaggaatttgctctgtttttcaccatctttgatgagaccaaaagctggtacttcactgaaaatatggaaagaaactgcagggctccctgcaatatccagatggaagatcccacttttaaagagaattatcgcttccatgcaatcaatggctacataatggatacactacctggcttagtaatggctcaggatcaaaggattcgatggtatctgctcagcatgggcagcaatgaaaacatccattctattcatttcagtggacatgtgttcactgtacgaaaaaaagaggagtataaaatggcactgtacaatctctatccaggtgtttttgagacagtggaaatgttaccatccaaagctggaatttggcgggtggaatgccttattggcgagcatctacatgctgggatgagcacactttttctggtgtacagcaataagtgtcagactcccctgggaatggcttctggacacattagagattttcagattacagcttcaggacaatatggacagtgggccccaaagctggccagacttcattattccggatcaatcaatgcctggagcaccaaggagcccttttcttggatcaaggtggatctgttggcaccaatgattattcacggcatcaagacccagggtgcccgtcagaagttctccagcctctacatctctcagtttatcatcatgtatagtcttgatgggaagaagtggcagacttatcgaggaaattccactggaaccttaatggtcttctttggcaatgtggattcatctgggataaaacacaatatttttaaccctccaattattgctcgatacatccgtttgcacccaactcattatagcattcgcagcactcttcgcatggagttgatgggctgtgatttaaatagttgcagcatgccattgggaatggagagtaaagcaatatcagatgcacagattactgcttcatcctactttaccaatatgtttgccacctggtctccttcaaaagctcgacttcacctccaagggaggagtaatgcctggagacctcaggtgaataatccaaaagagtggctgcaagtggacttccagaagacaatgaaagtcacaggagtaactactcagggagtaaaatctctgcttaccagcatgtatgtgaaggagttcctcatctccagcagtcaagatggccatcagtggactctcttttttcagaatggcaaagtaaaggtttttcagggaaatcaagactccttcacacctgtggtgaactctctagacccaccgttactgactcgctaccttcgaattcacccccagagttgggtgcaccagattgccctgaggatggaggttctgggctgcgaggcacaggacctctacggcgccggatcacctggggccgaaacggccgaacaaaaactcatctcagaagaggatctgtcacctgcaaccggtcatcatcaccatcaccattga

SEQ ID NO: 703 - protein, 1619 aa, synthetic construct
  REGION 1..1619: note = Description of Artificial Sequence: Synthetic polypeptide
ATRRYYLGAVELSWDYMQSDLGELPVDARFPPRVPKSFPFNTSVVYKKTLFVEFTDHLFNIAKPRPPWMGLLGPTIQAEVYDTVVITLKNMASHPVSLHAVGVSYWKASEGAEYDDQTSQREKEDDKVFPGGSHTYVWQVLKENGPMASDPLCLTYSYLSHVDLVKDLNSGLIGALLVCREGSLAKEKTQTLHKFILLFAVFDEGKSWHSETKNSLMQDRDAASARAWPKMHTVNGYVNRSLPGLIGCHRKSVYWHVIGMGTTPEVHSIFLEGHTFLVRNHRQASLEISPITFLTAQTLLMDLGQFLLFCHISSHQHDGMEAYVKVDSCPEEPQLRMKNNEEAEDYDDDLTDSEMDVVRFDDDNSPSFIQIRSVAKKHPKTWVHYIAAEEEDWDYAPLVLAPDDRSYKSQYLNNGPQRIGRKYKKVRFMAYTDETFKTREAIQHESGILGPLLYGEVGDTLLIIFKNQASRPYNIYPHGITDVRPLYSRRLPKGVKHLKDFPILPGEIFKYKWTVTVEDGPTKSDPRCLTRYYSSFVNMERDLASGLIGPLLICYKESVDQRGNQIMSDKRNVILFSVFDENRSWYLTENIQRFLPNPAGVQLEDPEFQASNIMHSINGYVFDSLQLSVCLHEVAYWYILSIGAQTDFLSVFFSGYTFKHKMVYEDTLTLFPFSGETVFMSMENPGLWILGCHNSDFRNRGMTALLKVSSCDKNTGDYYEDSYEDISAYLLSKNNAIEPRSFSQNPPVLKRHQREITRTTLQSDQEEIDYDDTISVEMKKEDFDIYDEDENQSPRSFQKKTRHYFIAAVERLWDYGMSSSPHVLRNRAQSGSVPQFKKVVFQEFTDGSFTQPLYRGELNEHLGLLGPYIRAEVEDNIMVTFRNQASRPYSFYSSLISYEEDQRQGAEPRKNFVKPNETKTYFWKVQHHMAPTKDEFDCKAWAYFSDVDLEKDVHSGLIGPLLVCHTNTLNPAHGRQVTVQEFALFFTIFDETKSWYFTENMERNCRAPCNIQMEDPTFKENYRFHAINGYIMDTLPGLVMAQDQRIRWYLLSMGSNENIHSIHFSGHVFTVRKKEEYKMALYNLYPGVFETVEMLPSKAGIWRVECLIGEHLHAGMSTLFLVYSNKCQTPLGMASGHIRDFQITASGQYGQWAPKLARLHYSGSINAWSTKEPFSWIKVDLLAPMIIHGIKTQGARQKFSSLYISQFIIMYSLDGKKWQTYRGNSTGTLMVFFGNVDSSGIKHNIFNPPIIARYIRLHPTHYSIRSTLRMELMGCDLGAPTSESATPESGPGSEPATSGSETPGTSESATPESGPGSEPATSGSETPGTSESATPESGPGTSTEPSEGSAPGSPAGSPTSTEEGTSESATPESGPGSEPATSGSETPGTSESATPESGPGSPAGSPTSTEEGSPAGSPTSTEEGASSNSCSMPLGMESKAISDAQITASSYFTNMFATWSPSKARLHLQGRSNAWRPQVNNPKEWLQVDFQKTMKVTGVTTQGVKSLLTSMYVKEFLISSSQDGHQWTLFFQNGKVKVFQGNQDSFTPVVNSLDPPLLTRYLRIHPQSWVHQIALRMEVLGCEAQDLYGAGSPGAETAEQKLISEEDLSPATGHHHHHH

SEQ ID NO: 704 - DNA, 4860 bp, synthetic construct
  misc_feature 1..4860: note = Description of Artificial Sequence: Synthetic polynucleotide
  source 1..4860: mol_type = other DNA
gccaccagaagatactacctgggtgcagtggaactgtcatgggactatatgcaaagtgatctcggtgagctgcctgtggacgcaagatttcctcctagagtgccaaaatcttttccattcaacacctcagtcgtgtacaaaaagactctgtttgtagaattcacggatcaccttttcaacatcgctaagccaaggccaccctggatgggtctgctaggtcctaccatccaggctgaggtttatgatacagtggtcattacacttaagaacatggcttcccatcctgtcagtcttcatgctgttggtgtatcctactggaaagcttctgagggagctgaatatgatgatcagaccagtcaaagggagaaagaagatgataaagtcttccctggtggaagccatacatatgtctggcaggtcctgaaagagaatggtccaatggcctctgacccactgtgccttacctactcatatctttctcatgtggacctggtaaaagacttgaattcaggcctcattggagccctactagtatgtagagaagggagtctggccaaggaaaagacacagaccttgcacaaatttatactactttttgctgtatttgatgaagggaaaagttggcactcagaaacaaagaactccttgatgcaggatagggatgctgcatctgctcgggcctggcctaaaatgcacacagtcaatggttatgtaaacaggtctctgccaggtctgattggatgccacaggaaatcagtctattggcatgtgattggaatgggcaccactcctgaagtgcactcaatattcctcgaaggtcacacatttcttgtgaggaaccatcgccaggctagcttggaaatctcgccaataactttccttactgctcaaacactcttgatggaccttggacagtttctactgttttgtcatatctcttcccaccaacatgatggcatggaagcttatgtcaaagtagacagctgtccagaggaaccccaactacgaatgaaaaataatgaagaagcggaagactatgatgatgatcttactgattctgaaatggatgtggtcaggtttgatgatgacaactctccttcctttatccaaattcgctcagttgccaagaagcatcctaaaacttgggtacattacattgctgctgaagaggaggactgggactatgctcccttagtcctcgcccccgatgacagaagttataaaagtcaatatttgaacaatggccctcagcggattggtaggaagtacaaaaaagtccgatttatggcatacacagatgaaacctttaagactcgtgaagctattcagcatgaatcaggaatcttgggacctttactttatggggaagttggagacacactgttgattatatttaagaatcaagcaagcagaccatataacatctaccctcacggaatcactgatgtccgtcctttgtattcaaggagattaccaaaaggtgtaaaacatttgaaggattttccaattctgccaggagaaatattcaaatataaatggacagtgactgtagaagatgggccaactaaatcagatcctcggtgcctgacccgctattactctagtttcgttaatatggagagagatctagcttcaggactcattggccctctcctcatctgctacaaagaatctgtagatcaaagaggaaaccagataatgtcagacaagaggaatgtcatcctgttttctgtatttgatgagaaccgaagctggtacctcacagagaatatacaacgctttctccccaatccagctggagtgcagcttgaggatccagagttccaagcctccaacatcatgcacagcatcaatggctatgtttttgatagtttgcagttgtcagtttgtttgcatgaggtggcatactggtacattctaagcattggagcacagactgacttcctttctgtcttcttctctggatataccttcaaacacaaaatggtctatgaagacacactcaccctattcccattctcaggagaaactgtcttcatgtcgatggaaaacccaggtctatggattctggggtgccacaactcagactttcggaacagaggcatgaccgccttactgaaggtttctagttgtgacaagaacactggtgattattacgaggacagttatgaagatatttcagcatacttgctgagtaaaaacaatgccattgaaccaagaagcttctctcaaaacccaccagtcttgaaacgccatcaacgggaaataactcgtactactcttcagtcagatcaagaggaaatcgattatgatgataccatatcagttgaaatgaagaaggaagattttgacatttatgatgaggatgaaaatcagagcccccgcagctttcaaaagaaaacacgacactattttattgctgcagtggagaggctctgggattatgggatgagtagctccccacatgttctaagaaacagggctcagagtggcagtgtccctcagttcaagaaagttgttttccaggaatttactgatggctcctttactcagcccttataccgtggagaactaaatgaacatttgggactcctggggccatatataagagcagaagttgaagataatatcatggtaactttcagaaatcaggcctctcgtccctattccttctattctagccttatttcttatgaggaagatcagaggcaaggagcagaacctagaaaaaactttgtcaagcctaatgaaaccaaaacttacttttggaaagtgcaacatcatatggcacccactaaagatgagtttgactgcaaagcctgggcttatttctctgatgttgacctggaaaaagatgtgcactcaggcctgattggaccccttctggtctgccacactaacacactgaaccctgctcatgggagacaagtgacagtacaggaatttgctctgtttttcaccatctttgatgagaccaaaagctggtacttcactgaaaatatggaaagaaactgcagggctccctgcaatatccagatggaagatcccacttttaaagagaattatcgcttccatgcaatcaatggctacataatggatacactacctggcttagtaatggctcaggatcaaaggattcgatggtatctgctcagcatgggcagcaatgaaaacatccattctattcatttcagtggacatgtgttcactgtacgaaaaaaagaggagtataaaatggcactgtacaatctctatccaggtgtttttgagacagtggaaatgttaccatccaaagctggaatttggcgggtggaatgccttattggcgagcatctacatgctgggatgagcacactttttctggtgtacagcaataagtgtcagactcccctgggaatggcttctggacacattagagattttcagattacagcttcaggacaatatggacagtgggccccaaagctggccagacttcattattccggatcaatcaatgcctggagcaccaaggagcccttttcttggatcaaggtggatctgttggcaccaatgattattcacggcatcaagacccagggtgcccgtcagaagttctccagcctctacatctctcagtttatcatcatgtatagtcttgatgggaagaagtggcagacttatcgaggaaattccactggaaccttaatggtcttctttggcaatgtggattcatctgggataaaacacaatatttttaaccctccaattattgctcgatacatccgtttgcacccaactcattatagcattcgcagcactcttcgcatggagttgatgggctgtgatttaggcgcgccaacatcagagagcgccacccctgaaagtggtcccgggagcgagccagccacatctgggtcggaaacgccaggcacaagtgagtctgcaactcccgagtccggacctggctccgagcctgccactagcggctccgagactccgggaacttccgagagcgctacaccagaaagcggacccggaaccagtaccgaacctagcgagggctctgctccgggcagcccagccggctctcctacatccacggaggagggcacttccgaatccgccaccccggagtcagggccaggatctgaacccgctacctcaggcagtgagacgccaggaacgagcgagtccgctacaccggagagtgggccagggagccctgctggatctcctacgtccactgaggaagggtcaccagcgggctcgcccaccagcactgaagaaggtgcctcgagcaatagttgcagcatgccattgggaatggagagtaaagcaatatcagatgcacagattactgcttcatcctactttaccaatatgtttgccacctggtctccttcaaaagctcgacttcacctccaagggaggagtaatgcctggagacctcaggtgaataatccaaaagagtggctgcaagtggacttccagaagacaatgaaagtcacaggagtaactactcagggagtaaaatctctgcttaccagcatgtatgtgaaggagttcctcatctccagcagtcaagatggccatcagtggactctcttttttcagaatggcaaagtaaaggtttttcagggaaatcaagactccttcacacctgtggtgaactctctagacccaccgttactgactcgctaccttcgaattcacccccagagttgggtgcaccagattgccctgaggatggaggttctgggctgcgaggcacaggacctctacggcgccggatcacctggggccgaaacggccgaacaaaaactcatctcagaagaggatctgtcacctgcaaccggtcatcatcaccatcaccattga

SEQ ID NO: 705 - protein, 1619 aa, synthetic construct
  REGION 1..1619: note = Description of Artificial Sequence: Synthetic polypeptide
ATRRYYLGAVELSWDYMQSDLGELPVDARFPPRVPKSFPFNTSVVYKKTLFVEFTDHLFNIAKPRPPWMGLLGPTIQAEVYDTVVITLKNMASHPVSLHAVGVSYWKASEGAEYDDQTSQREKEDDKVFPGGSHTYVWQVLKENGPMASDPLCLTYSYLSHVDLVKDLNSGLIGALLVCREGSLAKEKTQTLHKFILLFAVFDEGKSWHSETKNSLMQDRDAASARAWPKMHTVNGYVNRSLPGLIGCHRKSVYWHVIGMGTTPEVHSIFLEGHTFLVRNHRQASLEISPITFLTAQTLLMDLGQFLLFCHISSHQHDGMEAYVKVDSCPEEPQLRMKNNEEAEDYDDDLTDSEMDVVRFDDDNSPSFIQIRSVAKKHPKTWVHYIAAEEEDWDYAPLVLAPDDRSYKSQYLNNGPQRIGRKYKKVRFMAYTDETFKTREAIQHESGILGPLLYGEVGDTLLIIFKNQASRPYNIYPHGITDVRPLYSRRLPKGVKHLKDFPILPGEIFKYKWTVTVEDGPTKSDPRCLTRYYSSFVNMERDLASGLIGPLLICYKESVDQRGNQIMSDKRNVILFSVFDENRSWYLTENIQRFLPNPAGVQLEDPEFQASNIMHSINGYVFDSLQLSVCLHEVAYWYILSIGAQTDFLSVFFSGYTFKHKMVYEDTLTLFPFSGETVFMSMENPGLWILGCHNSDFRNRGMTALLKVSSCDKNTGDYYEDSYEDISAYLLSKNNAIEPRSFSQNPPVLKRHQREITRTTLQSDQEEIDYDDTISVEMKKEDFDIYDEDENQSPRSFQKKTRHYFIAAVERLWDYGMSSSPHVLRNRAQSGSVPQFKKVVFQEFTDGSFTQPLYRGELNEHLGLLGPYIRAEVEDNIMVTFRNQASRPYSFYSSLISYEEDQRQGAEPRKNFVKPNETKTYFWKVQHHMAPTKDEFDCKAWAYFSDVDLEKDVHSGLIGPLLVCHTNTLNPAHGRQVTVQEFALFFTIFDETKSWYFTENMERNCRAPCNIQMEDPTFKENYRFHAINGYIMDTLPGLVMAQDQRIRWYLLSMGSNENIHSIHFSGHVFTVRKKEEYKMALYNLYPGVFETVEMLPSKAGIWRVECLIGEHLHAGMSTLFLVYSNKCQTPLGMASGHIRDFQITASGQYGQWAPKLARLHYSGSINAWSTKEPFSWIKVDLLAPMIIHGIKTQGARQKFSSLYISQFIIMYSLDGKKWQTYRGNSTGTLMVFFGNVDSSGIKHNIFNPPIIARYIRLHPTHYSIRSTLRMELMGCDLGAPGSSPSASTGTGPGSSPSASTGTGPGASPGTSSTGSPGASPGTSSTGSPGSSTPSGATGSPGSSPSASTGTGPGASPGTSSTGSPGSSPSASTGTGPGTPGSGTASSSPGSSTPSGATGSPGSSTPSGATGSPGASPGTSSTGSPASSNSCSMPLGMESKAISDAQITASSYFTNMFATWSPSKARLHLQGRSNAWRPQVNNPKEWLQVDFQKTMKVTGVTTQGVKSLLTSMYVKEFLISSSQDGHQWTLFFQNGKVKVFQGNQDSFTPVVNSLDPPLLTRYLRIHPQSWVHQIALRMEVLGCEAQDLYGAGSPGAETAEQKLISEEDLSPATGHHHHHH

SEQ ID NO: 706 - DNA, 4860 bp, synthetic construct
  misc_feature 1..4860: note = Description of Artificial Sequence: Synthetic polynucleotide
  source 1..4860: mol_type = other DNA
gccaccagaagatactacctgggtgcagtggaactgtcatgggactatatgcaaagtgatctcggtgagctgcctgtggacgcaagatttcctcctagagtgccaaaatcttttccattcaacacctcagtcgtgtacaaaaagactctgtttgtagaattcacggatcaccttttcaacatcgctaagccaaggccaccctggatgggtctgctaggtcctaccatccaggctgaggtttatgatacagtggtcattacacttaagaacatggcttcccatcctgtcagtcttcatgctgttggtgtatcctactggaaagcttctgagggagctgaatatgatgatcagaccagtcaaagggagaaagaagatgataaagtcttccctggtggaagccatacatatgtctggcaggtcctgaaagagaatggtccaatggcctctgacccactgtgccttacctactcatatctttctcatgtggacctggtaaaagacttgaattcaggcctcattggagccctactagtatgtagagaagggagtctggccaaggaaaagacacagaccttgcacaaatttatactactttttgctgtatttgatgaagggaaaagttggcactcagaaacaaagaactccttgatgcaggatagggatgctgcatctgctcgggcctggcctaaaatgcacacagtcaatggttatgtaaacaggtctctgccaggtctgattggatgccacaggaaatcagtctattggcatgtgattggaatgggcaccactcctgaagtgcactcaatattcctcgaaggtcacacatttcttgtgaggaaccatcgccaggctagcttggaaatctcgccaataactttccttactgctcaaacactcttgatggaccttggacagtttctactgttttgtcatatctcttcccaccaacatgatggcatggaagcttatgtcaaagtagacagctgtccagaggaaccccaactacgaatgaaaaataatgaagaagcggaagactatgatgatgatcttactgattctgaaatggatgtggtcaggtttgatgatgacaactctccttcctttatccaaattcgctcagttgccaagaagcatcctaaaacttgggtacattacattgctgctgaagaggaggactgggactatgctcccttagtcctcgcccccgatgacagaagttataaaagtcaatatttgaacaatggccctcagcggattggtaggaagtacaaaaaagtccgatttatggcatacacagatgaaacctttaagactcgtgaagctattcagcatgaatcaggaatcttgggacctttactttatggggaagttggagacacactgttgattatatttaagaatcaagcaagcagaccatataacatctaccctcacggaatcactgatgtccgtcctttgtattcaaggagattaccaaaaggtgtaaaacatttgaaggattttccaattctgccaggagaaatattcaaatataaatggacagtgactgtagaagatgggccaactaaatcagatcctcggtgcctgacccgctattactctagtttcgttaatatggagagagatctagcttcaggactcattggccctctcctcatctgctacaaagaatctgtagatcaaagaggaaaccagataatgtcagacaagaggaatgtcatcctgttttctgtatttgatgagaaccgaagctggtacctcacagagaatatacaacgctttctccccaatccagctggagtgcagcttgaggatccagagttccaagcctccaacatcatgcacagcatcaatggctatgtttttgatagtttgcagttgtcagtttgtttgcatgaggtggcatactggtacattctaagcattggagcacagactgacttcctttctgtcttcttctctggatataccttcaaacacaaaatggtctatgaagacacactcaccctattcccattctcaggagaaactgtcttcatgtcgatggaaaacccaggtctatggattctggggtgccacaactcagactttcggaacagaggcatgaccgccttactgaaggtttctagttgtgacaagaacactggtgattattacgaggacagttatgaagatatttcagcatacttgctgagtaaaaacaatgccattgaaccaagaagcttctctcaaaacccaccagtcttgaaacgccatcaacgggaaataactcgtactactcttcagtcagatcaagaggaaatcgattatgatgataccatatcagttgaaatgaagaaggaagattttgacatttatgatgaggatgaaaatcagagcccccgcagctttcaaaagaaaacacgacactattttattgctgcagtggagaggctctgggattatgggatgagtagctccccacatgttctaagaaacagggctcagagtggcagtgtccctcagttcaagaaagttgttttccaggaatttactgatggctcctttactcagcccttataccgtggagaactaaatgaacatttgggactcctggggccatatataagagcagaagttgaagataatatcatggtaactttcagaaatcaggcctctcgtccctattccttctattctagccttatttcttatgaggaagatcagaggcaaggagcagaacctagaaaaaactttgtcaagcctaatgaaaccaaaacttacttttggaaagtgcaacatcatatggcacccactaaagatgagtttgactgcaaagcctgggcttatttctctgatgttgacctggaaaaagatgtgcactcaggcctgattggaccccttctggtctgccacactaacacactgaaccctgctcatgggagacaagtgacagtacaggaatttgctctgtttttcaccatctttgatgagaccaaaagctggtacttcactgaaaatatggaaagaaactgcagggctccctgcaatatccagatggaagatcccacttttaaagagaattatcgcttccatgcaatcaatggctacataatggatacactacctggcttagtaatggctcaggatcaaaggattcgatggtatctgctcagcatgggcagcaatgaaaacatccattctattcatttcagtggacatgtgttcactgtacgaaaaaaagaggagtataaaatggcactgtacaatctctatccaggtgtttttgagacagtggaaatgttaccatccaaagctggaatttggcgggtggaatgccttattggcgagcatctacatgctgggatgagcacactttttctggtgtacagcaataagtgtcagactcccctgggaatggcttctggacacattagagattttcagattacagcttcaggacaatatggacagtgggccccaaagctggccagacttcattattccggatcaatcaatgcctggagcaccaaggagcccttttcttggatcaaggtggatctgttggcaccaatgattattcacggcatcaagacccagggtgcccgtcagaagttctccagcctctacatctctcagtttatcatcatgtatagtcttgatgggaagaagtggcagacttatcgaggaaattccactggaaccttaatggtcttctttggcaatgtggattcatctgggataaaacacaatatttttaaccctccaattattgctcgatacatccgtttgcacccaactcattatagcattcgcagcactcttcgcatggagttgatgggctgtgatttaggcgcgccaggctccagcccctccgcgagcacgggaaccggaccaggttcgtcaccctcagcatcaacggggacgggaccgggggcgtcaccaggaacgtcctccaccggctcgccgggtgcatcacccggaacgtcatcgaccggatcgccagggagctcgacgccatcaggcgcaacaggatcacctggctcaagccctagcgcgtcaaccggcacgggtccgggtgcctcccctggcacgtccagcaccggatcacccggatcgagcccatccgcctcaaccggaaccggacccggtacaccagggtcgggaacagcctcctcgtcaccaggctcctcaaccccctcgggagccacgggttcgcccggttcgtcaacgccttccggagcaactggtagccccggagcatcgccaggaacttcgagcacggggtcgcccgcctcgagcaatagttgcagcatgccattgggaatggagagtaaagcaatatcagatgcacagattactgcttcatcctactttaccaatatgtttgccacctggtctccttcaaaagctcgacttcacctccaagggaggagtaatgcctggagacctcaggtgaataatccaaaagagtggctgcaagtggacttccagaagacaatgaaagtcacaggagtaactactcagggagtaaaatctctgcttaccagcatgtatgtgaaggagttcctcatctccagcagtcaagatggccatcagtggactctcttttttcagaatggcaaagtaaaggtttttcagggaaatcaagactccttcacacctgtggtgaactctctagacccaccgttactgactcgctaccttcgaattcacccccagagttgggtgcaccagattgccctgaggatggaggttctgggctgcgaggcacaggacctctacggcgccggatcacctggggccgaaacggccgaacaaaaactcatctcagaagaggatctgtcacctgcaaccggtcatcatcaccatcaccattga

SEQ ID NO: 707 - protein, 1609 aa, synthetic construct
  REGION 1..1609: note = Description of Artificial Sequence: Synthetic polypeptide
ATRRYYLGAVELSWDYMQSDLGELPVDARFPPRVPKSFPFNTSVVYKKTLFVEFTDHLFNIAKPRPPWMGLLGPTIQAEVYDTVVITLKNMASHPVSLHAVGVSYWKASEGAEYDDQTSQREKEDDKVFPGGSHTYVWQVLKENGPMASDPLCLTYSYLSHVDLVKDLNSGLIGALLVCREGSLAKEKTQTLHKFILLFAVFDEGKSWHSETKNSLMQDRDAASARAWPKMHTVNGYVNRSLPGLIGCHRKSVYWHVIGMGTTPEVHSIFLEGHTFLVRNHRQASLEISPITFLTAQTLLMDLGQFLLFCHISSHQHDGMEAYVKVDSCPEEPQLRMKNNEEAEDYDDDLTDSEMDVVRFDDDNSPSFIQIRSVAKKHPKTWVHYIAAEEEDWDYAPLVLAPDDRSYKSQYLNNGPQRIGRKYKKVRFMAYTDETFKTREAIQHESGILGPLLYGEVGDTLLIIFKNQASRPYNIYPHGITDVRPLYSRRLPKGVKHLKDFPILPGEIFKYKWTVTVEDGPTKSDPRCLTRYYSSFVNMERDLASGLIGPLLICYKESVDQRGNQIMSDKRNVILFSVFDENRSWYLTENIQRFLPNPAGVQLEDPEFQASNIMHSINGYVFDSLQLSVCLHEVAYWYILSIGAQTDFLSVFFSGYTFKHKMVYEDTLTLFPFSGETVFMSMENPGLWILGCHNSDFRNRGMTALLKVSSCDKNTGDYYEDSYEDISAYLLSKNNAIEPRSFSQNPPVLKRHQREITRTTLQSDQEEIDYDDTISVEMKKEDFDIYDEDENQSPRSFQKKTRHYFIAAVERLWDYGMSSSPHVLRNRAQSGSVPQFKKVVFQEFTDGSFTQPLYRGELNEHLGLLGPYIRAEVEDNIMVTFRNQASRPYSFYSSLISYEEDQRQGAEPRKNFVKPNETKTYFWKVQHHMAPTKDEFDCKAWAYFSDVDLEKDVHSGLIGPLLVCHTNTLNPAHGRQVTVQEFALFFTIFDETKSWYFTENMERNCRAPCNIQMEDPTFKENYRFHAINGYIMDTLPGLVMAQDQRIRWYLLSMGSNENIHSIHFSGHVFTVRKKEEYKMALYNLYPGVFETVEMLPSKAGIWRVECLIGEHLHAGMSTLFLVYSNKCQTPLGMASGHIRDFQITASGQYGQWAPKLARLHYSGSINAWSTKEPFSWIKVDLLAPMIIHGIKTQGARQKFSSLYISQFIIMYSLDGKKWQTYRGNSTGTLMVFFGNVDSSGIKHNIFNPPIIARYIRLHPTHYSIRSTLRMELMGCDLNSCSMPLGMESKAISDAQITASSYFTNMFATWSPSKARLHLQGRSNAWRPQVNNPKEWLQVDFQKTMKVTGVTTQGVKSLLTSMYVKEFLISSSQDGHQWTLFFQNGKVKVFQGNQDSFTPVVNSLDPPLLTRYLRIHPQSWVHQIALRMEVLGCEAQDLYGAPTSTEPSEGSAPGTSESATPESGPGTSESATPESGPGTSESATPESGPGSEPATSGSETPGSEPATSGSETPGSPAGSPTSTEEGTSTEPSEGSAPGTSTEPSEGSAPGSEPATSGSETPGTSESATPESGPGTSTEPSEGSAPGASSEQKLISEEDLSPATGHHHHHH

SEQ ID NO: 708 - DNA, 4830 bp, synthetic construct
  misc_feature 1..4830: note = Description of Artificial Sequence: Synthetic polynucleotide
  source 1..4830: mol_type = other DNA
gccaccagaagatactacctgggtgcagtggaactgtcatgggactatatgcaaagtgatctcggtgagctgcctgtggacgcaagatttcctcctagagtgccaaaatcttttccattcaacacctcagtcgtgtacaaaaagactctgtttgtagaattcacggatcaccttttcaacatcgctaagccaaggccaccctggatgggtctgctaggtcctaccatccaggctgaggtttatgatacagtggtcattacacttaagaacatggcttcccatcctgtcagtcttcatgctgttggtgtatcctactggaaagcttctgagggagctgaatatgatgatcagaccagtcaaagggagaaagaagatgataaagtcttccctggtggaagccatacatatgtctggcaggtcctgaaagagaatggtccaatggcctctgacccactgtgccttacctactcatatctttctcatgtggacctggtaaaagacttgaattcaggcctcattggagccctactagtatgtagagaagggagtctggccaaggaaaagacacagaccttgcacaaatttatactactttttgctgtatttgatgaagggaaaagttggcactcagaaacaaagaactccttgatgcaggatagggatgctgcatctgctcgggcctggcctaaaatgcacacagtcaatggttatgtaaacaggtctctgccaggtctgattggatgccacaggaaatcagtctattggcatgtgattggaatgggcaccactcctgaagtgcactcaatattcctcgaaggtcacacatttcttgtgaggaaccatcgccaggctagcttggaaatctcgccaataactttccttactgctcaaacactcttgatggaccttggacagtttctactgttttgtcatatctcttcccaccaacatgatggcatggaagcttatgtcaaagtagacagctgtccagaggaaccccaactacgaatgaaaaataatgaagaagcggaagactatgatgatgatcttactgattctgaaatggatgtggtcaggtttgatgatgacaactctccttcctttatccaaattcgctcagttgccaagaagcatcctaaaacttgggtacattacattgctgctgaagaggaggactgggactatgctcccttagtcctcgcccccgatgacagaagttataaaagtcaatatttgaacaatggccctcagcggattggtaggaagtacaaaaaagtccgatttatggcatacacagatgaaacctttaagactcgtgaagctattcagcatgaatcaggaatcttgggacctttactttatggggaagttggagacacactgttgattatatttaagaatcaagcaagcagaccatataacatctaccctcacggaatcactgatgtccgtcctttgtattcaaggagattaccaaaaggtgtaaaacatttgaaggattttccaattctgccaggagaaatattcaaatataaatggacagtgactgtagaagatgggccaactaaatcagatcctcggtgcctgacccgctattactctagtttcgttaatatggagagagatctagcttcaggactcattggccctctcctcatctgctacaaagaatctgtagatcaaagaggaaaccagataatgtcagacaagaggaatgtcatcctgttttctgtatttgatgagaaccgaagctggtacctcacagagaatatacaacgctttctccccaatccagctggagtgcagcttgaggatccagagttccaagcctccaacatcatgcacagcatcaatggctatgtttttgatagtttgcagttgtcagtttgtttgcatgaggtggcatactggtacattctaagcattggagcacagactgacttcctttctgtcttcttctctggatataccttcaaacacaaaatggtctatgaagacacactcaccctattcccattctcaggagaaactgtcttcatgtcgatggaaaacccaggtctatggattctggggtgccacaactcagactttcggaacagaggcatgaccgccttactgaaggtttctagttgtgacaagaacactggtgattattacgaggacagttatgaagatatttcagcatacttgctgagtaaaaacaatgccattgaaccaagaagcttctctcaaaacccaccagtcttgaaacgccatcaacgggaaataactcgtactactcttcagtcagatcaagaggaaatcgattatgatgataccatatcagttgaaatgaagaaggaagattttgacatttatgatgaggatgaaaatcagagcccccgcagctttcaaaagaaaacacgacactattttattgctgcagtggagaggctctgggattatgggatgagtagctccccacatgttctaagaaacagggctcagagtggcagtgtccctcagttcaagaaagttgttttccaggaatttactgatggctcctttactcagcccttataccgtggagaactaaatgaacatttgggactcctggggccatatataagagcagaagttgaagataatatcatggtaactttcagaaatcaggcctctcgtccctattccttctattctagccttatttcttatgaggaagatcagaggcaaggagcagaacctagaaaaaactttgtcaagcctaatgaaaccaaaacttacttttggaaagtgcaacatcatatggcacccactaaagatgagtttgactgcaaagcctgggcttatttctctgatgttgacctggaaaaagatgtgcactcaggcctgattggaccccttctggtctgccacactaacacactgaaccctgctcatgggagacaagtgacagtacaggaatttgctctgtttttcaccatctttgatgagaccaaaagctggtacttcactgaaaatatggaaagaaactgcagggctccctgcaatatccagatggaagatcccacttttaaagagaattatcgcttccatgcaatcaatggctacataatggatacactacctggcttagtaatggctcaggatcaaaggattcgatggtatctgctcagcatgggcagcaatgaaaacatccattctattcatttcagtggacatgtgttcactgtacgaaaaaaagaggagtataaaatggcactgtacaatctctatccaggtgtttttgagacagtggaaatgttaccatccaaagctggaatttggcgggtggaatgccttattggcgagcatctacatgctgggatgagcacactttttctggtgtacagcaataagtgtcagactcccctgggaatggcttctggacacattagagattttcagattacagcttcaggacaatatggacagtgggccccaaagctggccagacttcattattccggatcaatcaatgcctggagcaccaaggagcccttttcttggatcaaggtggatctgttggcaccaatgattattcacggcatcaagacccagggtgcccgtcagaagttctccagcctctacatctctcagtttatcatcatgtatagtcttgatgggaagaagtggcagacttatcgaggaaattccactggaaccttaatggtcttctttggcaatgtggattcatctgggataaaacacaatatttttaaccctccaattattgctcgatacatccgtttgcacccaactcattatagcattcgcagcactcttcgcatggagttgatgggctgtgatttaaatagttgcagcatgccattgggaatggagagtaaagcaatatcagatgcacagattactgcttcatcctactttaccaatatgtttgccacctggtctccttcaaaagctcgacttcacctccaagggaggagtaatgcctggagacctcaggtgaataatccaaaagagtggctgcaagtggacttccagaagacaatgaaagtcacaggagtaactactcagggagtaaaatctctgcttaccagcatgtatgtgaaggagttcctcatctccagcagtcaagatggccatcagtggactctcttttttcagaatggcaaagtaaaggtttttcagggaaatcaagactccttcacacctgtggtgaactctctagacccaccgttactgactcgctaccttcgaattcacccccagagttgggtgcaccagattgccctgaggatggaggttctgggctgcgaggcacaggacctctacggcgcgccaacatctaccgagccttccgaaggctctgcccctgggacctcagaatctgcaacccctgaaagcggccctggaacctccgaaagtgccactcccgagagcggcccagggacaagcgagtcagcaacccctgagtctggacccggcagcgagcctgcaacctctggctcagagactcccggctcagaacccgctacctcaggctccgagacacccggctctcctgctgggagtcccacttccaccgaggaaggaacatccactgagcctagtgagggctctgcccctggaaccagcacagagccaagtgagggcagtgcaccaggatccgagccagcaaccagcgggtccgagactcccgggacctctgagtctgccaccccagagagcggacccggcacttcaaccgagccctccgaaggatcagcaccaggtgcctcgagcgaacaaaaactcatctcagaagaggatctgtcacctgcaaccggtcatcatcaccatcaccattga

SEQ ID NO: 709 - protein, 1609 aa, synthetic construct
  REGION 1..1609: note = Description of Artificial Sequence: Synthetic polypeptide
ATRRYYLGAVELSWDYMQSDLGELPVDARFPPRVPKSFPFNTSVVYKKTLFVEFTDHLFNIAKPRPPWMGLLGPTIQAEVYDTVVITLKNMASHPVSLHAVGVSYWKASEGAEYDDQTSQREKEDDKVFPGGSHTYVWQVLKENGPMASDPLCLTYSYLSHVDLVKDLNSGLIGALLVCREGSLAKEKTQTLHKFILLFAVFDEGKSWHSETKNSLMQDRDAASARAWPKMHTVNGYVNRSLPGLIGCHRKSVYWHVIGMGTTPEVHSIFLEGHTFLVRNHRQASLEISPITFLTAQTLLMDLGQFLLFCHISSHQHDGMEAYVKVDSCPEEPQLRMKNNEEAEDYDDDLTDSEMDVVRFDDDNSPSFIQIRSVAKKHPKTWVHYIAAEEEDWDYAPLVLAPDDRSYKSQYLNNGPQRIGRKYKKVRFMAYTDETFKTREAIQHESGILGPLLYGEVGDTLLIIFKNQASRPYNIYPHGITDVRPLYSRRLPKGVKHLKDFPILPGEIFKYKWTVTVEDGPTKSDPRCLTRYYSSFVNMERDLASGLIGPLLICYKESVDQRGNQIMSDKRNVILFSVFDENRSWYLTENIQRFLPNPAGVQLEDPEFQASNIMHSINGYVFDSLQLSVCLHEVAYWYILSIGAQTDFLSVFFSGYTFKHKMVYEDTLTLFPFSGETVFMSMENPGLWILGCHNSDFRNRGMTALLKVSSCDKNTGDYYEDSYEDISAYLLSKNNAIEPRSFSQNPPVLKRHQREITRTTLQSDQEEIDYDDTISVEMKKEDFDIYDEDENQSPRSFQKKTRHYFIAAVERLWDYGMSSSPHVLRNRAQSGSVPQFKKVVFQEFTDGSFTQPLYRGELNEHLGLLGPYIRAEVEDNIMVTFRNQASRPYSFYSSLISYEEDQRQGAEPRKNFVKPNETKTYFWKVQHHMAPTKDEFDCKAWAYFSDVDLEKDVHSGLIGPLLVCHTNTLNPAHGRQVTVQEFALFFTIFDETKSWYFTENMERNCRAPCNIQMEDPTFKENYRFHAINGYIMDTLPGLVMAQDQRIRWYLLSMGSNENIHSIHFSGHVFTVRKKEEYKMALYNLYPGVFETVEMLPSKAGIWRVECLIGEHLHAGMSTLFLVYSNKCQTPLGMASGHIRDFQITASGQYGQWAPKLARLHYSGSINAWSTKEPFSWIKVDLLAPMIIHGIKTQGARQKFSSLYISQFIIMYSLDGKKWQTYRGNSTGTLMVFFGNVDSSGIKHNIFNPPIIARYIRLHPTHYSIRSTLRMELMGCDLNSCSMPLGMESKAISDAQITASSYFTNMFATWSPSKARLHLQGRSNAWRPQVNNPKEWLQVDFQKTMKVTGVTTQGVKSLLTSMYVKEFLISSSQDGHQWTLFFQNGKVKVFQGNQDSFTPVVNSLDPPLLTRYLRIHPQSWVHQIALRMEVLGCEAQDLYGAPPGSSPSASTGTGPGSSPSASTGTGPGTPGSGTASSSPGSSTPSGATGSPGSSPSASTGTGPGASPGTSSTGSPGTPGSGTASSSPGSSTPSGATGSPGTPGSGTASSSPGASPGTSSTGSPGASPGTSSTGSPGTPGSGTASSSASSEQKLISEEDLSPATGHHHHHH

SEQ ID NO: 710 - DNA, 4830 bp, synthetic construct
  misc_feature 1..4830: note = Description of Artificial Sequence: Synthetic polynucleotide
  source 1..4830: mol_type = other DNA
gccaccagaagatactacctgggtgcagtggaactgtcatgggactatatgcaaagtgatctcggtgagctgcctgtggacgcaagatttcctcctagagtgccaaaatcttttccattcaacacctcagtcgtgtacaaaaagactctgtttgtagaattcacggatcaccttttcaacatcgctaagccaaggccaccctggatgggtctgctaggtcctaccatccaggctgaggtttatgatacagtggtcattacacttaagaacatggcttcccatcctgtcagtcttcatgctgttggtgtatcctactggaaagcttctgagggagctgaatatgatgatcagaccagtcaaagggagaaagaagatgataaagtcttccctggtggaagccatacatatgtctggcaggtcctgaaagagaatggtccaatggcctctgacccactgtgccttacctactcatatctttctcatgtggacctggtaaaagacttgaattcaggcctcattggagccctactagtatgtagagaagggagtctggccaaggaaaagacacagaccttgcacaaatttatactactttttgctgtatttgatgaagggaaaagttggcactcagaaacaaagaactccttgatgcaggatagggatgctgcatctgctcgggcctggcctaaaatgcacacagtcaatggttatgtaaacaggtctctgccaggtctgattggatgccacaggaaatcagtctattggcatgtgattggaatgggcaccactcctgaagtgcactcaatattcctcgaaggtcacacatttcttgtgaggaaccatcgccaggctagcttggaaatctcgccaataactttccttactgctcaaacactcttgatggaccttggacagtttctactgttttgtcatatctcttcccaccaacatgatggcatggaagcttatgtcaaagtagacagctgtccagaggaaccccaactacgaatgaaaaataatgaagaagcggaagactatgatgatgatcttactgattctgaaatggatgtggtcaggtttgatgatgacaactctccttcctttatccaaattcgctcagttgccaagaagcatcctaaaacttgggtacattacattgctgctgaagaggaggactgggactatgctcccttagtcctcgcccccgatgacagaagttataaaagtcaatatttgaacaatggccctcagcggattggtaggaagtacaaaaaagtccgatttatggcatacacagatgaaacctttaagactcgtgaagctattcagcatgaatcaggaatcttgggacctttactttatggggaagttggagacacactgttgattatatttaagaatcaagcaagcagaccatataacatctaccctcacggaatcactgatgtccgtcctttgtattcaaggagattaccaaaaggtgtaaaacatttgaaggattttccaattctgccaggagaaatattcaaatataaatggacagtgactgtagaagatgggccaactaaatcagatcctcggtgcctgacccgctattactctagtttcgttaatatggagagagatctagcttcaggactcattggccctctcctcatctgctacaaagaatctgtagatcaaagaggaaaccagataatgtcagacaagaggaatgtcatcctgttttctgtatttgatgagaaccgaagctggtacctcacagagaatatacaacgctttctccccaatccagctggagtgcagcttgaggatccagagttccaagcctccaacatcatgcacagcatcaatggctatgtttttgatagtttgcagttgtcagtttgtttgcatgaggtggcatactggtacattctaagcattggagcacagactgacttcctttctgtcttcttctctggatataccttcaaacacaaaatggtctatgaagacacactcaccctattcccattctcaggagaaactgtcttcatgtcgatggaaaacccaggtctatggattctggggtgccacaactcagactttcggaacagaggcatgaccgccttactgaaggtttctagttgtgacaagaacactggtgattattacgaggacagttatgaagatatttcagcatacttgctgagtaaaaacaatgccattgaaccaagaagcttctctcaaaacccaccagtcttgaaacgccatcaacgggaaataactcgtactactcttcagtcagatcaagaggaaatcgattatgatgataccatatcagttgaaatgaagaaggaagattttgacatttatgatgaggatgaaaatcagagcccccgcagctttcaaaagaaaacacgacactattttattgctgcagtggagaggctctgggattatgggatgagtagctccccacatgttctaagaaacagggctcagagtggcagtgtccctcagttcaagaaagttgttttccaggaatttactgatggctcctttactcagcccttataccgtggagaactaaatgaacatttgggactcctggggccatatataagagcagaagttgaagataatatcatggtaactttcagaaatcaggcctctcgtccctattccttctattctagccttatttcttatgaggaagatcagaggcaaggagcagaacctagaaaaaactttgtcaagcctaatgaaaccaaaacttacttttggaaagtgcaacatcatatggcacccactaaagatgagtttgactgcaaagcctgggcttatttctctgatgttgacctggaaaaagatgtgcactcaggcctgattggaccccttctggtctgccacactaacacactgaaccctgctcatgggagacaagtgacagtacaggaatttgctctgtttttcaccatctttgatgagaccaaaagctggtacttcactgaaaatatggaaagaaactgcagggctccctgcaatatccagatggaagatcccacttttaaagagaattatcgcttccatgcaatcaatggctacataatggatacactacctggcttagtaatggctcaggatcaaaggattcgatggtatctgctcagcatgggcagcaatgaaaacatccattctattcatttcagtggacatgtgttcactgtacgaaaaaaagaggagtataaaatggcactgtacaatctctatccaggtgtttttgagacagtggaaatgttaccatccaaagctggaatttggcgggtggaatgccttattggcgagcatctacatgctgggatgagcacactttttctggtgtacagcaataagtgtcagactcccctgggaatggcttctggacacattagagattttcagattacagcttcaggacaatatggacagtgggccccaaagctggccagacttcattattccggatcaatcaatgcctggagcaccaaggagcccttttcttggatcaaggtggatctgttggcaccaatgattattcacggcatcaagacccagggtgcccgtcagaagttctccagcctctacatctctcagtttatcatcatgtatagtcttgatgggaagaagtggcagacttatcgaggaaattccactggaaccttaatggtcttctttggcaatgtggattcatctgggataaaacacaatatttttaaccctccaattattgctcgatacatccgtttgcacccaactcattatagcattcgcagcactcttcgcatggagttgatgggctgtgatttaaatagttgcagcatgccattgggaatggagagtaaagcaatatcagatgcacagattactgcttcatcctactttaccaatatgtttgccacctggtctccttcaaaagctcgacttcacctccaagggaggagtaatgcctggagacctcaggtgaataatccaaaagagtggctgcaagtggacttccagaagacaatgaaagtcacaggagtaactactcagggagtaaaatctctgcttaccagcatgtatgtgaaggagttcctcatctccagcagtcaagatggccatcagtggactctcttttttcagaatggcaaagtaaaggtttttcagggaaatcaagactccttcacacctgtggtgaactctctagacccaccgttactgactcgctaccttcgaattcacccccagagttgggtgcaccagattgccctgaggatggaggttctgggctgcgaggcacaggacctctacggcgcgccacccgggtcgtccccgtcggcgtccaccggaacagggccagggtcatccccgtcagcgtcgactgggacgggacccgggacacccggttcggggactgcatcctcctcgcctggttcgtccaccccgtcaggagccacgggttcgccgggaagcagcccaagcgcatccactggtacagggcctggggcttcaccgggtacttcatccacggggtcaccgggaacgcccggatcggggacggcttcctcatcaccaggatcgtcaacaccctcgggcgcaacgggcagccccggaacccctggttcgggtacggcgtcgtcgagccccggtgcgagcccgggaacaagctcgacaggatcgcctggggcgtcacccggcacgtcgagcacaggcagccccggaacccctggatcgggaaccgcgtcgtcaagcgcctcgagcgaacaaaaactcatctcagaagaggatctgtcacctgcaaccggtcatcatcaccatcaccattga

SEQ ID NO: 711 - protein, 1763 aa, synthetic construct
  REGION 1..1763: note = Description of Artificial Sequence: Synthetic polypeptide
ATRRYYLGAVELSWDYMQSDLGELPVDARFPPRVPKSFPFNTSVVYKKTLFVEFTDHLFNIAKPRPPWMGLLGPTIQAEVYDTVVITLKNMASHPVSLHAVGVSYWKASEGAEYDDQTSQREKEDDKVFPGGSHTYVWQVLKENGPMASDPLCLTYSYLSHVDLVKDLNSGLIGALLVCREGSLAKEKTQTLHKFILLFAVFDEGKSWHSETKNSLMQDRDAASARAWPKMHTVNGYVNRSLPGLIGCHRKSVYWHVIGMGTTPEVHSIFLEGHTFLVRNHRQASLEISPITFLTAQTLLMDLGQFLLFCHISSHQHDGMEAYVKVDSCPEEPQLRMKNNEEAEDYDDDLTDSEMDVVRFDDDNSPSFIQIRSVAKKHPKTWVHYIAAEEEDWDYAPLVLAPDDRSYKSQYLNNGPQRIGRKYKKVRFMAYTDETFKTREAIQHESGILGPLLYGEVGDTLLIIFKNQASRPYNIYPHGITDVRPLYSRRLPKGVKHLKDFPILPGEIFKYKWTVTVEDGPTKSDPRCLTRYYSSFVNMERDLASGLIGPLLICYKESVDQRGNQIMSDKRNVILFSVFDENRSWYLTENIQRFLPNPAGVQLEDPEFQASNIMHSINGYVFDSLQLSVCLHEVAYWYILSIGAQTDFLSVFFSGYTFKHKMVYEDTLTLFPFSGETVFMSMENPGLWILGCHNSDFRNRGMTALLKVSSCDKNTGDYYEDSYEDISAYLLSKNNAIEPRSFSQNGAPPGASPGTSSTGSPGASPGTSSTGSPGTPGSGTASSSPGSSTPSGATGSPGTPGSGTASSSPGSSTPSGATGSPGTPGSGTASSSPGSSTPSGATGSPGSSTPSGATGSPGSSPSASTGTGPGSSPSASTGTGPGASPGTSSTGSPGTPGSGTASSSPGSSTPSGATGSPGSSPSASTGTGPGSSPSASTGTGPGASPGTSSTGSPGASPGTSSTGSPGSSTPSGATGSPGSSPSASTGTGPGASPGTSSTGSPGSSPSASTGTGPGTPGSGTASSSPGSSTPSGATGSASSPPVLKRHQREITRTTLQSDQEEIDYDDTISVEMKKEDFDIYDEDENQSPRSFQKKTRHYFIAAVERLWDYGMSSSPHVLRNRAQSGSVPQFKKVVFQEFTDGSFTQPLYRGELNEHLGLLGPYIRAEVEDNIMVTFRNQASRPYSFYSSLISYEEDQRQGAEPRKNFVKPNETKTYFWKVQHHMAPTKDEFDCKAWAYFSDVDLEKDVHSGLIGPLLVCHTNTLNPAHGRQVTVQEFALFFTIFDETKSWYFTENMERNCRAPCNIQMEDPTFKENYRFHAINGYIMDTLPGLVMAQDQRIRWYLLSMGSNENIHSIHFSGHVFTVRKKEEYKMALYNLYPGVFETVEMLPSKAGIWRVECLIGEHLHAGMSTLFLVYSNKCQTPLGMASGHIRDFQITASGQYGQWAPKLARLHYSGSINAWSTKEPFSWIKVDLLAPMIIHGIKTQGARQKFSSLYISQFIIMYSLDGKKWQTYRGNSTGTLMVFFGNVDSSGIKHNIFNPPIIARYIRLHPTHYSIRSTLRMELMGCDLNSCSMPLGMESKAISDAQITASSYFTNMFATWSPSKARLHLQGRSNAWRPQVNNPKEWLQVDFQKTMKVTGVTTQGVKSLLTSMYVKEFLISSSQDGHQWTLFFQNGKVKVFQGNQDSFTPVVNSLDPPLLTRYLRIHPQSWVHQIALRMEVLGCEAQDLYGAGSPGAETAEQKLISEEDLSPATGHHHHHH

SEQ ID NO: 712 - DNA, 5292 bp, synthetic construct
  misc_feature 1..5292: note = Description of Artificial Sequence: Synthetic polynucleotide
  source 1..5292: mol_type = other DNA
gccaccagaagatactacctgggtgcagtggaactgtcatgggactatatgcaaagtgatctcggtgagctgcctgtggacgcaagatttcctcctagagtgccaaaatcttttccattcaacacctcagtcgtgtacaaaaagactctgtttgtagaattcacggatcaccttttcaacatcgctaagccaaggccaccctggatgggtctgctaggtcctaccatccaggctgaggtttatgatacagtggtcattacacttaagaacatggcttcccatcctgtcagtcttcatgctgttggtgtatcctactggaaagcttctgagggagctgaatatgatgatcagaccagtcaaagggagaaagaagatgataaagtcttccctggtggaagccatacatatgtctggcaggtcctgaaagagaatggtccaatggcctctgacccactgtgccttacctactcatatctttctcatgtggacctggtaaaagacttgaattcaggcctcattggagccctactagtatgtagagaagggagtctggccaaggaaaagacacagaccttgcacaaatttatactactttttgctgtatttgatgaagggaaaagttggcactcagaaacaaagaactccttgatgcaggatagggatgctgcatctgctcgggcctggcctaaaatgcacacagtcaatggttatgtaaacaggtctctgccaggtctgattggatgccacaggaaatcagtctattggcatgtgattggaatgggcaccactcctgaagtgcactcaatattcctcgaaggtcacacatttcttgtgaggaaccatcgccaggctagcttggaaatctcgccaataactttccttactgctcaaacactcttgatggaccttggacagtttctactgttttgtcatatctcttcccaccaacatgatggcatggaagcttatgtcaaagtagacagctgtccagaggaaccccaactacgaatgaaaaataatgaagaagcggaagactatgatgatgatcttactgattctgaaatggatgtggtcaggtttgatgatgacaactctccttcctttatccaaattcgctcagttgccaagaagcatcctaaaacttgggtacattacattgctgctgaagaggaggactgggactatgctcccttagtcctcgcccccgatgacagaagttataaaagtcaatatttgaacaatggccctcagcggattggtaggaagtacaaaaaagtccgatttatggcatacacagatgaaacctttaagactcgtgaagctattcagcatgaatcaggaatcttgggacctttactttatggggaagttggagacacactgttgattatatttaagaatcaagcaagcagaccatataacatctaccctcacggaatcactgatgtccgtcctttgtattcaaggagattaccaaaaggtgtaaaacatttgaaggattttccaattctgccaggagaaatattcaaatataaatggacagtgactgtagaagatgggccaactaaatcagatcctcggtgcctgacccgctattactctagtttcgttaatatggagagagatctagcttcaggactcattggccctctcctcatctgctacaaagaatctgtagatcaaagaggaaaccagataatgtcagacaagaggaatgtcatcctgttttctgtatttgatgagaaccgaagctggtacctcacagagaatatacaacgctttctccccaatccagctggagtgcagcttgaggatccagagttccaagcctccaacatcatgcacagcatcaatggctatgtttttgatagtttgcagttgtcagtttgtttgcatgaggtggcatactggtacattctaagcattggagcacagactgacttcctttctgtcttcttctctggatataccttcaaacacaaaatggtctatgaagacacactcaccctattcccattctcaggagaaactgtcttcatgtcgatggaaaacccaggtctatggattctggggtgccacaactcagactttcggaacagaggcatgaccgccttactgaaggtttctagttgtgacaagaacactggtgattattacgaggacagttatgaagatatttcagcatacttgctgagtaaaaacaatgccattgaaccaagaagcttctctcaaaacggcgcgccaccgggagcgtcacccggtacgtcctcaacggggagccctggggcatcacccggcacgtcctcgacagggtcccccggaacaccgggttcggggactgcgtcgtcgtcacccggttcgtcaacacccagcggtgcgacgggttccccgggaacccccggatcaggaacagcgtcgtcgagccccggaagctcgaccccgtcaggagcgaccgggtcgccaggaacgcctgggtcgggtactgcctcatcgtcgccgggttcatcgacgccctccggagcaacaggttcacccgggtcgtccacccccagcggagcgactggatcaccgggatcgagcccgtcggcatcgacaggaacaggtcccggtagctccccatcggcctccacggggacggggcctggtgcgtcaccggggacaagcagcacgggttcgccgggaacgccagggtcagggaccgcgtcgtcgagcccagggtcgtccaccccaagcggggctactgggtccccgggtagctcgccgagcgcatcaacgggaaccggaccgggcagctccccctcagcgtcgacagggacaggccctggcgcgagcccgggaacatcgtcgacggggtcacccggagcatcgccagggacctcgtcaactggctcgcctggatcgtcaacgccctcgggagccacggggtcgcccggatcatccccgtccgcctcaactggcacaggccctggtgcttcccctggaacgtccagcacaggctcccccggttccagcccttccgcttcgactgggactggacccggaaccccgggatcggggacagcgtcaagctcgcccggaagctccacgccttcgggggcaaccgggtcagcctcgagcccaccagtcttgaaacgccatcaacgggaaataactcgtactactcttcagtcagatcaagaggaaatcgattatgatgataccatatcagttgaaatgaagaaggaagattttgacatttatgatgaggatgaaaatcagagcccccgcagctttcaaaagaaaacacgacactattttattgctgcagtggagaggctctgggattatgggatgagtagctccccacatgttctaagaaacagggctcagagtggcagtgtccctcagttcaagaaagttgttttccaggaatttactgatggctcctttactcagcccttataccgtggagaactaaatgaacatttgggactcctggggccatatataagagcagaagttgaagataatatcatggtaactttcagaaatcaggcctctcgtccctattccttctattctagccttatttcttatgaggaagatcagaggcaaggagcagaacctagaaaaaactttgtcaagcctaatgaaaccaaaacttacttttggaaagtgcaacatcatatggcacccactaaagatgagtttgactgcaaagcctgggcttatttctctgatgttgacctggaaaaagatgtgcactcaggcctgattggaccccttctggtctgccacactaacacactgaaccctgctcatgggagacaagtgacagtacaggaatttgctctgtttttcaccatctttgatgagaccaaaagctggtacttcactgaaaatatggaaagaaactgcagggctccctgcaatatccagatggaagatcccacttttaaagagaattatcgcttccatgcaatcaatggctacataatggatacactacctggcttagtaatggctcaggatcaaaggattcgatggtatctgctcagcatgggcagcaatgaaaacatccattctattcatttcagtggacatgtgttcactgtacgaaaaaaagaggagtataaaatggcactgtacaatctctatccaggtgtttttgagacagtggaaatgttaccatccaaagctggaatttggcgggtggaatgccttattggcgagcatctacatgctgggatgagcacactttttctggtgtacagcaataagtgtcagactcccctgggaatggcttctggacacattagagattttcagattacagcttcaggacaatatggacagtgggccccaaagctggccagacttcattattccggatcaatcaatgcctggagcaccaaggagcccttttcttggatcaaggtggatctgttggcaccaatgattattcacggcatcaagacccagggtgcccgtcagaagttctccagcctctacatctctcagtttatcatcatgtatagtcttgatgggaagaagtggcagacttatcgaggaaattccactggaaccttaatggtcttctttggcaatgtggattcatctgggataaaacacaatatttttaaccctccaattattgctcgatacatccgtttgcacccaactcattatagcattcgcagcactcttcgcatggagttgatgggctgtgatttaaatagttgcagcatgccattgggaatggagagtaaagcaatatcagatgcacagattactgcttcatcctactttaccaatatgtttgccacctggtctccttcaaaagctcgacttcacctccaagggaggagtaatgcctggagacctcaggtgaataatccaaaagagtggctgcaagtggacttccagaagacaatgaaagtcacaggagtaactactcagggagtaaaatctctgcttaccagcatgtatgtgaaggagttcctcatctccagcagtcaagatggccatcagtggactctcttttttcagaatggcaaagtaaaggtttttcagggaaatcaagactccttcacacctgtggtgaactctctagacccaccgttactgactcgctaccttcgaattcacccccagagttgggtgcaccagattgccctgaggatggaggttctgggctgcgaggcacaggacctctacggcgccggatcacctggggccgaaacggccgaacaaaaactcatctcagaagaggatctgtcacctgcaaccggtcatcatcaccatcaccattga

SEQ ID NO: 713 - protein, 1763 aa, synthetic construct
  REGION 1..1763: note = Description of Artificial Sequence: Synthetic polypeptide
ATRRYYLGAVELSWDYMQSDLGELPVDARFPPRVPKSFPFNTSVVYKKTLFVEFTDHLFNIAKPRPPWMGLLGPTIQAEVYDTVVITLKNMASHPVSLHAVGVSYWKASEGAEYDDQTSQREKEDDKVFPGGSHTYVWQVLKENGPMASDPLCLTYSYLSHVDLVKDLNSGLIGALLVCREGSLAKEKTQTLHKFILLFAVFDEGKSWHSETKNSLMQDRDAASARAWPKMHTVNGYVNRSLPGLIGCHRKSVYWHVIGMGTTPEVHSIFLEGHTFLVRNHRQASLEISPITFLTAQTLLMDLGQFLLFCHISSHQHDGMEAYVKVDSCPEEPQLRMKNNEEAEDYDDDLTDSEMDVVRFDDDNSPSFIQIRSVAKKHPKTWVHYIAAEEEDWDYAPLVLAPDDRSYKSQYLNNGPQRIGRKYKKVRFMAYTDETFKTREAIQHESGILGPLLYGEVGDTLLIIFKNQASRPYNIYPHGITDVRPLYSRRLPKGVKHLKDFPILPGEIFKYKWTVTVEDGPTKSDPRCLTRYYSSFVNMERDLASGLIGPLLICYKESVDQRGNQIMSDKRNVILFSVFDENRSWYLTENIQRFLPNPAGVQLEDPEFQASNIMHSINGYVFDSLQLSVCLHEVAYWYILSIGAQTDFLSVFFSGYTFKHKMVYEDTLTLFPFSGETVFMSMENPGLWILGCHNSDFRNRGMTALLKVSSCDKNTGDYYEDSYEDISAYLLSKNNAIEPRSFSQNGAPPGASPGTSSTGSPGASPGTSSTGSPGTPGSGTASSSPGSSTPSGATGSPGTPGSGTASSSPGSSTPSGATGSPGTPGSGTASSSPGSSTPSGATGSPGSSTPSGATGSPGSSPSASTGTGPGSSPSASTGTGPGASPGTSSTGSPGTPGSGTASSSPGSSTPSGATGSPGSSPSASTGTGPGSSPSASTGTGPGASPGTSSTGSPGASPGTSSTGSPGSSTPSGATGSPGSSPSASTGTGPGASPGTSSTGSPGSSPSASTGTGPGTPGSGTASSSPGSSTPSGATGSASSPPVLKRHQAEITRTTLQSDQEEIDYDDTISVEMKKEDFDIYDEDENQSPRSFQKKTRHYFIAAVERLWDYGMSSSPHVLRNRAQSGSVPQFKKVVFQEFTDGSFTQPLYRGELNEHLGLLGPYIRAEVEDNIMVTFRNQASRPYSFYSSLISYEEDQRQGAEPRKNFVKPNETKTYFWKVQHHMAPTKDEFDCKAWAYFSDVDLEKDVHSGLIGPLLVCHTNTLNPAHGRQVTVQEFALFFTIFDETKSWYFTENMERNCRAPCNIQMEDPTFKENYRFHAINGYIMDTLPGLVMAQDQRIRWYLLSMGSNENIHSIHFSGHVFTVRKKEEYKMALYNLYPGVFETVEMLPSKAGIWRVECLIGEHLHAGMSTLFLVYSNKCQTPLGMASGHIRDFQITASGQYGQWAPKLARLHYSGSINAWSTKEPFSWIKVDLLAPMIIHGIKTQGARQKFSSLYISQFIIMYSLDGKKWQTYRGNSTGTLMVFFGNVDSSGIKHNIFNPPIIARYIRLHPTHYSIRSTLRMELMGCDLNSCSMPLGMESKAISDAQITASSYFTNMFATWSPSKARLHLQGRSNAWRPQVNNPKEWLQVDFQKTMKVTGVTTQGVKSLLTSMYVKEFLISSSQDGHQWTLFFQNGKVKVFQGNQDSFTPVVNSLDPPLLTRYLRIHPQSWVHQIALRMEVLGCEAQDLYGAGSPGAETAEQKLISEEDLSPATGHHHHHH

SEQ ID NO: 714 - DNA, 5292 bp, synthetic construct
  misc_feature 1..5292: note = Description of Artificial Sequence: Synthetic polynucleotide
  source 1..5292: mol_type = other DNA
gccaccagaagatactacctgggtgcagtggaactgtcatgggactatatgcaaagtgatctcggtgagctgcctgtggacgcaagatttcctcctagagtgccaaaatcttttccattcaacacctcagtcgtgtacaaaaagactctgtttgtagaattcacggatcaccttttcaacatcgctaagccaaggccaccctggatgggtctgctaggtcctaccatccaggctgaggtttatgatacagtggtcattacacttaagaacatggcttcccatcctgtcagtcttcatgctgttggtgtatcctactggaaagcttctgagggagctgaatatgatgatcagaccagtcaaagggagaaagaagatgataaagtcttccctggtggaagccatacatatgtctggcaggtcctgaaagagaatggtccaatggcctctgacccactgtgccttacctactcatatctttctcatgtggacctggtaaaagacttgaattcaggcctcattggagccctactagtatgtagagaagggagtctggccaaggaaaagacacagaccttgcacaaatttatactactttttgctgtatttgatgaagggaaaagttggcactcagaaacaaagaactccttgatgcaggatagggatgctgcatctgctcgggcctggcctaaaatgcacacagtcaatggttatgtaaacaggtctctgccaggtctgattggatgccacaggaaatcagtctattggcatgtgattggaatgggcaccactcctgaagtgcactcaatattcctcgaaggtcacacatttcttgtgaggaaccatcgccaggctagcttggaaatctcgccaataactttccttactgctcaaacactcttgatggaccttggacagtttctactgttttgtcatatctcttcccaccaacatgatggcatggaagcttatgtcaaagtagacagctgtccagaggaaccccaactacgaatgaaaaataatgaagaagcggaagactatgatgatgatcttactgattctgaaatggatgtggtcaggtttgatgatgacaactctccttcctttatccaaattcgctcagttgccaagaagcatcctaaaacttgggtacattacattgctgctgaagaggaggactgggactatgctcccttagtcctcgcccccgatgacagaagttataaaagtcaatatttgaacaatggccctcagcggattggtaggaagtacaaaaaagtccgatttatggcatacacagatgaaacctttaagactcgtgaagctattcagcatgaatcaggaatcttgggacctttactttatggggaagttggagacacactgttgattatatttaagaatcaagcaagcagaccatataacatctaccctcacggaatcactgatgtccgtcctttgtattcaaggagattaccaaaaggtgtaaaacatttgaaggattttccaattctgccaggagaaatattcaaatataaatggacagtgactgtagaagatgggccaactaaatcagatcctcggtgcctgacccgctattactctagtttcgttaatatggagagagatctagcttcaggactcattggccctctcctcatctgctacaaagaatctgtagatcaaagaggaaaccagataatgtcagacaagaggaatgtcatcctgttttctgtatttgatgagaaccgaagctggtacctcacagagaatatacaacgctttctccccaatccagctggagtgcagcttgaggatccagagttccaagcctccaacatcatgcacagcatcaatggctatgtttttgatagtttgcagttgtcagtttgtttgcatgaggtggcatactggtacattctaagcattggagcacagactgacttcctttctgtcttcttctctggatataccttcaaacacaaaatggtctatgaagacacactcaccctattcccattctcaggagaaactgtcttcatgtcgatggaaaacccaggtctatggattctggggtgccacaactcagactttcggaacagaggcatgaccgccttactgaaggtttctagttgtgacaagaacactggtgattattacgaggacagttatgaagatatttcagcatacttgctgagtaaaaacaatgccattgaaccaagaagcttctctcaaaacggcgcgccaccgggagcgtcacccggtacgtcctcaacggggagccctggggcatcacccggcacgtcctcgacagggtcccccggaacaccgggttcggggactgcgtcgtcgtcacccggttcgtcaacacccagcggtgcgacgggttccccgggaacccccggatcaggaacagcgtcgtcgagccccggaagctcgaccccgtcaggagcgaccgggtcgccaggaacgcctgggtcgggtactgcctcatcgtcgccgggttcatcgacgccctccggagcaacaggttcacccgggtcgtccacccccagcggagcgactggatcaccgggatcgagcccgtcggcatcgacaggaacaggtcccggtagctccccatcggcctccacggggacggggcctggtgcgtcaccggggacaagcagcacgggttcgccgggaacgccagggtcagggaccgcgtcgtcgagcccagggtcgtccaccccaagcggggctactgggtccccgggtagctcgccgagcgcatcaacgggaaccggaccgggcagctccccctcagcgtcgacagggacaggccctggcgcgagcccgggaacatcgtcgacggggtcacccggagcatcgccagggacctcgtcaactggctcgcctggatcgtcaacgccctcgggagccacggggtcgcccggatcatccccgtccgcctcaactggcacaggccctggtgcttcccctggaacgtccagcacaggctcccccggttccagcccttccgcttcgactgggactggacccggaaccccgggatcggggacagcgtcaagctcgcccggaagctccacgccttcgggggcaaccgggtcagcctcgagcccaccagtcttgaaacgccatcaagctgaaataactcgtactactcttcagtcagatcaagaggaaatcgattatgatgataccatatcagttgaaatgaagaaggaagattttgacatttatgatgaggatgaaaatcagagcccccgcagctttcaaaagaaaacacgacactattttattgctgcagtggagaggctctgggattatgggatgagtagctccccacatgttctaagaaacagggctcagagtggcagtgtccctcagttcaagaaagttgttttccaggaatttactgatggctcctttactcagcccttataccgtggagaactaaatgaacatttgggactcctggggccatatataagagcagaagttgaagataatatcatggtaactttcagaaatcaggcctctcgtccctattccttctattctagccttatttcttatgaggaagatcagaggcaaggagcagaacctagaaaaaactttgtcaagcctaatgaaaccaaaacttacttttggaaagtgcaacatcatatggcacccactaaagatgagtttgactgcaaagcctgggcttatttctctgatgttgacctggaaaaagatgtgcactcaggcctgattggaccccttctggtctgccacactaacacactgaaccctgctcatgggagacaagtgacagtacaggaatttgctctgtttttcaccatctttgatgagaccaaaagctggtacttcactgaaaatatggaaagaaactgcagggctccctgcaatatccagatggaagatcccacttttaaagagaattatcgcttccatgcaatcaatggctacataatggatacactacctggcttagtaatggctcaggatcaaaggattcgatggtatctgctcagcatgggcagcaatgaaaacatccattctattcatttcagtggacatgtgttcactgtacgaaaaaaagaggagtataaaatggcactgtacaatctctatccaggtgtttttgagacagtggaaatgttaccatccaaagctggaatttggcgggtggaatgccttattggcgagcatctacatgctgggatgagcacactttttctggtgtacagcaataagtgtcagactcccctgggaatggcttctggacacattagagattttcagattacagcttcaggacaatatggacagtgggccccaaagctggccagacttcattattccggatcaatcaatgcctggagcaccaaggagcccttttcttggatcaaggtggatctgttggcaccaatgattattcacggcatcaagacccagggtgcccgtcagaagttctccagcctctacatctctcagtttatcatcatgtatagtcttgatgggaagaagtggcagacttatcgaggaaattccactggaaccttaatggtcttctttggcaatgtggattcatctgggataaaacacaatatttttaaccctccaattattgctcgatacatccgtttgcacccaactcattatagcattcgcagcactcttcgcatggagttgatgggctgtgatttaaatagttgcagcatgccattgggaatggagagtaaagcaatatcagatgcacagattactgcttcatcctactttaccaatatgtttgccacctggtctccttcaaaagctcgacttcacctccaagggaggagtaatgcctggagacctcaggtgaataatccaaaagagtggctgcaagtggacttccagaagacaatgaaagtcacaggagtaactactcagggagtaaaatctctgcttaccagcatgtatgtgaaggagttcctcatctccagcagtcaagatggccatcagtggactctcttttttcagaatggcaaagtaaaggtttttcagggaaatcaagactccttcacacctgtggtgaactctctagacccaccgttactgactcgctaccttcgaattcacccccagagttgggtgcaccagattgccctgaggatggaggttctgggctgcgaggcacaggacctctacggcgccggatcacctggggccgaaacggccgaacaaaaactcatctcagaagaggatctgtcacctgcaaccggtcatcatcaccatcaccattga

SEQ ID NO: 715 - protein, 1753 aa, synthetic construct
  REGION 1..1753: note = Description of Artificial Sequence: Synthetic polypeptide
ATRRYYLGAVELSWDYMQSDLGELPVDARFPPRVPKSFPFNTSVVYKKTLFVEFTDHLFNIAKPRPPWMGLLGPTIQAEVYDTVVITLKNMASHPVSLHAVGVSYWKASEGAEYDDQTSQREKEDDKVFPGGSHTYVWQVLKENGPMASDPLCLTYSYLSHVDLVKDLNSGLIGALLVCREGSLAKEKTQTLHKFILLFAVFDEGKSWHSETKNSLMQDRDAASARAWPKMHTVNGYVNRSLPGLIGCHRKSVYWHVIGMGTTPEVHSIFLEGHTFLVRNHRQASLEISPITFLTAQTLLMDLGQFLLFCHISSHQHDGMEAYVKVDSCPEEPQLRMKNNEEAEDYDDDLTDSEMDVVRFDDDNSPSFIQIRSVAKKHPKTWVHYIAAEEEDWDYAPLVLAPDDRSYKSQYLNNGPQRIGRKYKKVRFMAYTDETFKTREAIQHESGILGPLLYGEVGDTLLIIFKNQASRPYNIYPHGITDVRPLYSRRLPKGVKHLKDFPILPGEIFKYKWTVTVEDGPTKSDPRCLTRYYSSFVNMERDLASGLIGPLLICYKESVDQRGNQIMSDKRNVILFSVFDENRSWYLTENIQRFLPNPAGVQLEDPEFQASNIMHSINGYVFDSLQLSVCLHEVAYWYILSIGAQTDFLSVFFSGYTFKHKMVYEDTLTLFPFSGETVFMSMENPGLWILGCHNSDFRNRGMTALLKVSSCDKNTGDYYEDSYEDISAYLLSKNNAIEPRSFSQNPPVLKRHQREITRTTLQSDQEEIDYDDTISVEMKKEDFDIYDEDENQSPRSFQKKTRHYFIAAVERLWDYGMSSSPHVLRNRAQSGSVPQFKKVVFQEFTDGSFTQPLYRGELNEHLGLLGPYIRAEVEDNIMVTFRNQASRPYSFYSSLISYEEDQRQGAEPRKNFVKPNETKTYFWKVQHHMAPTKDEFDCKAWAYFSDVDLEKDVHSGLIGPLLVCHTNTLNPAHGRQVTVQEFALFFTIFDETKSWYFTENMERNCRAPCNIQMEDPTFKENYRFHAINGYIMDTLPGLVMAQDQRIRWYLLSMGSNENIHSIHFSGHVFTVRKKEEYKMALYNLYPGVFETVEMLPSKAGIWRVECLIGEHLHAGMSTLFLVYSNKCQTPLGMASGHIRDFQITASGQYGQWAPKLARLHYSGSINAWSTKEPFSWIKVDLLAPMIIHGIKTQGARQKFSSLYISQFIIMYSLDGKKWQTYRGNSTGTLMVFFGNVDSSGIKHNIFNPPIIARYIRLHPTHYSIRSTLRMELMGCDLNSCSMPLGMESKAISDAQITASSYFTNMFATWSPSKARLHLQGRSNAWRPQVNNPKEWLQVDFQKTMKVTGVTTQGVKSLLTSMYVKEFLISSSQDGHQWTLFFQNGKVKVFQGNQDSFTPVVNSLDPPLLTRYLRIHPQSWVHQIALRMEVLGCEAQDLYGAPGTSESATPESGPGSEPATSGSETPGTSESATPESGPGSEPATSGSETPGTSESATPESGPGTSTEPSEGSAPGSPAGSPTSTEEGTSESATPESGPGSEPATSGSETPGTSESATPESGPGSPAGSPTSTEEGSPAGSPTSTEEGTSTEPSEGSAPGTSESATPESGPGTSESATPESGPGTSESATPESGPGSEPATSGSETPGSEPATSGSETPGSPAGSPTSTEEGTSTEPSEGSAPGTSTEPSEGSAPGSEPATSGSETPGTSESATPESGPGTSTEPSEGSAPASSEQKLISEEDLSPATGHHHHHH

SEQ ID NO: 716 - DNA, 5262 bp, synthetic construct
  misc_feature 1..5262: note = Description of Artificial Sequence: Synthetic polynucleotide
  source 1..5262: mol_type = other DNA
gccaccagaagatactacctgggtgcagtggaactgtcatgggactatatgcaaagtgatctcggtgagctgcctgtggacgcaagatttcctcctagagtgccaaaatcttttccattcaacacctcagtcgtgtacaaaaagactctgtttgtagaattcacggatcaccttttcaacatcgctaagccaaggccaccctggatgggtctgctaggtcctaccatccaggctgaggtttatgatacagtggtcattacacttaagaacatggcttcccatcctgtcagtcttcatgctgttggtgtatcctactggaaagcttctgagggagctgaatatgatgatcagaccagtcaaagggagaaagaagatgataaagtcttccctggtggaagccatacatatgtctggcaggtcctgaaagagaatggtccaatggcctctgacccactgtgccttacctactcatatctttctcatgtggacctggtaaaagacttgaattcaggcctcattggagccctactagtatgtagagaagggagtctggccaaggaaaagacacagaccttgcacaaatttatactactttttgctgtatttgatgaagggaaaagttggcactcagaaacaaagaactccttgatgcaggatagggatgctgcatctgctcgggcctggcctaaaatgcacacagtcaatggttatgtaaacaggtctctgccaggtctgattggatgccacaggaaatcagtctattggcatgtgattggaatgggcaccactcctgaagtgcactcaatattcctcgaaggtcacacatttcttgtgaggaaccatcgccaggctagcttggaaatctcgccaataactttccttactgctcaaacactcttgatggaccttggacagtttctactgttttgtcatatctcttcccaccaacatgatggcatggaagcttatgtcaaagtagacagctgtccagaggaaccccaactacgaatgaaaaataatgaagaagcggaagactatgatgatgatcttactgattctgaaatggatgtggtcaggtttgatgatgacaactctccttcctttatccaaattcgctcagttgccaagaagcatcctaaaacttgggtacattacattgctgctgaagaggaggactgggactatgctcccttagtcctcgcccccgatgacagaagttataaaagtcaatatttgaacaatggccctcagcggattggtaggaagtacaaaaaagtccgatttatggcatacacagatgaaacctttaagactcgtgaagctattcagcatgaatcaggaatcttgggacctttactttatggggaagttggagacacactgttgattatatttaagaatcaagcaagcagaccatataacatctaccctcacggaatcactgatgtccgtcctttgtattcaaggagattaccaaaaggtgtaaaacatttgaaggattttccaattctgccaggagaaatattcaaatataaatggacagtgactgtagaagatgggccaactaaatcagatcctcggtgcctgacccgctattactctagtttcgttaatatggagagagatctagcttcaggactcattggccctctcctcatctgctacaaagaatctgtagatcaaagaggaaaccagataatgtcagacaagaggaatgtcatcctgttttctgtatttgatgagaaccgaagctggtacctcacagagaatatacaacgctttctccccaatccagctggagtgcagcttgaggatccagagttccaagcctccaacatcatgcacagcatcaatggctatgtttttgatagtttgcagttgtcagtttgtttgcatgaggtggcatactggtacattctaagcattggagcacagactgacttcctttctgtcttcttctctggatataccttcaaacacaaaatggtctatgaagacacactcaccctattcccattctcaggagaaactgtcttcatgtcgatggaaaacccaggtctatggattctggggtgccacaactcagactttcggaacagaggcatgaccgccttactgaaggtttctagttgtgacaagaacactggtgattattacgaggacagttatgaagatatttcagcatacttgctgagtaaaaacaatgccattgaaccaagaagcttctctcaaaacccaccagtcttgaaacgccatcaacgggaaataactcgtactactcttcagtcagatcaagaggaaatcgattatgatgataccatatcagttgaaatgaagaaggaagattttgacatttatgatgaggatgaaaatcagagcccccgcagctttcaaaagaaaacacgacactattttattgctgcagtggagaggctctgggattatgggatgagtagctccccacatgttctaagaaacagggctcagagtggcagtgtccctcagttcaagaaagttgttttccaggaatttactgatggctcctttactcagcccttataccgtggagaactaaatgaacatttgggactcctggggccatatataagagcagaagttgaagataatatcatggtaactttcagaaatcaggcctctcgtccctattccttctattctagccttatttcttatgaggaagatcagaggcaaggagcagaacctagaaaaaactttgtcaagcctaatgaaaccaaaacttacttttggaaagtgcaacatcatatggcacccactaaagatgagtttgactgcaaagcctgggcttatttctctgatgttgacctggaaaaagatgtgcactcaggcctgattggaccccttctggtctgccacactaacacactgaaccctgctcatgggagacaagtgacagtacaggaatttgctctgtttttcaccatctttgatgagaccaaaagctggtacttcactgaaaatatggaaagaaactgcagggctccctgcaatatccagatggaagatcccacttttaaagagaattatcgcttccatgcaatcaatggctacataatggatacactacctggcttagtaatggctcaggatcaaaggattcgatggtatctgctcagcatgggcagcaatgaaaacatccattctattcatttcagtggacatgtgttcactgtacgaaaaaaagaggagtataaaatggcactgtacaatctctatccaggtgtttttgagacagtggaaatgttaccatccaaagctggaatttggcgggtggaatgccttattggcgagcatctacatgctgggatgagcacactttttctggtgtacagcaataagtgtcagactcccctgggaatggcttctggacacattagagattttcagattacagcttcaggacaatatggacagtgggccccaaagctggccagacttcattattccggatcaatcaatgcctggagcaccaaggagcccttttcttggatcaaggtggatctgttggcaccaatgattattcacggcatcaagacccagggtgcccgtcagaagttctccagcctctacatctctcagtttatcatcatgtatagtcttgatgggaagaagtggcagacttatcgaggaaattccactggaaccttaatggtcttctttggcaatgtggattcatctgggataaaacacaatatttttaaccctccaattattgctcgatacatccgtttgcacccaactcattatagcattcgcagcactcttcgcatggagttgatgggctgtgatttaaatagttgcagcatgccattgggaatggagagtaaagcaatatcagatgcacagattactgcttcatcctactttaccaatatgtttgccacctggtctccttcaaaagctcgacttcacctccaagggaggagtaatgcctggagacctcaggtgaataatccaaaagagtggctgcaagtggacttccagaagacaatgaaagtcacaggagtaactactcagggagtaaaatctctgcttaccagcatgtatgtgaaggagttcctcatctccagcagtcaagatggccatcagtggactctcttttttcagaatggcaaagtaaaggtttttcagggaaatcaagactccttcacacctgtggtgaactctctagacccaccgttactgactcgctaccttcgaattcacccccagagttgggtgcaccagattgccctgaggatggaggttctgggctgcgaggcacaggacctctacggcgcgccaggtacctcagagtctgctacccccgagtcagggccaggatcagagccagccacctccgggtctgagacacccgggacttccgagagtgccacccctgagtccggacccgggtccgagcccgccacttccggctccgaaactcccggcacaagcgagagcgctaccccagagtcaggaccaggaacatctacagagccctctgaaggctccgctccagggtccccagccggcagtcccactagcaccgaggagggaacctctgaaagcgccacacccgaatcagggccagggtctgagcctgctaccagcggcagcgagacaccaggcacctctgagtccgccacaccagagtccggacccggatctcccgctgggagccccacctccactgaggagggatctcctgctggctctccaacatctactgaggaaggtacctcaaccgagccatccgagggatcagctcccggcacctcagagtcggcaaccccggagtctggacccggaacttccgaaagtgccacaccagagtccggtcccgggacttcagaatcagcaacacccgagtccggccctgggtctgaacccgccacaagtggtagtgagacaccaggatcagaacctgctacctcagggtcagagacacccggatctccggcaggctcaccaacctccactgaggagggcaccagcacagaaccaagcgagggctccgcacccggaacaagcactgaacccagtgagggttcagcacccggctctgagccggccacaagtggcagtgagacacccggcacttcagagagtgccacccccgagagtggcccaggcactagtaccgagccctctgaaggcagtgcgccagcctcgagcgaacaaaaactcatctcagaagaggatctgtcacctgcaaccggtcatcatcaccatcaccattga

SEQ ID NO: 717 - protein, 1753 aa, synthetic construct
  REGION 1..1753: note = Description of Artificial Sequence: Synthetic polypeptide
ATRRYYLGAVELSWDYMQSDLGELPVDARFPPRVPKSFPFNTSVVYKKTLFVEFTDHLFNIAKPRPPWMGLLGPTIQAEVYDTVVITLKNMASHPVSLHAVGVSYWKASEGAEYDDQTSQREKEDDKVFPGGSHTYVWQVLKENGPMASDPLCLTYSYLSHVDLVKDLNSGLIGALLVCREGSLAKEKTQTLHKFILLFAVFDEGKSWHSETKNSLMQDRDAASARAWPKMHTVNGYVNRSLPGLIGCHRKSVYWHVIGMGTTPEVHSIFLEGHTFLVRNHRQASLEISPITFLTAQTLLMDLGQFLLFCHISSHQHDGMEAYVKVDSCPEEPQLRMKNNEEAEDYDDDLTDSEMDVVRFDDDNSPSFIQIRSVAKKHPKTWVHYIAAEEEDWDYAPLVLAPDDRSYKSQYLNNGPQRIGRKYKKVRFMAYTDETFKTREAIQHESGILGPLLYGEVGDTLLIIFKNQASRPYNIYPHGITDVRPLYSRRLPKGVKHLKDFPILPGEIFKYKWTVTVEDGPTKSDPRCLTRYYSSFVNMERDLASGLIGPLLICYKESVDQRGNQIMSDKRNVILFSVFDENRSWYLTENIQRFLPNPAGVQLEDPEFQASNIMHSINGYVFDSLQLSVCLHEVAYWYILSIGAQTDFLSVFFSGYTFKHKMVYEDTLTLFPFSGETVFMSMENPGLWILGCHNSDFRNRGMTALLKVSSCDKNTGDYYEDSYEDISAYLLSKNNAIEPRSFSQNPPVLKRHQREITRTTLQSDQEEIDYDDTISVEMKKEDFDIYDEDENQSPRSFQKKTRHYFIAAVERLWDYGMSSSPHVLRNRAQSGSVPQFKKVVFQEFTDGSFTQPLYRGELNEHLGLLGPYIRAEVEDNIMVTFRNQASRPYSFYSSLISYEEDQRQGAEPRKNFVKPNETKTYFWKVQHHMAPTKDEFDCKAWAYFSDVDLEKDVHSGLIGPLLVCHTNTLNPAHGRQVTVQEFALFFTIFDETKSWYFTENMERNCRAPCNIQMEDPTFKENYRFHAINGYIMDTLPGLVMAQDQRIRWYLLSMGSNENIHSIHFSGHVFTVRKKEEYKMALYNLYPGVFETVEMLPSKAGIWRVECLIGEHLHAGMSTLFLVYSNKCQTPLGMASGHIRDFQITASGQYGQWAPKLARLHYSGSINAWSTKEPFSWIKVDLLAPMIIHGIKTQGARQKFSSLYISQFIIMYSLDGKKWQTYRGNSTGTLMVFFGNVDSSGIKHNIFNPPIIARYIRLHPTHYSIRSTLRMELMGCDLNSCSMPLGMESKAISDAQITASSYFTNMFATWSPSKARLHLQGRSNAWRPQVNNPKEWLQVDFQKTMKVTGVTTQGVKSLLTSMYVKEFLISSSQDGHQWTLFFQNGKVKVFQGNQDSFTPVVNSLDPPLLTRYLRIHPQSWVHQIALRMEVLGCEAQDLYGAPPGASPGTSSTGSPGASPGTSSTGSPGTPGSGTASSSPGSSTPSGATGSPGTPGSGTASSSPGSSTPSGATGSPGTPGSGTASSSPGSSTPSGATGSPGSSTPSGATGSPGSSPSASTGTGPGSSPSASTGTGPGASPGTSSTGSPGTPGSGTASSSPGSSTPSGATGSPGSSPSASTGTGPGSSPSASTGTGPGASPGTSSTGSPGASPGTSSTGSPGSSTPSGATGSPGSSPSASTGTGPGASPGTSSTGSPGSSPSASTGTGPGTPGSGTASSSPGSSTPSGATGSASSEQKLISEEDLSPATGHHHHHH

SEQ ID NO: 718 - DNA, 5262 bp, synthetic construct
  misc_feature 1..5262: note = Description of Artificial Sequence: Synthetic polynucleotide
  source 1..5262: mol_type = other DNA
gccaccagaagatactacctgggtgcagtggaactgtcatgggactatatgcaaagtgatctcggtgagctgcctgtggacgcaagatttcctcctagagtgccaaaatcttttccattcaacacctcagtcgtgtacaaaaagactctgtttgtagaattcacggatcaccttttcaacatcgctaagccaaggccaccctggatgggtctgctaggtcctaccatccaggctgaggtttatgatacagtggtcattacacttaagaacatggcttcccatcctgtcagtcttcatgctgttggtgtatcctactggaaagcttctgagggagctgaatatgatgatcagaccagtcaaagggagaaagaagatgataaagtcttccctggtggaagccatacatatgtctggcaggtcctgaaagagaatggtccaatggcctctgacccactgtgccttacctactcatatctttctcatgtggacctggtaaaagacttgaattcaggcctcattggagccctactagtatgtagagaagggagtctggccaaggaaaagacacagaccttgcacaaatttatactactttttgctgtatttgatgaagggaaaagttggcactcagaaacaaagaactccttgatgcaggatagggatgctgcatctgctcgggcctggcctaaaatgcacacagtcaatggttatgtaaacaggtctctgccaggtctgattggatgccacaggaaatcagtctattggcatgtgattggaatgggcaccactcctgaagtgcactcaatattcctcgaaggtcacacatttcttgtgaggaaccatcgccaggctagcttggaaatctcgccaataactttccttactgctcaaacactcttgatggaccttggacagtttctactgttttgtcatatctcttcccaccaacatgatggcatggaagcttatgtcaaagtagacagctgtccagaggaaccccaactacgaatgaaaaataatgaagaagcggaagactatgatgatgatcttactgattctgaaatggatgtggtcaggtttgatgatgacaactctccttcctttatccaaattcgctcagttgccaagaagcatcctaaaacttgggtacattacattgctgctgaagaggaggactgggactatgctcccttagtcctcgcccccgatgacagaagttataaaagtcaatatttgaacaatggccctcagcggattggtaggaagtacaaaaaagtccgatttatggcatacacagatgaaacctttaagactcgtgaagctattcagcatgaatcaggaatcttgggacctttactttatggggaagttggagacacactgttgattatatttaagaatcaagcaagcagaccatataacatctaccctcacggaatcactgatgtccgtcctttgtattcaaggagattaccaaaaggtgtaaaacatttgaaggattttccaattctgccaggagaaatattcaaatataaatggacagtgactgtagaagatgggccaactaaatcagatcctcggtgcctgacccgctattactctagtttcgttaatatggagagagatctagcttcaggactcattggccctctcctcatctgctacaaagaatctgtagatcaaagaggaaaccagataatgtcagacaagaggaatgtcatcctgttttctgtatttgatgagaaccgaagctggtacctcacagagaatatacaacgctttctccccaatccagctggagtgcagcttgaggatccagagttccaagcctccaacatcatgcacagcatcaatggctatgtttttgatagtttgcagttgtcagtttgtttgcatgaggtggcatactggtacattctaagcattggagcacagactgacttcctttctgtcttcttctctggatataccttcaaacacaaaatggtctatgaagacacactcaccctattcccattctcaggagaaactgtcttcatgtcgatggaaaacccaggtctatggattctggggtgccacaactcagactttcggaacagaggcatgaccgccttactgaaggtttctagttgtgacaagaacactggtgattattacgaggacagttatgaagatatttcagcatacttgctgagtaaaaacaatgccattgaaccaagaagcttctctcaaaacccaccagtcttgaaacgccatcaacgggaaataactcgtactactcttcagtcagatcaagaggaaatcgattatgatgataccatatcagttgaaatgaagaaggaagattttgacatttatgatgaggatgaaaatcagagcccccgcagctttcaaaagaaaacacgacactattttattgctgcagtggagaggctctgggattatgggatgagtagctccccacatgttctaagaaacagggctcagagtggcagtgtccctcagttcaagaaagttgttttccaggaatttactgatggctcctttactcagcccttataccgtggagaactaaatgaacatttgggactcctggggccatatataagagcagaagttgaagataatatcatggtaactttcagaaatcaggcctctcgtccctattccttctattctagccttatttcttatgaggaagatcagaggcaaggagcagaacctagaaaaaactttgtcaagcctaatgaaaccaaaacttacttttggaaagtgcaacatcatatggcacccactaaagatgagtttgactgcaaagcctgggcttatttctctgatgttgacctggaaaaagatgtgcactcaggcctgattggaccccttctggtctgccacactaacacactgaaccctgctcatgggagacaagtgacagtacaggaatttgctctgtttttcaccatctttgatgagaccaaaagctggtacttcactgaaaatatggaaagaaactgcagggctccctgcaatatccagatggaagatcccacttttaaagagaattatcgcttccatgcaatcaatggctacataatggatacactacctggcttagtaatggctcaggatcaaaggattcgatggtatctgctcagcatgggcagcaatgaaaacatccattctattcatttcagtggacatgtgttcactgtacgaaaaaaagaggagtataaaatggcactgtacaatctctatccaggtgtttttgagacagtggaaatgttaccatccaaagctggaatttggcgggtggaatgccttattggcgagcatctacatgctgggatgagcacactttttctggtgtacagcaataagtgtcagactcccctgggaatggcttctggacacattagagattttcagattacagcttcaggacaatatggacagtgggccccaaagctggccagacttcattattccggatcaatcaatgcctggagcaccaaggagcccttttcttggatcaaggtggatctgttggcaccaatgattattcacggcatcaagacccagggtgcccgtcagaagttctccagcctctacatctctcagtttatcatcatgtatagtcttgatgggaagaagtggcagacttatcgaggaaattccactggaaccttaatggtcttctttggcaatgtggattcatctgggataaaacacaatatttttaaccctccaattattgctcgatacatccgtttgcacccaactcattatagcattcgcagcactcttcgcatggagttgatgggctgtgatttaaatagttgcagcatgccattgggaatggagagtaaagcaatatcagatgcacagattactgcttcatcctactttaccaatatgtttgccacctggtctccttcaaaagctcgacttcacctccaagggaggagtaatgcctggagacctcaggtgaataatccaaaagagtggctgcaagtggacttccagaagacaatgaaagtcacaggagtaactactcagggagtaaaatctctgcttaccagcatgtatgtgaaggagttcctcatctccagcagtcaagatggccatcagtggactctcttttttcagaatggcaaagtaaaggtttttcagggaaatcaagactccttcacacctgtggtgaactctctagacccaccgttactgactcgctaccttcgaattcacccccagagttgggtgcaccagattgccctgaggatggaggttctgggctgcgaggcacaggacctctacggcgcgccaccgggagcgtcacccggtacgtcctcaacggggagccctggggcatcacccggcacgtcctcgacagggtcccccggaacaccgggttcggggactgcgtcgtcgtcacccggttcgtcaacacccagcggtgcgacgggttccccgggaacccccggatcaggaacagcgtcgtcgagccccggaagctcgaccccgtcaggagcgaccgggtcgccaggaacgcctgggtcgggtactgcctcatcgtcgccgggttcatcgacgccctccggagcaacaggttcacccgggtcgtccacccccagcggagcgactggatcaccgggatcgagcccgtcggcatcgacaggaacaggtcccggtagctccccatcggcctccacggggacggggcctggtgcgtcaccggggacaagcagcacgggttcgccgggaacgccagggtcagggaccgcgtcgtcgagcccagggtcgtccaccccaagcggggctactgggtccccgggtagctcgccgagcgcatcaacgggaaccggaccgggcagctccccctcagcgtcgacagggacaggccctggcgcgagcccgggaacatcgtcgacggggtcacccggagcatcgccagggacctcgtcaactggctcgcctggatcgtcaacgccctcgggagccacggggtcgcccggatcatccccgtccgcctcaactggcacaggccctggtgcttcccctggaacgtccagcacaggctcccccggttccagcccttccgcttcgactgggactggacccggaaccccgggatcggggacagcgtcaagctcgcccggaagctccacgccttcgggggcaaccgggtcagcctcgagcgaacaaaaactcatctcagaagaggatctgtcacctgcaaccggtcatcatcaccatcaccattga

SEQ ID NO: 719 - protein, 2329 aa, synthetic construct
  REGION 1..2329: note = Description of Artificial Sequence: Synthetic polypeptide
ATRRYYLGAVELSWDYMQSDLGELPVDARFPPRVPKSFPFNTSVVYKKTLFVEFTDHLFNIAKPRPPWMGLLGPTIQAEVYDTVVITLKNMASHPVSLHAVGVSYWKASEGAEYDDQTSQREKEDDKVFPGGSHTYVWQVLKENGPMASDPLCLTYSYLSHVDLVKDLNSGLIGALLVCREGSLAKEKTQTLHKFILLFAVFDEGKSWHSETKNSLMQDRDAASARAWPKMHTVNGYVNRSLPGLIGCHRKSVYWHVIGMGTTPEVHSIFLEGHTFLVRNHRQASLEISPITFLTAQTLLMDLGQFLLFCHISSHQHDGMEAYVKVDSCPEEPQLRMKNNEEAEDYDDDLTDSEMDVVRFDDDNSPSFIQIRSVAKKHPKTWVHYIAAEEEDWDYAPLVLAPDDRSYKSQYLNNGPQRIGRKYKKVRFMAYTDETFKTREAIQHESGILGPLLYGEVGDTLLIIFKNQASRPYNIYPHGITDVRPLYSRRLPKGVKHLKDFPILPGEIFKYKWTVTVEDGPTKSDPRCLTRYYSSFVNMERDLASGLIGPLLICYKESVDQRGNQIMSDKRNVILFSVFDENRSWYLTENIQRFLPNPAGVQLEDPEFQASNIMHSINGYVFDSLQLSVCLHEVAYWYILSIGAQTDFLSVFFSGYTFKHKMVYEDTLTLFPFSGETVFMSMENPGLWILGCHNSDFRNRGMTALLKVSSCDKNTGDYYEDSYEDISAYLLSKNNAIEPRSFSQNPPVLKRHQREITRTTLQSDQEEIDYDDTISVEMKKEDFDIYDEDENQSPRSFQKKTRHYFIAAVERLWDYGMSSSPHVLRNRAQSGSVPQFKKVVFQEFTDGSFTQPLYRGELNEHLGLLGPYIRAEVEDNIMVTFRNQASRPYSFYSSLISYEEDQRQGAEPRKNFVKPNETKTYFWKVQHHMAPTKDEFDCKAWAYFSDVDLEKDVHSGLIGPLLVCHTNTLNPAHGRQVTVQEFALFFTIFDETKSWYFTENMERNCRAPCNIQMEDPTFKENYRFHAINGYIMDTLPGLVMAQDQRIRWYLLSMGSNENIHSIHFSGHVFTVRKKEEYKMALYNLYPGVFETVEMLPSKAGIWRVECLIGEHLHAGMSTLFLVYSNKCQTPLGMASGHIRDFQITASGQYGQWAPKLARLHYSGSINAWSTKEPFSWIKVDLLAPMIIHGIKTQGARQKFSSLYISQFIIMYSLDGKKWQTYRGNSTGTLMVFFGNVDSSGIKHNIFNPPIIARYIRLHPTHYSIRSTLRMELMGCDLNSCSMPLGMESKAISDAQITASSYFTNMFATWSPSKARLHLQGRSNAWRPQVNNPKEWLQVDFQKTMKVTGVTTQGVKSLLTSMYVKEFLISSSQDGHQWTLFFQNGKVKVFQGNQDSFTPVVNSLDPPLLTRYLRIHPQSWVHQIALRMEVLGCEAQDLYGAPGSPAGSPTSTEEGTSESATPESGPGTSTEPSEGSAPGSPAGSPTSTEEGTSTEPSEGSAPGTSTEPSEGSAPGTSESATPESGPGSEPATSGSETPGSEPATSGSETPGSPAGSPTSTEEGTSESATPESGPGTSTEPSEGSAPGTSTEPSEGSAPGSPAGSPTSTEEGTSTEPSEGSAPGTSTEPSEGSAPGTSESATPESGPGTSTEPSEGSAPGTSESATPESGPGSEPATSGSETPGTSTEPSEGSAPGTSTEPSEGSAPGTSESATPESGPGTSESATPESGPGSPAGSPTSTEEGTSESATPESGPGSEPATSGSETPGTSESATPESGPGTSTEPSEGSAPGTSTEPSEGSAPGTSTEPSEGSAPGTSTEPSEGSAPGTSTEPSEGSAPGTSTEPSEGSAPGSPAGSPTSTEEGTSTEPSEGSAPGTSESATPESGPGSEPATSGSETPGTSESATPESGPGSEPATSGSETPGTSESATPESGPGTSTEPSEGSAPGTSESATPESGPGSPAGSPTSTEEGSPAGSPTSTEEGSPAGSPTSTEEGTSESATPESGPGTSTEPSEGSAPGTSESATPESGPGSEPATSGSETPGTSESATPESGPGSEPATSGSETPGTSESATPESGPGTSTEPSEGSAPGSPAGSPTSTEEGTSESATPESGPGSEPATSGSETPGTSESATPESGPGSPAGSPTSTEEGSPAGSPTSTEEGTSTEPSEGSAPGTSESATPESGPGTSESATPESGPGTSESATPESGPGSEPATSGSETPGSEPATSGSETPGSPAGSPTSTEEGTSTEPSEGSAPGTSTEPSEGSAPGSEPATSGSETPGTSESATPESGPGTSTEPSEGSAPASSEQKLISEEDLSPATGHHHHHH

SEQ ID NO: 720 - DNA, 6990 bp, synthetic construct
  misc_feature 1..6990: note = Description of Artificial Sequence: Synthetic polynucleotide
  source 1..6990: mol_type = other DNA
gccaccagaagatactacctgggtgcagtggaactgtcatgggactatatgcaaagtgatctcggtgagctgcctgtggacgcaagatttcctcctagagtgccaaaatcttttccattcaacacctcagtcgtgtacaaaaagactctgtttgtagaattcacggatcaccttttcaacatcgctaagccaaggccaccctggatgggtctgctaggtcctaccatccaggctgaggtttatgatacagtggtcattacacttaagaacatggcttcccatcctgtcagtcttcatgctgttggtgtatcctactggaaagcttctgagggagctgaatatgatgatcagaccagtcaaagggagaaagaagatgataaagtcttccctggtggaagccatacatatgtctggcaggtcctgaaagagaatggtccaatggcctctgacccactgtgccttacctactcatatctttctcatgtggacctggtaaaagacttgaattcaggcctcattggagccctactagtatgtagagaagggagtctggccaaggaaaagacacagaccttgcacaaatttatactactttttgctgtatttgatgaagggaaaagttggcactcagaaacaaagaactccttgatgcaggatagggatgctgcatctgctcgggcctggcctaaaatgcacacagtcaatggttatgtaaacaggtctctgccaggtctgattggatgccacaggaaatcagtctattggcatgtgattggaatgggcaccactcctgaagtgcactcaatattcctcgaaggtcacacatttcttgtgaggaaccatcgccaggctagcttggaaatctcgccaataactttccttactgctcaaacactcttgatggaccttggacagtttctactgttttgtcatatctcttcccaccaacatgatggcatggaagcttatgtcaaagtagacagctgtccagaggaaccccaactacgaatgaaaaataatgaagaagcggaagactatgatgatgatcttactgattctgaaatggatgtggtcaggtttgatgatgacaactctccttcctttatccaaattcgctcagttgccaagaagcatcctaaaacttgggtacattacattgctgctgaagaggaggactgggactatgctcccttagtcctcgcccccgatgacagaagttataaaagtcaatatttgaacaatggccctcagcggattggtaggaagtacaaaaaagtccgatttatggcatacacagatgaaacctttaagactcgtgaagctattcagcatgaatcaggaatcttgggacctttactttatggggaagttggagacacactgttgattatatttaagaatcaagcaagcagaccatataacatctaccctcacggaatcactgatgtccgtcctttgtattcaaggagattaccaaaaggtgtaaaacatttgaaggattttccaattctgccaggagaaatattcaaatataaatggacagtgactgtagaagatgggccaactaaatcagatcctcggtgcctgacccgctattactctagtttcgttaatatggagagagatctagcttcaggactcattggccctctcctcatctgctacaaagaatctgtagatcaaagaggaaaccagataatgtcagacaagaggaatgtcatcctgttttctgtatttgatgagaaccgaagctggtacctcacagagaatatacaacgctttctccccaatccagctggagtgcagcttgaggatccagagttccaagcctccaacatcatgcacagcatcaatggctatgtttttgatagtttgcagttgtcagtttgtttgcatgaggtggcatactggtacattctaagcattggagcacagactgacttcctttctgtcttcttctctggatataccttcaaacacaaaatggtctatgaagacacactcaccctattcccattctcaggagaaactgtcttcatgtcgatggaaaacccaggtctatggattctggggtgccacaactcagactttcggaacagaggcatgaccgccttactgaaggtttctagttgtgacaagaacactggtgattattacgaggacagttatgaagatatttcagcatacttgctgagtaaaaacaatgccattgaaccaagaagcttctctcaaaacccaccagtcttgaaacgccatcaacgggaaataactcgtactactcttcagtcagatcaagaggaaatcgattatgatgataccatatcagttgaaatgaagaaggaagattttgacatttatgatgaggatgaaaatcagagcccccgcagctttcaaaagaaaacacgacactattttattgctgcagtggagaggctctgggattatgggatgagtagctccccacatgttctaagaaacagggctcagagtggcagtgtccctcagttcaagaaagttgttttccaggaatttactgatggctcctttactcagcccttataccgtggagaactaaatgaacatttgggactcctggggccatatataagagcagaagttgaagataatatcatggtaactttcagaaatcaggcctctcgtccctattccttctattctagccttatttcttatgaggaagatcagaggcaaggagcagaacctagaaaaaactttgtcaagcctaatgaaaccaaaacttacttttggaaagtgcaacatcatatggcacccactaaagatgagtttgactgcaaagcctgggcttatttctctgatgttgacctggaaaaagatgtgcactcaggcctgattggaccccttctggtctgccacactaacacactgaaccctgctcatgggagacaagtgacagtacaggaatttgctctgtttttcaccatctttgatgagaccaaaagctggtacttcactgaaaatatggaaagaaactgcagggctccctgcaatatccagatggaagatcccacttttaaagagaattatcgcttccatgcaatcaatggctacataatggatacactacctggcttagtaatggctcaggatcaaaggattcgatggtatctgctcagcatgggcagcaatgaaaacatccattctattcatttcagtggacatgtgttcactgtacgaaaaaaagaggagtataaaatggcactgtacaatctctatccaggtgtttttgagacagtggaaatgttaccatccaaagctggaatttggcgggtggaatgccttattggcgagcatctacatgctgggatgagcacactttttctggtgtacagcaataagtgtcagactcccctgggaatggcttctggacacattagagattttcagattacagcttcaggacaatatggacagtgggccccaaagctggccagacttcattattccggatcaatcaatgcctggagcaccaaggagcccttttcttggatcaaggtggatctgttggcaccaatgattattcacggcatcaagacccagggtgcccgtcagaagttctccagcctctacatctctcagtttatcatcatgtatagtcttgatgggaagaagtggcagacttatcgaggaaattccactggaaccttaatggtcttctttggcaatgtggattcatctgggataaaacacaatatttttaaccctccaattattgctcgatacatccgtttgcacccaactcattatagcattcgcagcactcttcgcatggagttgatgggctgtgatttaaatagttgcagcatgccattgggaatggagagtaaagcaatatcagatgcacagattactgcttcatcctactttaccaatatgtttgccacctggtctccttcaaaagctcgacttcacctccaagggaggagtaatgcctggagacctcaggtgaataatccaaaagagtggctgcaagtggacttccagaagacaatgaaagtcacaggagtaactactcagggagtaaaatctctgcttaccagcatgtatgtgaaggagttcctcatctccagcagtcaagatggccatcagtggactctcttttttcagaatggcaaagtaaaggtttttcagggaaatcaagactccttcacacctgtggtgaactctctagacccaccgttactgactcgctaccttcgaattcacccccagagttgggtgcaccagattgccctgaggatggaggttctgggctgcgaggcacaggacctctacggcgcgccaggttctccagccgggtccccaacttcgaccgaggaagggacctccgagtcagctaccccggagtccggtcctggcacctccaccgaaccatcggagggcagcgcccctgggagccctgccgggagccctacaagcaccgaagagggcaccagtacagagccaagtgaggggagcgcccctggtactagtactgaaccatccgaggggtcagctccaggcacgagtgagtccgctacccccgagagcggaccgggctcagagcccgccacgagtggcagtgaaactccaggctcagaacccgccactagtgggtcagagactccaggcagccctgccggatcccctacgtccaccgaggagggaacatctgagtccgcaacacccgaatccggtccaggcacctccacggaacctagtgaaggctcggcaccaggtacaagcaccgaacctagcgagggcagcgctcccggcagccctgccggcagcccaacctcaactgaggagggcaccagtactgagcccagcgagggatcagcacctggcaccagcaccgaacctagcgaggggagcgcccctgggactagcgagtcagctacaccagagagcgggcctggaacttctaccgaacccagtgagggatccgctccaggcacctccgaatccgcaacccccgaatccggacctggctcagagcccgccaccagcgggagcgaaacccctggcacatccaccgagcctagcgaagggtccgcacccggcaccagtacagagcctagcgagggatcagcacctggcaccagtgaatctgctacaccagagagcggccctggaacctccgagtccgctacccccgagagcgggccaggttctcctgctggctcccccacctcaacagaagaggggacaagcgaaagcgctacgcctgagagtggccctggctctgagccagccacctccggctctgaaacccctggcactagtgagtctgccacgcctgagtccggacccgggacctctactgagccctcggaggggagcgctcctggcacgagtacagaaccttccgaaggaagtgcaccgggcacaagcaccgagccttccgaaggctctgctcccggaacctctaccgaaccctctgaagggtctgcacccggcacgagcaccgaacccagcgaagggtcagcgcctgggacctcaacagagccctcggaaggatcagcgcctggaagccctgcagggagtccaacttccacggaagaaggaacgtctacagagccatcagaggggtccgcaccaggtaccagcgaatccgctactcccgaatctggccctgggtccgaacctgccacctccggctctgaaactccagggacctccgaatctgccacacccgagagcggccctggctccgagcccgcaacatctggcagcgagacacctggcacctccgagagcgcaacacccgagagcggccctggcaccagcaccgagccatccgagggatccgccccaggcacttctgagtcagccacacccgaaagcggaccaggatcacccgctggctcccccaccagtaccgaggaggggtcccccgctggaagtccaacaagcactgaggaagggtcccctgccggctcccccacaagtaccgaagagggcacaagtgagagcgccactcccgagtccgggcctggcaccagcacagagccttccgaggggtccgcaccaggtacctcagagtctgctacccccgagtcagggccaggatcagagccagccacctccgggtctgagacacccgggacttccgagagtgccacccctgagtccggacccgggtccgagcccgccacttccggctccgaaactcccggcacaagcgagagcgctaccccagagtcaggaccaggaacatctacagagccctctgaaggctccgctccagggtccccagccggcagtcccactagcaccgaggagggaacctctgaaagcgccacacccgaatcagggccagggtctgagcctgctaccagcggcagcgagacaccaggcacctctgagtccgccacaccagagtccggacccggatctcccgctgggagccccacctccactgaggagggatctcctgctggctctccaacatctactgaggaaggtacctcaaccgagccatccgagggatcagctcccggcacctcagagtcggcaaccccggagtctggacccggaacttccgaaagtgccacaccagagtccggtcccgggacttcagaatcagcaacacccgagtccggccctgggtctgaacccgccacaagtggtagtgagacaccaggatcagaacctgctacctcagggtcagagacacccggatctccggcaggctcaccaacctccactgaggagggcaccagcacagaaccaagcgagggctccgcacccggaacaagcactgaacccagtgagggttcagcacccggctctgagccggccacaagtggcagtgagacacccggcacttcagagagtgccacccccgagagtggcccaggcactagtaccgagccctctgaaggcagtgcgccagcctcgagcgaacaaaaactcatctcagaagaggatctgtcacctgcaaccggtcatcatcaccatcaccattga

SEQ ID NO: 721 - protein, 2329 aa, synthetic construct [sequence omitted]

SEQ ID NO: 722 - DNA, 6990 bp, synthetic construct
  misc_feature 1..6990: note = Description of Artificial Sequence: Synthetic polynucleotide
  source 1..6990: mol_type = other DNA
gccaccagaagatactacctgggtgcagtggaactgtcatgggactatatgcaaagtgatctcggtgagctgcctgtggacgcaagatttcctcctagagtgccaaaatcttttccattcaacacctcagtcgtgtacaaaaagactctgtttgtagaattcacggatcaccttttcaacatcgctaagccaaggccaccctggatgggtctgctaggtcctaccatccaggctgaggtttatgatacagtggtcattacacttaagaacatggcttcccatcctgtcagtcttcatgctgttggtgtatcctactggaaagcttctgagggagctgaatatgatgatcagaccagtcaaagggagaaagaagatgataaagtcttccctggtggaagccatacatatgtctggcaggtcctgaaagagaatggtccaatggcctctgacccactgtgccttacctactcatatctttctcatgtggacctggtaaaagacttgaattcaggcctcattggagccctactagtatgtagagaagggagtctggccaaggaaaagacacagaccttgcacaaatttatactactttttgctgtatttgatgaagggaaaagttggcactcagaaacaaagaactccttgatgcaggatagggatgctgcatctgctcgggcctggcctaaaatgcacacagtcaatggttatgtaaacaggtctctgccaggtctgattggatgccacaggaaatcagtctattggcatgtgattggaatgggcaccactcctgaagtgcactcaatattcctcgaaggtcacacatttcttgtgaggaaccatcgccaggctagcttggaaatctcgccaataactttccttactgctcaaacactcttgatggaccttggacagtttctactgttttgtcatatctcttcccaccaacatgatggcatggaagcttatgtcaaagtagacagctgtccagaggaaccccaactacgaatgaaaaataatgaagaagcggaagactatgatgatgatcttactgattctgaaatggatgtggtcaggtttgatgatgacaactctccttcctttatccaaattcgctcagttgccaagaagcatcctaaaacttgggtacattacattgctgctgaagaggaggactgggactatgctcccttagtcctcgcccccgatgacagaagttataaaagtcaatatttgaacaatggccctcagcggattggtaggaagtacaaaaaagtccgatttatggcatacacagatgaaacctttaagactcgtgaagctattcagcatgaatcaggaatcttgggacctttactttatggggaagttggagacacactgttgattatatttaagaatcaagcaagcagaccatataacatctaccctcacggaatcactgatgtccgtcctttgtattcaaggagattaccaaaaggtgtaaaacatttgaaggattttccaattctgccaggagaaatattcaaatataaatggacagtgactgtagaagatgggccaactaaatcagatcctcggtgcctgacccgctattactctagtttcgttaatatggagagagatctagcttcaggactcattggccctctcctcatctgctacaaagaatctgtagatcaaagaggaaaccagataatgtcagacaagaggaatgtcatcctgttttctgtatttgatgagaaccgaagctggtacctcacagagaatatacaacgctttctccccaatccagctggagtgcagcttgaggatccagagttccaagcctccaacatcatgcacagcatcaatggctatgtttttgatagtttgcagttgtcagtttgtttgcatgaggtggcatactggtacattctaagcattggagcacagactgacttcctttctgtcttcttctctggatataccttcaaacacaaaatggtctatgaagacacactcaccctattcccattctcaggagaaactgtcttcatgtcgatggaaaacccaggtctatggattctggggtgccacaactcagactttcggaacagaggcatgaccgccttactgaaggtttctagttgtgacaagaacactggtgattattacgaggacagttatgaagatatttcagcatacttgctgagtaaaaacaatgccattgaaccaagaagcttctctcaaaacccaccagtcttgaaacgccatcaacgggaaataactcgtactactcttcagtcagatcaagaggaaatcgattatgatgataccatatcagttgaaatgaagaaggaagattttgacatttatgatgaggatgaaaatcagagcccccgcagctttcaaaagaaaacacgacactattttattgctgcagtggagaggctctgggattatgggatgagtagctccccacatgttctaagaaacagggctcagagtggcagtgtccctcagttcaagaaagttgttttccaggaatttactgatggctcctttactcagcccttataccgtggagaactaaatgaacatttgggactcctggggccatatataagagcagaagttgaagataatatcatggtaactttcagaaatcaggcctctcgtccctattccttctattctagccttatttcttatgaggaagatcagaggcaaggagcagaacctagaaaaaactttgtcaagcctaatgaaaccaaaacttacttttggaaagtgcaacatcatatggcacccactaaagatgagtttgactgcaaagcctgggcttatttctctgatgttgacctggaaaaagatgtgcactcaggcctgattggaccccttctggtctgccacactaacacactgaaccctgctcatgggagacaagtgacagtacaggaatttgctctgtttttcaccatctttgatgagaccaaaagctggtacttcactgaaaatatggaaagaaactgcagggctccctgcaatatccagatggaagatcccacttttaaagagaattatcgcttccatgcaatcaatggctacataatggatacactacctggcttagtaatggctcaggatcaaaggattcgatggtatctgctcagcatgggcagcaatgaaaacatccattctattcatttcagtggacatgtgttcactgtacgaaaaaaagaggagtataaaatggcactgtacaatctctatccaggtgtttttgagacagtggaaatgttaccatccaaagctggaatttggcgggtggaatgccttattggcgagcatctacatgctgggatgagcacactttttctggtgtacagcaataagtgtcagactcccctgggaatggcttctggacacattagagattttcagattacagcttcaggacaatatggacagtgggccccaaagctggccagacttcattattccggatcaatcaatgcctggagcaccaaggagcccttttcttggatcaaggtggatctgttggcaccaatgattattcacggcatcaagacccagggtgcccgtcagaagttctccagcctctacatctctcagtttatcatcatgtatagtcttgatgggaagaagtggcagacttatcgaggaaattccactggaaccttaatggtcttctttggcaatgtggattcatctgggataaaacacaatatttttaaccctccaattattgctcgatacatccgtttgcacccaactcattatagcattcgcagcactcttcgcatggagttgatgggctgtgatttaaatagttgcagcatgccattgggaatggagagtaaagcaatatcagatgcacagattactgcttcatcctactttaccaatatgtttgccacctggtctccttcaaaagctcgacttcacctccaagggaggagtaatgcctggagacctcaggtgaataatccaaaagagtggctgcaagtggacttccagaagacaatgaaagtcacaggagtaactactcagggagtaaaatctctgcttaccagcatgtatgtgaaggagttcctcatctccagcagtcaagatggccatcagtggactctcttttttcagaatggcaaagtaaaggtttttcagggaaatcaagactccttcacacctgtggtgaactctctagacccaccgttactgactcgctaccttcgaattcacccccagagttgggtgcaccagattgccctgaggatggaggttctgggctgcgaggcacaggacctctacggcgcgccaggtgcctcgccgggaacatcatcaactggttcacccgggtcatccccctcggcctcaaccgggacgggtcccggctcatcccccagcgccagcactggaacaggtcctggcactcctggttccggtacggcatcgtcatccccgggaagctcaacaccgtccggagcgacaggatcacctggctcgtcaccttcggcgtcaactggaacggggccaggggcctcacccggaacgtcctcgactgggtcgcctggtacgccgggatcaggaacggcctcatcctcgcctgggtcctcaacgccctcgggtgcgactggttcgccgggaactcctggctcggggacggcctcgtcgtcgcctggggcatcaccggggacgagctccacggggtcccctggagcgtcaccggggacctcctcgacaggtagcccgggtacaccgggcagcggcacggcttcgtcgtcacccggctcgtccacaccgtcgggagctacgggaagcccaggagcgtcaccgggaacgtcgtcaacggggtcaccgggtacgccaggtagcggcacggccagcagctcgccaggttcatcgaccccgtcgggagcgactgggtcgcccggatcaagcccgtcagcttccactggaacaggacccgggtcgtcgccgtcagcctcaacggggacaggacctggttcatcgacgccgtcaggggcgacaggctcgcccggatcgtcaacaccctcgggggcaacggggagccctggtgcgtcgcctggaacctcatccaccggaagcccgggggcctcgccgggtacgagctccacgggatcgcccggagcgtcccccggaacttcaagcacagggagccctggtacacccggatcgggtacagcgtcatcgagccccggtgcgtcacctggtacgtcgagcacggggtcgccaggggcgtcccctgggacgtcctcaacaggctcgcccggtgcgtcacccggcacgtcgtccacgggttcacctggtagctccccttccgcgtccactggcaccgggcctggaactccggggagcggcacagcgagctcgtcgccgggagcatcgcctgggacatcgagcaccgggtcgccaggagcatcgcccggaacatccagcacaggaagccccggcgcgtcgcccgggacatcaagcacaggttccccgggatcgagcacgccgtccggagccactggatcaccagggagctcgacaccttccggcgcaacgggatcgcccggagccagcccgggtacgtcaagcactggctcccctggtacgcccgggtcgggaacagcgtcctcaagcccgggtagctcgacgccgtcaggagccacagggtcgccgggatcgtcgactccatcaggcgcaacgggatcgcctggatcaagcactccatccggagcgacgggaagcccagggagctccccgtccgcatcgactgggacgggacctggagcaagccccggtacgtcgtcaacaggttcgcctggtgcctcgcctggcacgtccagcacggggagccccggaacgccgggttccggaaccgcatcctcctcaccaggtgcctcaccgggcacctcatcaacgggatcaccaggggcttcaccgggaacgagctcgacgggttcaccgggagcgtccccggggacttcgtcgacaggtagcccaggggcaagccccggtacatcgtcaacgggttccccagggacaccggggagcggtactgcatcgtcctcacccggttcctcgacacccagcggagccacgggttcgcccggtactccggggtccggaacggccagcagctcacccggttcctcgacgccatcaggtgccacgggctcgcctggaacgccaggctcgggcactgcgagcagcagccctggatcatcaacgcctagcggagcgaccggctcccctggatcgtcaactccctcgggcgcgactgggagcccaggaagctcaccgtcggcctcgacgggaacagggcctggttcgagcccctcagcttcaacaggaacaggtccaggcgcgtcgccaggtacatcatcgacgggttcgcctgggacccctgggtccggtactgcctcatcatcgcccggatcgtccaccccctcgggagcgacaggttcgcctggctccagcccctccgcgagcacgggaaccggaccaggttcgtcaccctcagcatcaacggggacgggaccgggggcgtcaccaggaacgtcctccaccggctcgccgggtgcatcacccggaacgtcatcgaccggatcgccagggagctcgacgccatcaggcgcaacaggatcacctggctcaagccctagcgcgtcaaccggcacgggtccgggtgcctcccctggcacgtccagcaccggatcacccggatcgagcccatccgcctcaaccggaaccggacccggtacaccagggtcgggaacagcctcctcgtcaccaggctcctcaaccccctcgggagccacgggttcgcccggttcgtcaacgccttccggagcaactggtagccccggagcatcgccaggaacttcgagcacggggtcgcccgcctcgagcgaacaaaaactcatctcagaagaggatctgtcacctgcaaccggtcatcatcaccatcaccattga

SEQ ID NO: 723 - protein, 1619 aa, synthetic construct
  REGION 1..1619: note = Description of Artificial Sequence: Synthetic polypeptide
GAPTSESATPESGPGSEPATSGSETPGTSESATPESGPGSEPATSGSETPGTSESATPESGPGTSTEPSEGSAPGSPAGSPTSTEEGTSESATPESGPGSEPATSGSETPGTSESATPESGPGSPAGSPTSTEEGSPAGSPTSTEEGASSATRRYYLGAVELSWDYMQSDLGELPVDARFPPRVPKSFPFNTSVVYKKTLFVEFTDHLFNIAKPRPPWMGLLGPTIQAEVYDTVVITLKNMASHPVSLHAVGVSYWKASEGAEYDDQTSQREKEDDKVFPGGSHTYVWQVLKENGPMASDPLCLTYSYLSHVDLVKDLNSGLIGALLVCREGSLAKEKTQTLHKFILLFAVFDEGKSWHSETKNSLMQDRDAASARAWPKMHTVNGYVNRSLPGLIGCHRKSVYWHVIGMGTTPEVHSIFLEGHTFLVRNHRQASLEISPITFLTAQTLLMDLGQFLLFCHISSHQHDGMEAYVKVDSCPEEPQLRMKNNEEAEDYDDDLTDSEMDVVRFDDDNSPSFIQIRSVAKKHPKTWVHYIAAEEEDWDYAPLVLAPDDRSYKSQYLNNGPQRIGRKYKKVRFMAYTDETFKTREAIQHESGILGPLLYGEVGDTLLIIFKNQASRPYNIYPHGITDVRPLYSRRLPKGVKHLKDFPILPGEIFKYKWTVTVEDGPTKSDPRCLTRYYSSFVNMERDLASGLIGPLLICYKESVDQRGNQIMSDKRNVILFSVFDENRSWYLTENIQRFLPNPAGVQLEDPEFQASNIMHSINGYVFDSLQLSVCLHEVAYWYILSIGAQTDFLSVFFSGYTFKHKMVYEDTLTLFPFSGETVFMSMENPGLWILGCHNSDFRNRGMTALLKVSSCDKNTGDYYEDSYEDISAYLLSKNNAIEPRSFSQNPPVLKRHQREITRTTLQSDQEEIDYDDTISVEMKKEDFDIYDEDENQSPRSFQKKTRHYFIAAVERLWDYGMSSSPHVLRNRAQSGSVPQFKKVVFQEFTDGSFTQPLYRGELNEHLGLLGPYIRAEVEDNIMVTFRNQASRPYSFYSSLISYEEDQRQGAEPRKNFVKPNETKTYFWKVQHHMAPTKDEFDCKAWAYFSDVDLEKDVHSGLIGPLLVCHTNTLNPAHGRQVTVQEFALFFTIFDETKSWYFTENMERNCRAPCNIQMEDPTFKENYRFHAINGYIMDTLPGLVMAQDQRIRWYLLSMGSNENIHSIHFSGHVFTVRKKEEYKMALYNLYPGVFETVEMLPSKAGIWRVECLIGEHLHAGMSTLFLVYSNKCQTPLGMASGHIRDFQITASGQYGQWAPKLARLHYSGSINAWSTKEPFSWIKVDLLAPMIIHGIKTQGARQKFSSLYISQFIIMYSLDGKKWQTYRGNSTGTLMVFFGNVDSSGIKHNIFNPPIIARYIRLHPTHYSIRSTLRMELMGCDLNSCSMPLGMESKAISDAQITASSYFTNMFATWSPSKARLHLQGRSNAWRPQVNNPKEWLQVDFQKTMKVTGVTTQGVKSLLTSMYVKEFLISSSQDGHQWTLFFQNGKVKVFQGNQDSFTPVVNSLDPPLLTRYLRIHPQSWVHQIALRMEVLGCEAQDLYGAGSPGAETAEQKLISEEDLSPATGHHHHHH

SEQ ID NO: 724 - DNA, 4860 bp, synthetic construct
  misc_feature 1..4860: note = Description of Artificial Sequence: Synthetic polynucleotide
  source 1..4860: mol_type = other DNA
ggcgcgccaacatcagagagcgccacccctgaaagtggtcccgggagcgagccagccacatctgggtcggaaacgccaggcacaagtgagtctgcaactcccgagtccggacctggctccgagcctgccactagcggctccgagactccgggaacttccgagagcgctacaccagaaagcggacccggaaccagtaccgaacctagcgagggctctgctccgggcagcccagccggctctcctacatccacggaggagggcacttccgaatccgccaccccggagtcagggccaggatctgaacccgctacctcaggcagtgagacgccaggaacgagcgagtccgctacaccggagagtgggccagggagccctgctggatctcctacgtccactgaggaagggtcaccagcgggctcgcccaccagcactgaagaaggtgcctcgagcgccaccagaagatactacctgggtgcagtggaactgtcatgggactatatgcaaagtgatctcggtgagctgcctgtggacgcaagatttcctcctagagtgccaaaatcttttccattcaacacctcagtcgtgtacaaaaagactctgtttgtagaattcacggatcaccttttcaacatcgctaagccaaggccaccctggatgggtctgctaggtcctaccatccaggctgaggtttatgatacagtggtcattacacttaagaacatggcttcccatcctgtcagtcttcatgctgttggtgtatcctactggaaagcttctgagggagctgaatatgatgatcagaccagtcaaagggagaaagaagatgataaagtcttccctggtggaagccatacatatgtctggcaggtcctgaaagagaatggtccaatggcctctgacccactgtgccttacctactcatatctttctcatgtggacctggtaaaagacttgaattcaggcctcattggagccctactagtatgtagagaagggagtctggccaaggaaaagacacagaccttgcacaaatttatactactttttgctgtatttgatgaagggaaaagttggcactcagaaacaaagaactccttgatgcaggatagggatgctgcatctgctcgggcctggcctaaaatgcacacagtcaatggttatgtaaacaggtctctgccaggtctgattggatgccacaggaaatcagtctattggcatgtgattggaatgggcaccactcctgaagtgcactcaatattcctcgaaggtcacacatttcttgtgaggaaccatcgccaggctagcttggaaatctcgccaataactttccttactgctcaaacactcttgatggaccttggacagtttctactgttttgtcatatctcttcccaccaacatgatggcatggaagcttatgtcaaagtagacagctgtccagaggaaccccaactacgaatgaaaaataatgaagaagcggaagactatgatgatgatcttactgattctgaaatggatgtggtcaggtttgatgatgacaactctccttcctttatccaaattcgctcagttgccaagaagcatcctaaaacttgggtacattacattgctgctgaagaggaggactgggactatgctcccttagtcctcgcccccgatgacagaagttataaaagtcaatatttgaacaatggccctcagcggattggtaggaagtacaaaaaagtccgatttatggcatacacagatgaaacctttaagactcgtgaagctattcagcatgaatcaggaatcttgggacctttactttatggggaagttggagacacactgttgattatatttaagaatcaagcaagcagaccatataacatctaccctcacggaatcactgatgtccgtcctttgtattcaaggagattaccaaaaggtgtaaaacatttgaaggattttccaattctgccaggagaaatattcaaatataaatggacagtgactgtagaagatgggccaactaaatcagatcctcggtgcctgacccgctattactctagtttcgttaatatggagagagatctagcttcaggactcattggccctctcctcatctgctacaaagaatctgtagatcaaagaggaaaccagataatgtcagacaagaggaatgtcatcctgttttctgtatttgatgagaaccgaagctggtacctcacagagaatatacaacgctttctccccaatccagctggagtgcagcttgaggatccagagttccaagcctccaacatcatgcacagcatcaatggctatgtttttgatagtttgcagttgtcagtttgtttgcatgaggtggcatactggtacattctaagcattggagcacagactgacttcctttctgtcttcttctctggatataccttcaaacacaaaatggtctatgaagacacactcaccctattcccattctcaggagaaactgtcttcatgtcgatggaaaacccaggtctatggattctggggtgccacaactcagactttcggaacagaggcatgaccgccttactgaaggtttctagttgtgacaagaacactggtgattattacgaggacagttatgaagatatttcagcatacttgctgagtaaaaacaatgccattgaaccaagaagcttctctcaaaacccaccagtcttgaaacgccatcaacgggaaataactcgtactactcttcagtcagatcaagaggaaatcgattatgatgataccatatcagttgaaatgaagaaggaagattttgacatttatgatgaggatgaaaatcagagcccccgcagctttcaaaagaaaacacgacactattttattgctgcagtggagaggctctgggattatgggatgagtagctccccacatgttctaagaaacagggctcagagtggcagtgtccctcagttcaagaaagttgttttccaggaatttactgatggctcctttactcagcccttataccgtggagaactaaatgaacatttgggactcctggggccatatataagagcagaagttgaagataatatcatggtaactttcagaaatcaggcctctcgtccctattccttctattctagccttatttcttatgaggaagatcagaggcaaggagcagaacctagaaaaaactttgtcaagcctaatgaaaccaaaacttacttttggaaagtgcaacatcatatggcacccactaaagatgagtttgactgcaaagcctgggcttatttctctgatgttgacctggaaaaagatgtgcactcaggcctgattggaccccttctggtctgccacactaacacactgaaccctgctcatgggagacaagtgacagtacaggaatttgctctgtttttcaccatctttgatgagaccaaaagctggtacttcactgaaaatatggaaagaaactgcagggctccctgcaatatccagatggaagatcccacttttaaagagaattatcgcttccatgcaatcaatggctacataatggatacactacctggcttagtaatggctcaggatcaaaggattcgatggtatctgctcagcatgggcagcaatgaaaacatccattctattcatttcagtggacatgtgttcactgtacgaaaaaaagaggagtataaaatggcactgtacaatctctatccaggtgtttttgagacagtggaaatgttaccatccaaagctggaatttggcgggtggaatgccttattggcgagcatctacatgctgggatgagcacactttttctggtgtacagcaataagtgtcagactcccctgggaatggcttctggacacattagagattttcagattacagcttcaggacaatatggacagtgggccccaaagctggccagacttcattattccggatcaatcaatgcctggagcaccaaggagcccttttcttggatcaaggtggatctgttggcaccaatgattattcacggcatcaagacccagggtgcccgtcagaagttctccagcctctacatctctcagtttatcatcatgtatagtcttgatgggaagaagtggcagacttatcgaggaaattccactggaaccttaatggtcttctttggcaatgtggattcatctgggataaaacacaatatttttaaccctccaattattgctcgatacatccgtttgcacccaactcattatagcattcgcagcactcttcgcatggagttgatgggctgtgatttaaatagttgcagcatgccattgggaatggagagtaaagcaatatcagatgcacagattactgcttcatcctactttaccaatatgtttgccacctggtctccttcaaaagctcgacttcacctccaagggaggagtaatgcctggagacctcaggtgaataatccaaaagagtggctgcaagtggacttccagaagacaatgaaagtcacaggagtaactactcagggagtaaaatctctgcttaccagcatgtatgtgaaggagttcctcatctccagcagtcaagatggccatcagtggactctcttttttcagaatggcaaagtaaaggtttttcagggaaatcaagactccttcacacctgtggtgaactctctagacccaccgttactgactcgctaccttcgaattcacccccagagttgggtgcaccagattgccctgaggatggaggttctgggctgcgaggcacaggacctctacggcgccggatcacctggggccgaaacggccgaacaaaaactcatctcagaagaggatctgtcacctgcaaccggtcatcatcaccatcaccattga

SEQ ID NO: 725 - protein, 1619 aa, synthetic construct
  REGION 1..1619: note = Description of Artificial Sequence: Synthetic polypeptide
ATRRYYLGAVELSWDYMQSDLGELPVDARFPPGAPTSESATPESGPGSEPATSGSETPGTSESATPESGPGSEPATSGSETPGTSESATPESGPGTSTEPSEGSAPGSPAGSPTSTEEGTSESATPESGPGSEPATSGSETPGTSESATPESGPGSPAGSPTSTEEGSPAGSPTSTEEGASSRVPKSFPFNTSVVYKKTLFVEFTDHLFNIAKPRPPWMGLLGPTIQAEVYDTVVITLKNMASHPVSLHAVGVSYWKASEGAEYDDQTSQREKEDDKVFPGGSHTYVWQVLKENGPMASDPLCLTYSYLSHVDLVKDLNSGLIGALLVCREGSLAKEKTQTLHKFILLFAVFDEGKSWHSETKNSLMQDRDAASARAWPKMHTVNGYVNRSLPGLIGCHRKSVYWHVIGMGTTPEVHSIFLEGHTFLVRNHRQASLEISPITFLTAQTLLMDLGQFLLFCHISSHQHDGMEAYVKVDSCPEEPQLRMKNNEEAEDYDDDLTDSEMDVVRFDDDNSPSFIQIRSVAKKHPKTWVHYIAAEEEDWDYAPLVLAPDDRSYKSQYLNNGPQRIGRKYKKVRFMAYTDETFKTREAIQHESGILGPLLYGEVGDTLLIIFKNQASRPYNIYPHGITDVRPLYSRRLPKGVKHLKDFPILPGEIFKYKWTVTVEDGPTKSDPRCLTRYYSSFVNMERDLASGLIGPLLICYKESVDQRGNQIMSDKRNVILFSVFDENRSWYLTENIQRFLPNPAGVQLEDPEFQASNIMHSINGYVFDSLQLSVCLHEVAYWYILSIGAQTDFLSVFFSGYTFKHKMVYEDTLTLFPFSGETVFMSMENPGLWILGCHNSDFRNRGMTALLKVSSCDKNTGDYYEDSYEDISAYLLSKNNAIEPRSFSQNPPVLKRHQREITRTTLQSDQEEIDYDDTISVEMKKEDFDIYDEDENQSPRSFQKKTRHYFIAAVERLWDYGMSSSPHVLRNRAQSGSVPQFKKVVFQEFTDGSFTQPLYRGELNEHLGLLGPYIRAEVEDNIMVTFRNQASRPYSFYSSLISYEEDQRQGAEPRKNFVKPNETKTYFWKVQHHMAPTKDEFDCKAWAYFSDVDLEKDVHSGLIGPLLVCHTNTLNPAHGRQVTVQEFALFFTIFDETKSWYFTENMERNCRAPCNIQMEDPTFKENYRFHAINGYIMDTLPGLVMAQDQRIRWYLLSMGSNENIHSIHFSGHVFTVRKKEEYKMALYNLYPGVFETVEMLPSKAGIWRVECLIGEHLHAGMSTLFLVYSNKCQTPLGMASGHIRDFQITASGQYGQWAPKLARLHYSGSINAWSTKEPFSWIKVDLLAPMIIHGIKTQGARQKFSSLYISQFIIMYSLDGKKWQTYRGNSTGTLMVFFGNVDSSGIKHNIFNPPIIARYIRLHPTHYSIRSTLRMELMGCDLNSCSMPLGMESKAISDAQITASSYFTNMFATWSPSKARLHLQGRSNAWRPQVNNPKEWLQVDFQKTMKVTGVTTQGVKSLLTSMYVKEFLISSSQDGHQWTLFFQNGKVKVFQGNQDSFTPVVNSLDPPLLTRYLRIHPQSWVHQIALRMEVLGCEAQDLYGAGSPGAETAEQKLISEEDLSPATGHHHHHH

SEQ ID NO: 726 - DNA, 4860 bp, synthetic construct
  misc_feature 1..4860: note = Description of Artificial Sequence: Synthetic polynucleotide
  source 1..4860: mol_type = other DNA
gccaccagaagatactacctgggtgcagtggaactgtcatgggactatatgcaaagtgatctcggtgagctgcctgtggacgcaagatttcctcctggcgcgccaacatcagagagcgccacccctgaaagtggtcccgggagcgagccagccacatctgggtcggaaacgccaggcacaagtgagtctgcaactcccgagtccggacctggctccgagcctgccactagcggctccgagactccgggaacttccgagagcgctacaccagaaagcggacccggaaccagtaccgaacctagcgagggctctgctccgggcagcccagccggctctcctacatccacggaggagggcacttccgaatccgccaccccggagtcagggccaggatctgaacccgctacctcaggcagtgagacgccaggaacgagcgagtccgctacaccggagagtgggccagggagccctgctggatctcctacgtccactgaggaagggtcaccagcgggctcgcccaccagcactgaagaaggtgcctcgagcagagtgccaaaatcttttccattcaacacctcagtcgtgtacaaaaagactctgtttgtagaattcacggatcaccttttcaacatcgctaagccaaggccaccctggatgggtctgctaggtcctaccatccaggctgaggtttatgatacagtggtcattacacttaagaacatggcttcccatcctgtcagtcttcatgctgttggtgtatcctactggaaagcttctgagggagctgaatatgatgatcagaccagtcaaagggagaaagaagatgataaagtcttccctggtggaagccatacatatgtctggcaggtcctgaaagagaatggtccaatggcctctgacccactgtgccttacctactcatatctttctcatgtggacctggtaaaagacttgaattcaggcctcattggagccctactagtatgtagagaagggagtctggccaaggaaaagacacagaccttgcacaaatttatactactttttgctgtatttgatgaagggaaaagttggcactcagaaacaaagaactccttgatgcaggatagggatgctgcatctgctcgggcctggcctaaaatgcacacagtcaatggttatgtaaacaggtctctgccaggtctgattggatgccacaggaaatcagtctattggcatgtgattggaatgggcaccactcctgaagtgcactcaatattcctcgaaggtcacacatttcttgtgaggaaccatcgccaggctagcttggaaatctcgccaataactttccttactgctcaaacactcttgatggaccttggacagtttctactgttttgtcatatctcttcccaccaacatgatggcatggaagcttatgtcaaagtagacagctgtccagaggaaccccaactacgaatgaaaaataatgaagaagcggaagactatgatgatgatcttactgattctgaaatggatgtggtcaggtttgatgatgacaactctccttcctttatccaaattcgctcagttgccaagaagcatcctaaaacttgggtacattacattgctgctgaagaggaggactgggactatgctcccttagtcctcgcccccgatgacagaagttataaaagtcaatatttgaacaatggccctcagcggattggtaggaagtacaaaaaagtccgatttatggcatacacagatgaaacctttaagactcgtgaagctattcagcatgaatcaggaatcttgggacctttactttatggggaagttggagacacactgttgattatatttaagaatcaagcaagcagaccatataacatctaccctcacggaatcactgatgtccgtcctttgtattcaaggagattaccaaaaggtgtaaaacatttgaaggattttccaattctgccaggagaaatattcaaatataaatggacagtgactgtagaagatgggccaactaaatcagatcctcggtgcctgacccgctattactctagtttcgttaatatggagagagatctagcttcaggactcattggccctctcctcatctgctacaaagaatctgtagatcaaagaggaaaccagataatgtcagacaagaggaatgtcatcctgttttctgtatttgatgagaaccgaagctggtacctcacagagaatatacaacgctttctccccaatccagctggagtgcagcttgaggatccagagttccaagcctccaacatcatgcacagcatcaatggctatgtttttgatagtttgcagttgtcagtttgtttgcatgaggtggcatactggtacattctaagcattggagcacagactgacttcctttctgtcttcttctctggatataccttcaaacacaaaatggtctatgaagacacactcaccctattcccattctcaggagaaactgtcttcatgtcgatggaaaacccaggtctatggattctggggtgccacaactcagactttcggaacagaggcatgaccgccttactgaaggtttctagttgtgacaagaacactggtgattattacgaggacagttatgaagatatttcagcatacttgctgagtaaaaacaatgccattgaaccaagaagcttctctcaaaacccaccagtcttgaaacgccatcaacgggaaataactcgtactactcttcagtcagatcaagaggaaatcgattatgatgataccatatcagttgaaatgaagaaggaagattttgacatttatgatgaggatgaaaatcagagcccccgcagctttcaaaagaaaacacgacactattttattgctgcagtggagaggctctgggattatgggatgagtagctccccacatgttctaagaaacagggctcagagtggcagtgtccctcagttcaagaaagttgttttccaggaatttactgatggctcctttactcagcccttataccgtggagaactaaatgaacatttgggactcctggggccatatataagagcagaagttgaagataatatcatggtaactttcagaaatcaggcctctcgtccctattccttctattctagccttatttcttatgaggaagatcagaggcaaggagcagaacctagaaaaaactttgtcaagcctaatgaaaccaaaacttacttttggaaagtgcaacatcatatggcacccactaaagatgagtttgactgcaaagcctgggcttatttctctgatgttgacctggaaaaagatgtgcactcaggcctgattggaccccttctggtctgccacactaacacactgaaccctgctcatgggagacaagtgacagtacaggaatttgctctgtttttcaccatctttgatgagaccaaaagctggtacttcactgaaaatatggaaagaaactgcagggctccctgcaatatccagatggaagatcccacttttaaagagaattatcgcttccatgcaatcaatggctacataatggatacactacctggcttagtaatggctcaggatcaaaggattcgatggtatctgctcagcatgggcagcaatgaaaacatccattctattcatttcagtggacatgtgttcactgtacgaaaaaaagaggagtataaaatggcactgtacaatctctatccaggtgtttttgagacagtggaaatgttaccatccaaagctggaatttggcgggtggaatgccttattggcgagcatctacatgctgggatgagcacactttttctggtgtacagcaataagtgtcagactcccctgggaatggcttctggacacattagagattttcagattacagcttcaggacaatatggacagtgggccccaaagctggccagacttcattattccggatcaatcaatgcctggagcaccaaggagcccttttcttggatcaaggtggatctgttggcaccaatgattattcacggcatcaagacccagggtgcccgtcagaagttctccagcctctacatctctcagtttatcatcatgtatagtcttgatgggaagaagtggcagacttatcgaggaaattccactggaaccttaatggtcttctttggcaatgtggattcatctgggataaaacacaatatttttaaccctccaattattgctcgatacatccgtttgcacccaactcattatagcattcgcagcactcttcgcatggagttgatgggctgtgatttaaatagttgcagcatgccattgggaatggagagtaaagcaatatcagatgcacagattactgcttcatcctactttaccaatatgtttgccacctggtctccttcaaaagctcgacttcacctccaagggaggagtaatgcctggagacctcaggtgaataatccaaaagagtggctgcaagtggacttccagaagacaatgaaagtcacaggagtaactactcagggagtaaaatctctgcttaccagcatgtatgtgaaggagttcctcatctccagcagtcaagatggccatcagtggactctcttttttcagaatggcaaagtaaaggtttttcagggaaatcaagactccttcacacctgtggtgaactctctagacccaccgttactgactcgctaccttcgaattcacccccagagttgggtgcaccagattgccctgaggatggaggttctgggctgcgaggcacaggacctctacggcgccggatcacctggggccgaaacggccgaacaaaaactcatctcagaagaggatctgtcacctgcaaccggtcatcatcaccatcaccattga

SEQ ID NO: 727 - protein, 1619 aa, synthetic construct
  REGION 1..1619: note = Description of Artificial Sequence: Synthetic polypeptide
ATRRYYLGAVELSWDYMQSDLGELPVDARFPPRVPKSFPFNTSVVYKKTLFVEFTDHLFNIAKPRGAPTSESATPESGPGSEPATSGSETPGTSESATPESGPGSEPATSGSETPGTSESATPESGPGTSTEPSEGSAPGSPAGSPTSTEEGTSESATPESGPGSEPATSGSETPGTSESATPESGPGSPAGSPTSTEEGSPAGSPTSTEEGASSPPWMGLLGPTIQAEVYDTVVITLKNMASHPVSLHAVGVSYWKASEGAEYDDQTSQREKEDDKVFPGGSHTYVWQVLKENGPMASDPLCLTYSYLSHVDLVKDLNSGLIGALLVCREGSLAKEKTQTLHKFILLFAVFDEGKSWHSETKNSLMQDRDAASARAWPKMHTVNGYVNRSLPGLIGCHRKSVYWHVIGMGTTPEVHSIFLEGHTFLVRNHRQASLEISPITFLTAQTLLMDLGQFLLFCHISSHQHDGMEAYVKVDSCPEEPQLRMKNNEEAEDYDDDLTDSEMDVVRFDDDNSPSFIQIRSVAKKHPKTWVHYIAAEEEDWDYAPLVLAPDDRSYKSQYLNNGPQRIGRKYKKVRFMAYTDETFKTREAIQHESGILGPLLYGEVGDTLLIIFKNQASRPYNIYPHGITDVRPLYSRRLPKGVKHLKDFPILPGEIFKYKWTVTVEDGPTKSDPRCLTRYYSSFVNMERDLASGLIGPLLICYKESVDQRGNQIMSDKRNVILFSVFDENRSWYLTENIQRFLPNPAGVQLEDPEFQASNIMHSINGYVFDSLQLSVCLHEVAYWYILSIGAQTDFLSVFFSGYTFKHKMVYEDTLTLFPFSGETVFMSMENPGLWILGCHNSDFRNRGMTALLKVSSCDKNTGDYYEDSYEDISAYLLSKNNAIEPRSFSQNPPVLKRHQREITRTTLQSDQEEIDYDDTISVEMKKEDFDIYDEDENQSPRSFQKKTRHYFIAAVERLWDYGMSSSPHVLRNRAQSGSVPQFKKVVFQEFTDGSFTQPLYRGELNEHLGLLGPYIRAEVEDNIMVTFRNQASRPYSFYSSLISYEEDQRQGAEPRKNFVKPNETKTYFWKVQHHMAPTKDEFDCKAWAYFSDVDLEKDVHSGLIGPLLVCHTNTLNPAHGRQVTVQEFALFFTIFDETKSWYFTENMERNCRAPCNIQMEDPTFKENYRFHAINGYIMDTLPGLVMAQDQRIRWYLLSMGSNENIHSIHFSGHVFTVRKKEEYKMALYNLYPGVFETVEMLPSKAGIWRVECLIGEHLHAGMSTLFLVYSNKCQTPLGMASGHIRDFQITASGQYGQWAPKLARLHYSGSINAWSTKEPFSWIKVDLLAPMIIHGIKTQGARQKFSSLYISQFIIMYSLDGKKWQTYRGNSTGTLMVFFGNVDSSGIKHNIFNPPIIARYIRLHPTHYSIRSTLRMELMGCDLNSCSMPLGMESKAISDAQITASSYFTNMFATWSPSKARLHLQGRSNAWRPQVNNPKEWLQVDFQKTMKVTGVTTQGVKSLLTSMYVKEFLISSSQDGHQWTLFFQNGKVKVFQGNQDSFTPVVNSLDPPLLTRYLRIHPQSWVHQIALRMEVLGCEAQDLYGAGSPGAETAEQKLISEEDLSPATGHHHHHH

SEQ ID NO: 728 - DNA, 4860 bp, synthetic construct
  misc_feature 1..4860: note = Description of Artificial Sequence: Synthetic polynucleotide
  source 1..4860: mol_type = other DNA
gccaccagaagatactacctgggtgcagtggaactgtcatgggactatatgcaaagtgatctcggtgagctgcctgtggacgcaagatttcctcctagagtgccaaaatcttttccattcaacacctcagtcgtgtacaaaaagactctgtttgtagaattcacggatcaccttttcaacatcgctaagccaaggggcgcgccaacatcagagagcgccacccctgaaagtggtcccgggagcgagccagccacatctgggtcggaaacgccaggcacaagtgagtctgcaactcccgagtccggacctggctccgagcctgccactagcggctccgagactccgggaacttccgagagcgctacaccagaaagcggacccggaaccagtaccgaacctagcgagggctctgctccgggcagcccagccggctctcctacatccacggaggagggcacttccgaatccgccaccccggagtcagggccaggatctgaacccgctacctcaggcagtgagacgccaggaacgagcgagtccgctacaccggagagtgggccagggagccctgctggatctcctacgtccactgaggaagggtcaccagcgggctcgcccaccagcactgaagaaggtgcctcgagcccaccctggatgggtctgctaggtcctaccatccaggctgaggtttatgatacagtggtcattacacttaagaacatggcttcccatcctgtcagtcttcatgctgttggtgtatcctactggaaagcttctgagggagctgaatatgatgatcagaccagtcaaagggagaaagaagatgataaagtcttccctggtggaagccatacatatgtctggcaggtcctgaaagagaatggtccaatggcctctgacccactgtgccttacctactcatatctttctcatgtggacctggtaaaagacttgaattcaggcctcattggagccctactagtatgtagagaagggagtctggccaaggaaaagacacagaccttgcacaaatttatactactttttgctgtatttgatgaagggaaaagttggcactcagaaacaaagaactccttgatgcaggatagggatgctgcatctgctcgggcctggcctaaaatgcacacagtcaatggttatgtaaacaggtctctgccaggtctgattggatgccacaggaaatcagtctattggcatgtgattggaatgggcaccactcctgaagtgcactcaatattcctcgaaggtcacacatttcttgtgaggaaccatcgccaggctagcttggaaatctcgccaataactttccttactgctcaaacactcttgatggaccttggacagtttctactgttttgtcatatctcttcccaccaacatgatggcatggaagcttatgtcaaagtagacagctgtccagaggaaccccaactacgaatgaaaaataatgaagaagcggaagactatgatgatgatcttactgattctgaaatggatgtggtcaggtttgatgatgacaactctccttcctttatccaaattcgctcagttgccaagaagcatcctaaaacttgggtacattacattgctgctgaagaggaggactgggactatgctcccttagtcctcgcccccgatgacagaagttataaaagtcaatatttgaacaatggccctcagcggattggtaggaagtacaaaaaagtccgatttatggcatacacagatgaaacctttaagactcgtgaagctattcagcatgaatcaggaatcttgggacctttactttatggggaagttggagacacactgttgattatatttaagaatcaagcaagcagaccatataacatctaccctcacggaatcactgatgtccgtcctttgtattcaaggagattaccaaaaggtgtaaaacatttgaaggattttccaattctgccaggagaaatattcaaatataaatggacagtgactgtagaagatgggccaactaaatcagatcctcggtgcctgacccgctattactctagtttcgttaatatggagagagatctagcttcaggactcattggccctctcctcatctgctacaaagaatctgtagatcaaagaggaaaccagataatgtcagacaagaggaatgtcatcctgttttctgtatttgatgagaaccgaagctggtacctcacagagaatatacaacgctttctccccaatccagctggagtgcagcttgaggatccagagttccaagcctccaacatcatgcacagcatcaatggctatgtttttgatagtttgcagttgtcagtttgtttgcatgaggtggcatactggtacattctaagcattggagcacagactgacttcctttctgtcttcttctctggatataccttcaaacacaaaatggtctatgaagacacactcaccctattcccattctcaggagaaactgtcttcatgtcgatggaaaacccaggtctatggattctggggtgccacaactcagactttcggaacagaggcatgaccgccttactgaaggtttctagttgtgacaagaacactggtgattattacgaggacagttatgaagatatttcagcatacttgctgagtaaaaacaatgccattgaaccaagaagcttctctcaaaacccaccagtcttgaaacgccatcaacgggaaataactcgtactactcttcagtcagatcaagaggaaatcgattatgatgataccatatcagttgaaatgaagaaggaagattttgacatttatgatgaggatgaaaatcagagcccccgcagctttcaaaagaaaacacgacactattttattgctgcagtggagaggctctgggattatgggatgagtagctccccacatgttctaagaaacagggctcagagtggcagtgtccctcagttcaagaaagttgttttccaggaatttactgatggctcctttactcagcccttataccgtggagaactaaatgaacatttgggactcctggggccatatataagagcagaagttgaagataatatcatggtaactttcagaaatcaggcctctcgtccctattccttctattctagccttatttcttatgaggaagatcagaggcaaggagcagaacctagaaaaaactttgtcaagcctaatgaaaccaaaacttacttttggaaagtgcaacatcatatggcacccactaaagatgagtttgactgcaaagcctgggcttatttctctgatgttgacctggaaaaagatgtgcactcaggcctgattggaccccttctggtctgccacactaacacactgaaccctgctcatgggagacaagtgacagtacaggaatttgctctgtttttcaccatctttgatgagaccaaaagctggtacttcactgaaaatatggaaagaaactgcagggctccctgcaatatccagatggaagatcccacttttaaagagaattatcgcttccatgcaatcaatggctacataatggatacactacctggcttagtaatggctcaggatcaaaggattcgatggtatctgctcagcatgggcagcaatgaaaacatccattctattcatttcagtggacatgtgttcactgtacgaaaaaaagaggagtataaaatggcactgtacaatctctatccaggtgtttttgagacagtggaaatgttaccatccaaagctggaatttggcgggtggaatgccttattggcgagcatctacatgctgggatgagcacactttttctggtgtacagcaataagtgtcagactcccctgggaatggcttctggacacattagagattttcagattacagcttcaggacaatatggacagtgggccccaaagctggccagacttcattattccggatcaatcaatgcctggagcaccaaggagcccttttcttggatcaaggtggatctgttggcaccaatgattattcacggcatcaagacccagggtgcccgtcagaagttctccagcctctacatctctcagtttatcatcatgtatagtcttgatgggaagaagtggcagacttatcgaggaaattccactggaaccttaatggtcttctttggcaatgtggattcatctgggataaaacacaatatttttaaccctccaattattgctcgatacatccgtttgcacccaactcattatagcattcgcagcactcttcgcatggagttgatgggctgtgatttaaatagttgcagcatgccattgggaatggagagtaaagcaatatcagatgcacagattactgcttcatcctactttaccaatatgtttgccacctggtctccttcaaaagctcgacttcacctccaagggaggagtaatgcctggagacctcaggtgaataatccaaaagagtggctgcaagtggacttccagaagacaatgaaagtcacaggagtaactactcagggagtaaaatctctgcttaccagcatgtatgtgaaggagttcctcatctccagcagtcaagatggccatcagtggactctcttttttcagaatggcaaagtaaaggtttttcagggaaatcaagactccttcacacctgtggtgaactctctagacccaccgttactgactcgctaccttcgaattcacccccagagttgggtgcaccagattgccctgaggatggaggttctgggctgcgaggcacaggacctctacggcgccggatcacctggggccgaaacggccgaacaaaaactcatctcagaagaggatctgtcacctgcaaccggtcatcatcaccatcaccattga

SEQ ID NO: 729 - protein, 1619 aa, synthetic construct
  REGION 1..1619: note = Description of Artificial Sequence: Synthetic polypeptide
ATRRYYLGAVELSWDYMQSDLGELPVDARFPPRVPKSFPFNTSVVYKKTLFVEFTDHLFNIAKPRPPWMGLLGPTIQAEVYGAPTSESATPESGPGSEPATSGSETPGTSESATPESGPGSEPATSGSETPGTSESATPESGPGTSTEPSEGSAPGSPAGSPTSTEEGTSESATPESGPGSEPATSGSETPGTSESATPESGPGSPAGSPTSTEEGSPAGSPTSTEEGASSDTVVITLKNMASHPVSLHAVGVSYWKASEGAEYDDQTSQREKEDDKVFPGGSHTYVWQVLKENGPMASDPLCLTYSYLSHVDLVKDLNSGLIGALLVCREGSLAKEKTQTLHKFILLFAVFDEGKSWHSETKNSLMQDRDAASARAWPKMHTVNGYVNRSLPGLIGCHRKSVYWHVIGMGTTPEVHSIFLEGHTFLVRNHRQASLEISPITFLTAQTLLMDLGQFLLFCHISSHQHDGMEAYVKVDSCPEEPQLRMKNNEEAEDYDDDLTDSEMDVVRFDDDNSPSFIQIRSVAKKHPKTWVHYIAAEEEDWDYAPLVLAPDDRSYKSQYLNNGPQRIGRKYKKVRFMAYTDETFKTREAIQHESGILGPLLYGEVGDTLLIIFKNQASRPYNIYPHGITDVRPLYSRRLPKGVKHLKDFPILPGEIFKYKWTVTVEDGPTKSDPRCLTRYYSSFVNMERDLASGLIGPLLICYKESVDQRGNQIMSDKRNVILFSVFDENRSWYLTENIQRFLPNPAGVQLEDPEFQASNIMHSINGYVFDSLQLSVCLHEVAYWYILSIGAQTDFLSVFFSGYTFKHKMVYEDTLTLFPFSGETVFMSMENPGLWILGCHNSDFRNRGMTALLKVSSCDKNTGDYYEDSYEDISAYLLSKNNAIEPRSFSQNPPVLKRHQREITRTTLQSDQEEIDYDDTISVEMKKEDFDIYDEDENQSPRSFQKKTRHYFIAAVERLWDYGMSSSPHVLRNRAQSGSVPQFKKVVFQEFTDGSFTQPLYRGELNEHLGLLGPYIRAEVEDNIMVTFRNQASRPYSFYSSLISYEEDQRQGAEPRKNFVKPNETKTYFWKVQHHMAPTKDEFDCKAWAYFSDVDLEKDVHSGLIGPLLVCHTNTLNPAHGRQVTVQEFALFFTIFDETKSWYFTENMERNCRAPCNIQMEDPTFKENYRFHAINGYIMDTLPGLVMAQDQRIRWYLLSMGSNENIHSIHFSGHVFTVRKKEEYKMALYNLYPGVFETVEMLPSKAGIWRVECLIGEHLHAGMSTLFLVYSNKCQTPLGMASGHIRDFQITASGQYGQWAPKLARLHYSGSINAWSTKEPFSWIKVDLLAPMIIHGIKTQGARQKFSSLYISQFIIMYSLDGKKWQTYRGNSTGTLMVFFGNVDSSGIKHNIFNPPIIARYIRLHPTHYSIRSTLRMELMGCDLNSCSMPLGMESKAISDAQITASSYFTNMFATWSPSKARLHLQGRSNAWRPQVNNPKEWLQVDFQKTMKVTGVTTQGVKSLLTSMYVKEFLISSSQDGHQWTLFFQNGKVKVFQGNQDSFTPVVNSLDPPLLTRYLRIHPQSWVHQIALRMEVLGCEAQDLYGAGSPGAETAEQKLISEEDLSPATGHHHHHH

SEQ ID NO: 730 - DNA, 4860 bp, synthetic construct
  misc_feature 1..4860: note = Description of Artificial Sequence: Synthetic polynucleotide
  source 1..4860: mol_type = other DNA
gccaccagaagatactacctgggtgcagtggaactgtcatgggactatatgcaaagtgatctcggtgagctgcctgtggacgcaagatttcctcctagagtgccaaaatcttttccattcaacacctcagtcgtgtacaaaaagactctgtttgtagaattcacggatcaccttttcaacatcgctaagccaaggccaccctggatgggtctgctaggtcctaccatccaggctgaggtttatggcgcgccaacatcagagagcgccacccctgaaagtggtcccgggagcgagccagccacatctgggtcggaaacgccaggcacaagtgagtctgcaactcccgagtccggacctggctccgagcctgccactagcggctccgagactccgggaacttccgagagcgctacaccagaaagcggacccggaaccagtaccgaacctagcgagggctctgctccgggcagcccagccggctctcctacatccacggaggagggcacttccgaatccgccaccccggagtcagggccaggatctgaacccgctacctcaggcagtgagacgccaggaacgagcgagtccgctacaccggagagtgggccagggagccctgctggatctcctacgtccactgaggaagggtcaccagcgggctcgcccaccagcactgaagaaggtgcctcgagcgatacagtggtcattacacttaagaacatggcttcccatcctgtcagtcttcatgctgttggtgtatcctactggaaagcttctgagggagctgaatatgatgatcagaccagtcaaagggagaaagaagatgataaagtcttccctggtggaagccatacatatgtctggcaggtcctgaaagagaatggtccaatggcctctgacccactgtgccttacctactcatatctttctcatgtggacctggtaaaagacttgaattcaggcctcattggagccctactagtatgtagagaagggagtctggccaaggaaaagacacagaccttgcacaaatttatactactttttgctgtatttgatgaagggaaaagttggcactcagaaacaaagaactccttgatgcaggatagggatgctgcatctgctcgggcctggcctaaaatgcacacagtcaatggttatgtaaacaggtctctgccaggtctgattggatgccacaggaaatcagtctattggcatgtgattggaatgggcaccactcctgaagtgcactcaatattcctcgaaggtcacacatttcttgtgaggaaccatcgccaggctagcttggaaatctcgccaataactttccttactgctcaaacactcttgatggaccttggacagtttctactgttttgtcatatctcttcccaccaacatgatggcatggaagcttatgtcaaagtagacagctgtccagaggaaccccaactacgaatgaaaaataatgaagaagcggaagactatgatgatgatcttactgattctgaaatggatgtggtcaggtttgatgatgacaactctccttcctttatccaaattcgctcagttgccaagaagcatcctaaaacttgggtacattacattgctgctgaagaggaggactgggactatgctcccttagtcctcgcccccgatgacagaagttataaaagtcaatatttgaacaatggccctcagcggattggtaggaagtacaaaaaagtccgatttatggcatacacagatgaaacctttaagactcgtgaagctattcagcatgaatcaggaatcttgggacctttactttatggggaagttggagacacactgttgattatatttaagaatcaagcaagcagaccatataacatctaccctcacggaatcactgatgtccgtcctttgtattcaaggagattaccaaaaggtgtaaaacatttgaaggattttccaattctgccaggagaaatattcaaatataaatggacagtgactgtagaagatgggccaactaaatcagatcctcggtgcctgacccgctattactctagtttcgttaatatggagagagatctagcttcaggactcattggccctctcctcatctgctacaaagaatctgtagatcaaagaggaaaccagataatgtcagacaagaggaatgtcatcctgttttctgtatttgatgagaaccgaagctggtacctcacagagaatatacaacgctttctccccaatccagctggagtgcagcttgaggatccagagttccaagcctccaacatcatgcacagcatcaatggctatgtttttgatagtttgcagttgtcagtttgtttgcatgaggtggcatactggtacattctaagcattggagcacagactgacttcctttctgtcttcttctctggatataccttcaaacacaaaatggtctatgaagacacactcaccctattcccattctcaggagaaactgtcttcatgtcgatggaaaacccaggtctatggattctggggtgccacaactcagactttcggaacagaggcatgaccgccttactgaaggtttctagttgtgacaagaacactggtgattattacgaggacagttatgaagatatttcagcatacttgctgagtaaaaacaatgccattgaaccaagaagcttctctcaaaacccaccagtcttgaaacgccatcaacgggaaataactcgtactactcttcagtcagatcaagaggaaatcgattatgatgataccatatcagttgaaatgaagaaggaagattttgacatttatgatgaggatgaaaatcagagcccccgcagctttcaaaagaaaacacgacactattttattgctgcagtggagaggctctgggattatgggatgagtagctccccacatgttctaagaaacagggctcagagtggcagtgtccctcagttcaagaaagttgttttccaggaatttactgatggctcctttactcagcccttataccgtggagaactaaatgaacatttgggactcctggggccatatataagagcagaagttgaagataatatcatggtaactttcagaaatcaggcctctcgtccctattccttctattctagccttatttcttatgaggaagatcagaggcaaggagcagaacctagaaaaaactttgtcaagcctaatgaaaccaaaacttacttttggaaagtgcaacatcatatggcacccactaaagatgagtttgactgcaaagcctgggcttatttctctgatgttgacctggaaaaagatgtgcactcaggcctgattggaccccttctggtctgccacactaacacactgaaccctgctcatgggagacaagtgacagtacaggaatttgctctgtttttcaccatctttgatgagaccaaaagctggtacttcactgaaaatatggaaagaaactgcagggctccctgcaatatccagatggaagatcccacttttaaagagaattatcgcttccatgcaatcaatggctacataatggatacactacctggcttagtaatggctcaggatcaaaggattcgatggtatctgctcagcatgggcagcaatgaaaacatccattctattcatttcagtggacatgtgttcactgtacgaaaaaaagaggagtataaaatggcactgtacaatctctatccaggtgtttttgagacagtggaaatgttaccatccaaagctggaatttggcgggtggaatgccttattggcgagcatctacatgctgggatgagcacactttttctggtgtacagcaataagtgtcagactcccctgggaatggcttctggacacattagagattttcagattacagcttcaggacaatatggacagtgggccccaaagctggccagacttcattattccggatcaatcaatgcctggagcaccaaggagcccttttcttggatcaaggtggatctgttggcaccaatgattattcacggcatcaagacccagggtgcccgtcagaagttctccagcctctacatctctcagtttatcatcatgtatagtcttgatgggaagaagtggcagacttatcgaggaaattccactggaaccttaatggtcttctttggcaatgtggattcatctgggataaaacacaatatttttaaccctccaattattgctcgatacatccgtttgcacccaactcattatagcattcgcagcactcttcgcatggagttgatgggctgtgatttaaatagttgcagcatgccattgggaatggagagtaaagcaatatcagatgcacagattactgcttcatcctactttaccaatatgtttgccacctggtctccttcaaaagctcgacttcacctccaagggaggagtaatgcctggagacctcaggtgaataatccaaaagagtggctgcaagtggacttccagaagacaatgaaagtcacaggagtaactactcagggagtaaaatctctgcttaccagcatgtatgtgaaggagttcctcatctccagcagtcaagatggccatcagtggactctcttttttcagaatggcaaagtaaaggtttttcagggaaatcaagactccttcacacctgtggtgaactctctagacccaccgttactgactcgctaccttcgaattcacccccagagttgggtgcaccagattgccctgaggatggaggttctgggctgcgaggcacaggacctctacggcgccggatcacctggggccgaaacggccgaacaaaaactcatctcagaagaggatctgtcacctgcaaccggtcatcatcaccatcaccattga

SEQ ID NO: 731 - protein, 1619 aa, synthetic construct
  REGION 1..1619: note = Description of Artificial Sequence: Synthetic polypeptide
ATRRYYLGAVELSWDYMQSDLGELPVDARFPPRVPKSFPFNTSVVYKKTLFVEFTDHLFNIAKPRPPWMGLLGPTIQAEVYDTVVITLKNMASHPVSLHAVGVSYWKASEGAEYDDQTSGAPGSSPSASTGTGPGSSPSASTGTGPGASPGTSSTGSPGASPGTSSTGSPGSSTPSGATGSPGSSPSASTGTGPGASPGTSSTGSPGSSPSASTGTGPGTPGSGTASSSPGSSTPSGATGSPGSSTPSGATGSPGASPGTSSTGSPASSQREKEDDKVFPGGSHTYVWQVLKENGPMASDPLCLTYSYLSHVDLVKDLNSGLIGALLVCREGSLAKEKTQTLHKFILLFAVFDEGKSWHSETKNSLMQDRDAASARAWPKMHTVNGYVNRSLPGLIGCHRKSVYWHVIGMGTTPEVHSIFLEGHTFLVRNHRQASLEISPITFLTAQTLLMDLGQFLLFCHISSHQHDGMEAYVKVDSCPEEPQLRMKNNEEAEDYDDDLTDSEMDVVRFDDDNSPSFIQIRSVAKKHPKTWVHYIAAEEEDWDYAPLVLAPDDRSYKSQYLNNGPQRIGRKYKKVRFMAYTDETFKTREAIQHESGILGPLLYGEVGDTLLIIFKNQASRPYNIYPHGITDVRPLYSRRLPKGVKHLKDFPILPGEIFKYKWTVTVEDGPTKSDPRCLTRYYSSFVNMERDLASGLIGPLLICYKESVDQRGNQIMSDKRNVILFSVFDENRSWYLTENIQRFLPNPAGVQLEDPEFQASNIMHSINGYVFDSLQLSVCLHEVAYWYILSIGAQTDFLSVFFSGYTFKHKMVYEDTLTLFPFSGETVFMSMENPGLWILGCHNSDFRNRGMTALLKVSSCDKNTGDYYEDSYEDISAYLLSKNNAIEPRSFSQNPPVLKRHQREITRTTLQSDQEEIDYDDTISVEMKKEDFDIYDEDENQSPRSFQKKTRHYFIAAVERLWDYGMSSSPHVLRNRAQSGSVPQFKKVVFQEFTDGSFTQPLYRGELNEHLGLLGPYIRAEVEDNIMVTFRNQASRPYSFYSSLISYEEDQRQGAEPRKNFVKPNETKTYFWKVQHHMAPTKDEFDCKAWAYFSDVDLEKDVHSGLIGPLLVCHTNTLNPAHGRQVTVQEFALFFTIFDETKSWYFTENMERNCRAPCNIQMEDPTFKENYRFHAINGYIMDTLPGLVMAQDQRIRWYLLSMGSNENIHSIHFSGHVFTVRKKEEYKMALYNLYPGVFETVEMLPSKAGIWRVECLIGEHLHAGMSTLFLVYSNKCQTPLGMASGHIRDFQITASGQYGQWAPKLARLHYSGSINAWSTKEPFSWIKVDLLAPMIIHGIKTQGARQKFSSLYISQFIIMYSLDGKKWQTYRGNSTGTLMVFFGNVDSSGIKHNIFNPPIIARYIRLHPTHYSIRSTLRMELMGCDLNSCSMPLGMESKAISDAQITASSYFTNMFATWSPSKARLHLQGRSNAWRPQVNNPKEWLQVDFQKTMKVTGVTTQGVKSLLTSMYVKEFLISSSQDGHQWTLFFQNGKVKVFQGNQDSFTPVVNSLDPPLLTRYLRIHPQSWVHQIALRMEVLGCEAQDLYGAGSPGAETAEQKLISEEDLSPATGHHHHHH

SEQ ID NO: 732 - DNA, 4860 bp, synthetic construct
  misc_feature 1..4860: note = Description of Artificial Sequence: Synthetic polynucleotide
  source 1..4860: mol_type = other DNA
gccaccagaagatactacctgggtgcagtggaactgtcatgggactatatgcaaagtgatctcggtgagctgcctgtggacgcaagatttcctcctagagtgccaaaatcttttccattcaacacctcagtcgtgtacaaaaagactctgtttgtagaattcacggatcaccttttcaacatcgctaagccaaggccaccctggatgggtctgctaggtcctaccatccaggctgaggtttatgatacagtggtcattacacttaagaacatggcttcccatcctgtcagtcttcatgctgttggtgtatcctactggaaagcttctgagggagctgaatatgatgatcagaccagtggcgcgccaggctccagcccctccgcgagcacgggaaccggaccaggttcgtcaccctcagcatcaacggggacgggaccgggggcgtcaccaggaacgtcctccaccggctcgccgggtgcatcacccggaacgtcatcgaccggatcgccagggagctcgacgccatcaggcgcaacaggatcacctggctcaagccctagcgcgtcaaccggcacgggtccgggtgcctcccctggcacgtccagcaccggatcacccggatcgagcccatccgcctcaaccggaaccggacccggtacaccagggtcgggaacagcctcctcgtcaccaggctcctcaaccccctcgggagccacgggttcgcccggttcgtcaacgccttccggagcaactggtagccccggagcatcgccaggaacttcgagcacggggtcgcccgcctcgagccaaagggagaaagaagatgataaagtcttccctggtggaagccatacatatgtctggcaggtcctgaaagagaatggtccaatggcctctgacccactgtgccttacctactcatatctttctcatgtggacctggtaaaagacttgaattcaggcctcattggagccctactagtatgtagagaagggagtctggccaaggaaaagacacagaccttgcacaaatttatactactttttgctgtatttgatgaagggaaaagttggcactcagaaacaaagaactccttgatgcaggatagggatgctgcatctgctcgggcctggcctaaaatgcacacagtcaatggttatgtaaacaggtctctgccaggtctgattggatgccacaggaaatcagtctattggcatgtgattggaatgggcaccactcctgaagtgcactcaatattcctcgaaggtcacacatttcttgtgaggaaccatcgccaggctagcttggaaatctcgccaataactttccttactgctcaaacactcttgatggaccttggacagtttctactgttttgtcatatctcttcccaccaacatgatggcatggaagcttatgtcaaagtagacagctgtccagaggaaccccaactacgaatgaaaaataatgaagaagcggaagactatgatgatgatcttactgattctgaaatggatgtggtcaggtttgatgatgacaactctccttcctttatccaaattcgctcagttgccaagaagcatcctaaaacttgggtacattacattgctgctgaagaggaggactgggactatgctcccttagtcctcgcccccgatgacagaagttataaaagtcaatatttgaacaatggccctcagcggattggtaggaagtacaaaaaagtccgatttatggcatacacagatgaaacctttaagactcgtgaagctattcagcatgaatcaggaatcttgggacctttactttatggggaagttggagacacactgttgattatatttaagaatcaagcaagcagaccatataacatctaccctcacggaatcactgatgtccgtcctttgtattcaaggagattaccaaaaggtgtaaaacatttgaaggattttccaattctgccaggagaaatattcaaatataaatggacagtgactgtagaagatgggccaactaaatcagatcctcggtgcctgacccgctattactctagtttcgttaatatggagagagatctagcttcaggactcattggccctctcctcatctgctacaaagaatctgtagatcaaagaggaaaccagataatgtcagacaagaggaatgtcatcctgttttctgtatttgatgagaaccgaagctggtacctcacagagaatatacaacgctttctccccaatccagctggagtgcagcttgaggatccagagttccaagcctccaacatcatgcacagcatcaatggctatgtttttgatagtttgcagttgtcagtttgtttgcatgaggtggcatactggtacattctaagcattggagcacagactgacttcctttctgtcttcttctctggatataccttcaaacacaaaatggtctatgaagacacactcaccctattcccattctcaggagaaactgtcttcatgtcgatggaaaacccaggtctatggattctggggtgccacaactcagactttcggaacagaggcatgaccgccttactgaaggtttctagttgtgacaagaacactggtgattattacgaggacagttatgaagatatttcagcatacttgctgagtaaaaacaatgccattgaaccaagaagcttctctcaaaacccaccagtcttgaaacgccatcaacgggaaataactcgtactactcttcagtcagatcaagaggaaatcgattatgatgataccatatcagttgaaatgaagaaggaagattttgacatttatgatgaggatgaaaatcagagcccccgcagctttcaaaagaaaacacgacactattttattgctgcagtggagaggctctgggattatgggatgagtagctccccacatgttctaagaaacagggctcagagtggcagtgtccctcagttcaagaaagttgttttccaggaatttactgatggctcctttactcagcccttataccgtggagaactaaatgaacatttgggactcctggggccatatataagagcagaagttgaagataatatcatggtaactttcagaaatcaggcctctcgtccctattccttctattctagccttatttcttatgaggaagatcagaggcaaggagcagaacctagaaaaaactttgtcaagcctaatgaaaccaaaacttacttttggaaagtgcaacatcatatggcacccactaaagatgagtttgactgcaaagcctgggcttatttctctgatgttgacctggaaaaagatgtgcactcaggcctgattggaccccttctggtctgccacactaacacactgaaccctgctcatgggagacaagtgacagtacaggaatttgctctgtttttcaccatctttgatgagaccaaaagctggtacttcactgaaaatatggaaagaaactgcagggctccctgcaatatccagatggaagatcccacttttaaagagaattatcgcttccatgcaatcaatggctacataatggatacactacctggcttagtaatggctcaggatcaaaggattcgatggtatctgctcagcatgggcagcaatgaaaacatccattctattcatttcagtggacatgtgttcactgtacgaaaaaaagaggagtataaaatggcactgtacaatctctatccaggtgtttttgagacagtggaaatgttaccatccaaagctggaatttggcgggtggaatgccttattggcgagcatctacatgctgggatgagcacactttttctggtgtacagcaataagtgtcagactcccctgggaatggcttctggacacattagagattttcagattacagcttcaggacaatatggacagtgggccccaaagctggccagacttcattattccggatcaatcaatgcctggagcaccaaggagcccttttcttggatcaaggtggatctgttggcaccaatgattattcacggcatcaagacccagggtgcccgtcagaagttctccagcctctacatctctcagtttatcatcatgtatagtcttgatgggaagaagtggcagacttatcgaggaaattccactggaaccttaatggtcttctttggcaatgtggattcatctgggataaaacacaatatttttaaccctccaattattgctcgatacatccgtttgcacccaactcattatagcattcgcagcactcttcgcatggagttgatgggctgtgatttaaatagttgcagcatgccattgggaatggagagtaaagcaatatcagatgcacagattactgcttcatcctactttaccaatatgtttgccacctggtctccttcaaaagctcgacttcacctccaagggaggagtaatgcctggagacctcaggtgaataatccaaaagagtggctgcaagtggacttccagaagacaatgaaagtcacaggagtaactactcagggagtaaaatctctgcttaccagcatgtatgtgaaggagttcctcatctccagcagtcaagatggccatcagtggactctcttttttcagaatggcaaagtaaaggtttttcagggaaatcaagactccttcacacctgtggtgaactctctagacccaccgttactgactcgctaccttcgaattcacccccagagttgggtgcaccagattgccctgaggatggaggttctgggctgcgaggcacaggacctctacggcgccggatcacctggggccgaaacggccgaacaaaaactcatctcagaagaggatctgtcacctgcaaccggtcatcatcaccatcaccattga

SEQ ID NO: 733 - protein, 1619 aa, synthetic construct
  REGION 1..1619: note = Description of Artificial Sequence: Synthetic polypeptide
ATRRYYLGAVELSWDYMQSDLGELPVDARFPPRVPKSFPFNTSVVYKKTLFVEFTDHLFNIAKPRPPWMGLLGPTIQAEVYDTVVITLKNMASHPVSLHAVGVSYWKASEGAEYDDQTSQREKEDDKVFPGGSHTYVWQVLKENGPMASDPLCLTYSYLSHVDLVKDLNSGLIGALLVCREGSLAKEKTQTLHKFILLFAVFDEGKSWHSEGAPGSSPSASTGTGPGSSPSASTGTGPGASPGTSSTGSPGASPGTSSTGSPGSSTPSGATGSPGSSPSASTGTGPGASPGTSSTGSPGSSPSASTGTGPGTPGSGTASSSPGSSTPSGATGSPGSSTPSGATGSPGASPGTSSTGSPASSTKNSLMQDRDAASARAWPKMHTVNGYVNRSLPGLIGCHRKSVYWHVIGMGTTPEVHSIFLEGHTFLVRNHRQASLEISPITFLTAQTLLMDLGQFLLFCHISSHQHDGMEAYVKVDSCPEEPQLRMKNNEEAEDYDDDLTDSEMDVVRFDDDNSPSFIQIRSVAKKHPKTWVHYIAAEEEDWDYAPLVLAPDDRSYKSQYLNNGPQRIGRKYKKVRFMAYTDETFKTREAIQHESGILGPLLYGEVGDTLLIIFKNQASRPYNIYPHGITDVRPLYSRRLPKGVKHLKDFPILPGEIFKYKWTVTVEDGPTKSDPRCLTRYYSSFVNMERDLASGLIGPLLICYKESVDQRGNQIMSDKRNVILFSVFDENRSWYLTENIQRFLPNPAGVQLEDPEFQASNIMHSINGYVFDSLQLSVCLHEVAYWYILSIGAQTDFLSVFFSGYTFKHKMVYEDTLTLFPFSGETVFMSMENPGLWILGCHNSDFRNRGMTALLKVSSCDKNTGDYYEDSYEDISAYLLSKNNAIEPRSFSQNPPVLKRHQREITRTTLQSDQEEIDYDDTISVEMKKEDFDIYDEDENQSPRSFQKKTRHYFIAAVERLWDYGMSSSPHVLRNRAQSGSVPQFKKVVFQEFTDGSFTQPLYRGELNEHLGLLGPYIRAEVEDNIMVTFRNQASRPYSFYSSLISYEEDQRQGAEPRKNFVKPNETKTYFWKVQHHMAPTKDEFDCKAWAYFSDVDLEKDVHSGLIGPLLVCHTNTLNPAHGRQVTVQEFALFFTIFDETKSWYFTENMERNCRAPCNIQMEDPTFKENYRFHAINGYIMDTLPGLVMAQDQRIRWYLLSMGSNENIHSIHFSGHVFTVRKKEEYKMALYNLYPGVFETVEMLPSKAGIWRVECLIGEHLHAGMSTLFLVYSNKCQTPLGMASGHIRDFQITASGQYGQWAPKLARLHYSGSINAWSTKEPFSWIKVDLLAPMIIHGIKTQGARQKFSSLYISQFIIMYSLDGKKWQTYRGNSTGTLMVFFGNVDSSGIKHNIFNPPIIARYIRLHPTHYSIRSTLRMELMGCDLNSCSMPLGMESKAISDAQITASSYFTNMFATWSPSKARLHLQGRSNAWRPQVNNPKEWLQVDFQKTMKVTGVTTQGVKSLLTSMYVKEFLISSSQDGHQWTLFFQNGKVKVFQGNQDSFTPVVNSLDPPLLTRYLRIHPQSWVHQIALRMEVLGCEAQDLYGAGSPGAETAEQKLISEEDLSPATGHHHHHH

SEQ ID NO: 734 - DNA, 4860 bp, synthetic construct
  misc_feature 1..4860: note = Description of Artificial Sequence: Synthetic polynucleotide
  source 1..4860: mol_type = other DNA
gccaccagaagatactacctgggtgcagtggaactgtcatgggactatatgcaaagtgatctcggtgagctgcctgtggacgcaagatttcctcctagagtgccaaaatcttttccattcaacacctcagtcgtgtacaaaaagactctgtttgtagaattcacggatcaccttttcaacatcgctaagccaaggccaccctggatgggtctgctaggtcctaccatccaggctgaggtttatgatacagtggtcattacacttaagaacatggcttcccatcctgtcagtcttcatgctgttggtgtatcctactggaaagcttctgagggagctgaatatgatgatcagaccagtcaaagggagaaagaagatgataaagtcttccctggtggaagccatacatatgtctggcaggtcctgaaagagaatggtccaatggcctctgacccactgtgccttacctactcatatctttctcatgtggacctggtaaaagacttgaattcaggcctcattggagccctactagtatgtagagaagggagtctggccaaggaaaagacacagaccttgcacaaatttatactactttttgctgtatttgatgaagggaaaagttggcactcagaaggcgcgccaggctccagcccctccgcgagcacgggaaccggaccaggttcgtcaccctcagcatcaacggggacgggaccgggggcgtcaccaggaacgtcctccaccggctcgccgggtgcatcacccggaacgtcatcgaccggatcgccagggagctcgacgccatcaggcgcaacaggatcacctggctcaagccctagcgcgtcaaccggcacgggtccgggtgcctcccctggcacgtccagcaccggatcacccggatcgagcccatccgcctcaaccggaaccggacccggtacaccagggtcgggaacagcctcctcgtcaccaggctcctcaaccccctcgggagccacgggttcgcccggttcgtcaacgccttccggagcaactggtagccccggagcatcgccaggaacttcgagcacggggtcgcccgcctcgagcacaaagaactccttgatgcaggatagggatgctgcatctgctcgggcctggcctaaaatgcacacagtcaatggttatgtaaacaggtctctgccaggtctgattggatgccacaggaaatcagtctattggcatgtgattggaatgggcaccactcctgaagtgcactcaatattcctcgaaggtcacacatttcttgtgaggaaccatcgccaggctagcttggaaatctcgccaataactttccttactgctcaaacactcttgatggaccttggacagtttctactgttttgtcatatctcttcccaccaacatgatggcatggaagcttatgtcaaagtagacagctgtccagaggaaccccaactacgaatgaaaaataatgaagaagcggaagactatgatgatgatcttactgattctgaaatggatgtggtcaggtttgatgatgacaactctccttcctttatccaaattcgctcagttgccaagaagcatcctaaaacttgggtacattacattgctgctgaagaggaggactgggactatgctcccttagtcctcgcccccgatgacagaagttataaaagtcaatatttgaacaatggccctcagcggattggtaggaagtacaaaaaagtccgatttatggcatacacagatgaaacctttaagactcgtgaagctattcagcatgaatcaggaatcttgggacctttactttatggggaagttggagacacactgttgattatatttaagaatcaagcaagcagaccatataacatctaccctcacggaatcactgatgtccgtcctttgtattcaaggagattaccaaaaggtgtaaaacatttgaaggattttccaattctgccaggagaaatattcaaatataaatggacagtgactgtagaagatgggccaactaaatcagatcctcggtgcctgacccgctattactctagtttcgttaatatggagagagatctagcttcaggactcattggccctctcctcatctgctacaaagaatctgtagatcaaagaggaaaccagataatgtcagacaagaggaatgtcatcctgttttctgtatttgatgagaaccgaagctggtacctcacagagaatatacaacgctttctccccaatccagctggagtgcagcttgaggatccagagttccaagcctccaacatcatgcacagcatcaatggctatgtttttgatagtttgcagttgtcagtttgtttgcatgaggtggcatactggtacattctaagcattggagcacagactgacttcctttctgtcttcttctctggatataccttcaaacacaaaatggtctatgaagacacactcaccctattcccattctcaggagaaactgtcttcatgtcgatggaaaacccaggtctatggattctggggtgccacaactcagactttcggaacagaggcatgaccgccttactgaaggtttctagttgtgacaagaacactggtgattattacgaggacagttatgaagatatttcagcatacttgctgagtaaaaacaatgccattgaaccaagaagcttctctcaaaacccaccagtcttgaaacgccatcaacgggaaataactcgtactactcttcagtcagatcaagaggaaatcgattatgatgataccatatcagttgaaatgaagaaggaagattttgacatttatgatgaggatgaaaatcagagcccccgcagctttcaaaagaaaacacgacactattttattgctgcagtggagaggctctgggattatgggatgagtagctccccacatgttctaagaaacagggctcagagtggcagtgtccctcagttcaagaaagttgttttccaggaatttactgatggctcctttactcagcccttataccgtggagaactaaatgaacatttgggactcctggggccatatataagagcagaagttgaagataatatcatggtaactttcagaaatcaggcctctcgtccctattccttctattctagccttatttcttatgaggaagatcagaggcaaggagcagaacctagaaaaaactttgtcaagcctaatgaaaccaaaacttacttttggaaagtgcaacatcatatggcacccactaaagatgagtttgactgcaaagcctgggcttatttctctgatgttgacctggaaaaagatgtgcactcaggcctgattggaccccttctggtctgccacactaacacactgaaccctgctcatgggagacaagtgacagtacaggaatttgctctgtttttcaccatctttgatgagaccaaaagctggtacttcactgaaaatatggaaagaaactgcagggctccctgcaatatccagatggaagatcccacttttaaagagaattatcgcttccatgcaatcaatggctacataatggatacactacctggcttagtaatggctcaggatcaaaggattcgatggtatctgctcagcatgggcagcaatgaaaacatccattctattcatttcagtggacatgtgttcactgtacgaaaaaaagaggagtataaaatggcactgtacaatctctatccaggtgtttttgagacagtggaaatgttaccatccaaagctggaatttggcgggtggaatgccttattggcgagcatctacatgctgggatgagcacactttttctggtgtacagcaataagtgtcagactcccctgggaatggcttctggacacattagagattttcagattacagcttcaggacaatatggacagtgggccccaaagctggccagacttcattattccggatcaatcaatgcctggagcaccaaggagcccttttcttggatcaaggtggatctgttggcaccaatgattattcacggcatcaagacccagggtgcccgtcagaagttctccagcctctacatctctcagtttatcatcatgtatagtcttgatgggaagaagtggcagacttatcgaggaaattccactggaaccttaatggtcttctttggcaatgtggattcatctgggataaaacacaatatttttaaccctccaattattgctcgatacatccgtttgcacccaactcattatagcattcgcagcactcttcgcatggagttgatgggctgtgatttaaatagttgcagcatgccattgggaatggagagtaaagcaatatcagatgcacagattactgcttcatcctactttaccaatatgtttgccacctggtctccttcaaaagctcgacttcacctccaagggaggagtaatgcctggagacctcaggtgaataatccaaaagagtggctgcaagtggacttccagaagacaatgaaagtcacaggagtaactactcagggagtaaaatctctgcttaccagcatgtatgtgaaggagttcctcatctccagcagtcaagatggccatcagtggactctcttttttcagaatggcaaagtaaaggtttttcagggaaatcaagactccttcacacctgtggtgaactctctagacccaccgttactgactcgctaccttcgaattcacccccagagttgggtgcaccagattgccctgaggatggaggttctgggctgcgaggcacaggacctctacggcgccggatcacctggggccgaaacggccgaacaaaaactcatctcagaagaggatctgtcacctgcaaccggtcatcatcaccatcaccattga

SEQ ID NO: 735 - protein, 1619 aa, synthetic construct
  REGION 1..1619: note = Description of Artificial Sequence: Synthetic polypeptide
ATRRYYLGAVELSWDYMQSDLGELPVDARFPPRVPKSFPFNTSVVYKKTLFVEFTDHLFNIAKPRPPWMGLLGPTIQAEVYDTVVITLKNMASHPVSLHAVGVSYWKASEGAEYDDQTSQREKEDDKVFPGGSHTYVWQVLKENGPMASDPLCLTYSYLSHVDLVKDLNSGLIGALLVCREGSLAKEKTQTLHKFILLFAVFDEGKSWHSETKNSLMQDRGAPGSSPSASTGTGPGSSPSASTGTGPGASPGTSSTGSPGASPGTSSTGSPGSSTPSGATGSPGSSPSASTGTGPGASPGTSSTGSPGSSPSASTGTGPGTPGSGTASSSPGSSTPSGATGSPGSSTPSGATGSPGASPGTSSTGSPASSDAASARAWPKMHTVNGYVNRSLPGLIGCHRKSVYWHVIGMGTTPEVHSIFLEGHTFLVRNHRQASLEISPITFLTAQTLLMDLGQFLLFCHISSHQHDGMEAYVKVDSCPEEPQLRMKNNEEAEDYDDDLTDSEMDVVRFDDDNSPSFIQIRSVAKKHPKTWVHYIAAEEEDWDYAPLVLAPDDRSYKSQYLNNGPQRIGRKYKKVRFMAYTDETFKTREAIQHESGILGPLLYGEVGDTLLIIFKNQASRPYNIYPHGITDVRPLYSRRLPKGVKHLKDFPILPGEIFKYKWTVTVEDGPTKSDPRCLTRYYSSFVNMERDLASGLIGPLLICYKESVDQRGNQIMSDKRNVILFSVFDENRSWYLTENIQRFLPNPAGVQLEDPEFQASNIMHSINGYVFDSLQLSVCLHEVAYWYILSIGAQTDFLSVFFSGYTFKHKMVYEDTLTLFPFSGETVFMSMENPGLWILGCHNSDFRNRGMTALLKVSSCDKNTGDYYEDSYEDISAYLLSKNNAIEPRSFSQNPPVLKRHQREITRTTLQSDQEEIDYDDTISVEMKKEDFDIYDEDENQSPRSFQKKTRHYFIAAVERLWDYGMSSSPHVLRNRAQSGSVPQFKKVVFQEFTDGSFTQPLYRGELNEHLGLLGPYIRAEVEDNIMVTFRNQASRPYSFYSSLISYEEDQRQGAEPRKNFVKPNETKTYFWKVQHHMAPTKDEFDCKAWAYFSDVDLEKDVHSGLIGPLLVCHTNTLNPAHGRQVTVQEFALFFTIFDETKSWYFTENMERNCRAPCNIQMEDPTFKENYRFHAINGYIMDTLPGLVMAQDQRIRWYLLSMGSNENIHSIHFSGHVFTVRKKEEYKMALYNLYPGVFETVEMLPSKAGIWRVECLIGEHLHAGMSTLFLVYSNKCQTPLGMASGHIRDFQITASGQYGQWAPKLARLHYSGSINAWSTKEPFSWIKVDLLAPMIIHGIKTQGARQKFSSLYISQFIIMYSLDGKKWQTYRGNSTGTLMVFFGNVDSSGIKHNIFNPPIIARYIRLHPTHYSIRSTLRMELMGCDLNSCSMPLGMESKAISDAQITASSYFTNMFATWSPSKARLHLQGRSNAWRPQVNNPKEWLQVDFQKTMKVTGVTTQGVKSLLTSMYVKEFLISSSQDGHQWTLFFQNGKVKVFQGNQDSFTPVVNSLDPPLLTRYLRIHPQSWVHQIALRMEVLGCEAQDLYGAGSPGAETAEQKLISEEDLSPATGHHHHHH

SEQ ID NO: 736 - DNA, 4860 bp, synthetic construct
  misc_feature 1..4860: note = Description of Artificial Sequence: Synthetic polynucleotide
  source 1..4860: mol_type = other DNA
gccaccagaagatactacctgggtgcagtggaactgtcatgggactatatgcaaagtgatctcggtgagctgcctgtggacgcaagatttcctcctagagtgccaaaatcttttccattcaacacctcagtcgtgtacaaaaagactctgtttgtagaattcacggatcaccttttcaacatcgctaagccaaggccaccctggatgggtctgctaggtcctaccatccaggctgaggtttatgatacagtggtcattacacttaagaacatggcttcccatcctgtcagtcttcatgctgttggtgtatcctactggaaagcttctgagggagctgaatatgatgatcagaccagtcaaagggagaaagaagatgataaagtcttccctggtggaagccatacatatgtctggcaggtcctgaaagagaatggtccaatggcctctgacccactgtgccttacctactcatatctttctcatgtggacctggtaaaagacttgaattcaggcctcattggagccctactagtatgtagagaagggagtctggccaaggaaaagacacagaccttgcacaaatttatactactttttgctgtatttgatgaagggaaaagttggcactcagaaacaaagaactccttgatgcaggataggggcgcgccaggctccagcccctccgcgagcacgggaaccggaccaggttcgtcaccctcagcatcaacggggacgggaccgggggcgtcaccaggaacgtcctccaccggctcgccgggtgcatcacccggaacgtcatcgaccggatcgccagggagctcgacgccatcaggcgcaacaggatcacctggctcaagccctagcgcgtcaaccggcacgggtccgggtgcctcccctggcacgtccagcaccggatcacccggatcgagcccatccgcctcaaccggaaccggacccggtacaccagggtcgggaacagcctcctcgtcaccaggctcctcaaccccctcgggagccacgggttcgcccggttcgtcaacgccttccggagcaactggtagccccggagcatcgccaggaacttcgagcacggggtcgcccgcctcgagcgatgctgcatctgctcgggcctggcctaaaatgcacacagtcaatggttatgtaaacaggtctctgccaggtctgattggatgccacaggaaatcagtctattggcatgtgattggaatgggcaccactcctgaagtgcactcaatattcctcgaaggtcacacatttcttgtgaggaaccatcgccaggctagcttggaaatctcgccaataactttccttactgctcaaacactcttgatggaccttggacagtttctactgttttgtcatatctcttcccaccaacatgatggcatggaagcttatgtcaaagtagacagctgtccagaggaaccccaactacgaatgaaaaataatgaagaagcggaagactatgatgatgatcttactgattctgaaatggatgtggtcaggtttgatgatgacaactctccttcctttatccaaattcgctcagttgccaagaagcatcctaaaacttgggtacattacattgctgctgaagaggaggactgggactatgctcccttagtcctcgcccccgatgacagaagttataaaagtcaatatttgaacaatggccctcagcggattggtaggaagtacaaaaaagtccgatttatggcatacacagatgaaacctttaagactcgtgaagctattcagcatgaatcaggaatcttgggacctttactttatggggaagttggagacacactgttgattatatttaagaatcaagcaagcagaccatataacatctaccctcacggaatcactgatgtccgtcctttgtattcaaggagattaccaaaaggtgtaaaacatttgaaggattttccaattctgccaggagaaatattcaaatataaatggacagtgactgtagaagatgggccaactaaatcagatcctcggtgcctgacccgctattactctagtttcgttaatatggagagagatctagcttcaggactcattggccctctcctcatctgctacaaagaatctgtagatcaaagaggaaaccagataatgtcagacaagaggaatgtcatcctgttttctgtatttgatgagaaccgaagctggtacctcacagagaatatacaacgctttctccccaatccagctggagtgcagcttgaggatccagagttccaagcctccaacatcatgcacagcatcaatggctatgtttttgatagtttgcagttgtcagtttgtttgcatgaggtggcatactggtacattctaagcattggagcacagactgacttcctttctgtcttcttctctggatataccttcaaacacaaaatggtctatgaagacacactcaccctattcccattctcaggagaaactgtcttcatgtcgatggaaaacccaggtctatggattctggggtgccacaactcagactttcggaacagaggcatgaccgccttactgaaggtttctagttgtgacaagaacactggtgattattacgaggacagttatgaagatatttcagcatacttgctgagtaaaaacaatgccattgaaccaagaagcttctctcaaaacccaccagtcttgaaacgccatcaacgggaaataactcgtactactcttcagtcagatcaagaggaaatcgattatgatgataccatatcagttgaaatgaagaaggaagattttgacatttatgatgaggatgaaaatcagagcccccgcagctttcaaaagaaaacacgacactattttattgctgcagtggagaggctctgggattatgggatgagtagctccccacatgttctaagaaacagggctcagagtggcagtgtccctcagttcaagaaagttgttttccaggaatttactgatggctcctttactcagcccttataccgtggagaactaaatgaacatttgggactcctggggccatatataagagcagaagttgaagataatatcatggtaactttcagaaatcaggcctctcgtccctattccttctattctagccttatttcttatgaggaagatcagaggcaaggagcagaacctagaaaaaactttgtcaagcctaatgaaaccaaaacttacttttggaaagtgcaacatcatatggcacccactaaagatgagtttgactgcaaagcctgggcttatttctctgatgttgacctggaaaaagatgtgcactcaggcctgattggaccccttctggtctgccacactaacacactgaaccctgctcatgggagacaagtgacagtacaggaatttgctctgtttttcaccatctttgatgagaccaaaagctggtacttcactgaaaatatggaaagaaactgcagggctccctgcaatatccagatggaagatcccacttttaaagagaattatcgcttccatgcaatcaatggctacataatggatacactacctggcttagtaatggctcaggatcaaaggattcgatggtatctgctcagcatgggcagcaatgaaaacatccattctattcatttcagtggacatgtgttcactgtacgaaaaaaagaggagtataaaatggcactgtacaatctctatccaggtgtttttgagacagtggaaatgttaccatccaaagctggaatttggcgggtggaatgccttattggcgagcatctacatgctgggatgagcacactttttctggtgtacagcaataagtgtcagactcccctgggaatggcttctggacacattagagattttcagattacagcttcaggacaatatggacagtgggccccaaagctggccagacttcattattccggatcaatcaatgcctggagcaccaaggagcccttttcttggatcaaggtggatctgttggcaccaatgattattcacggcatcaagacccagggtgcccgtcagaagttctccagcctctacatctctcagtttatcatcatgtatagtcttgatgggaagaagtggcagacttatcgaggaaattccactggaaccttaatggtcttctttggcaatgtggattcatctgggataaaacacaatatttttaaccctccaattattgctcgatacatccgtttgcacccaactcattatagcattcgcagcactcttcgcatggagttgatgggctgtgatttaaatagttgcagcatgccattgggaatggagagtaaagcaatatcagatgcacagattactgcttcatcctactttaccaatatgtttgccacctggtctccttcaaaagctcgacttcacctccaagggaggagtaatgcctggagacctcaggtgaataatccaaaagagtggctgcaagtggacttccagaagacaatgaaagtcacaggagtaactactcagggagtaaaatctctgcttaccagcatgtatgtgaaggagttcctcatctccagcagtcaagatggccatcagtggactctcttttttcagaatggcaaagtaaaggtttttcagggaaatcaagactccttcacacctgtggtgaactctctagacccaccgttactgactcgctaccttcgaattcacccccagagttgggtgcaccagattgccctgaggatggaggttctgggctgcgaggcacaggacctctacggcgccggatcacctggggccgaaacggccgaacaaaaactcatctcagaagaggatctgtcacctgcaaccggtcatcatcaccatcaccattga

SEQ ID NO: 737 - protein, 1619 aa, synthetic construct
  REGION 1..1619: note = Description of Artificial Sequence: Synthetic polypeptide
ATRRYYLGAVELSWDYMQSDLGELPVDARFPPRVPKSFPFNTSVVYKKTLFVEFTDHLFNIAKPRPPWMGLLGPTIQAEVYDTVVITLKNMASHPVSLHAVGVSYWKASEGAEYDDQTSQREKEDDKVFPGGSHTYVWQVLKENGPMASDPLCLTYSYLSHVDLVKDLNSGLIGALLVCREGSLAKEKTQTLHKFILLFAVFDEGKSWHSETKNSLMQDRDAASGAPGSSPSASTGTGPGSSPSASTGTGPGASPGTSSTGSPGASPGTSSTGSPGSSTPSGATGSPGSSPSASTGTGPGASPGTSSTGSPGSSPSASTGTGPGTPGSGTASSSPGSSTPSGATGSPGSSTPSGATGSPGASPGTSSTGSPASSARAWPKMHTVNGYVNRSLPGLIGCHRKSVYWHVIGMGTTPEVHSIFLEGHTFLVRNHRQASLEISPITFLTAQTLLMDLGQFLLFCHISSHQHDGMEAYVKVDSCPEEPQLRMKNNEEAEDYDDDLTDSEMDVVRFDDDNSPSFIQIRSVAKKHPKTWVHYIAAEEEDWDYAPLVLAPDDRSYKSQYLNNGPQRIGRKYKKVRFMAYTDETFKTREAIQHESGILGPLLYGEVGDTLLIIFKNQASRPYNIYPHGITDVRPLYSRRLPKGVKHLKDFPILPGEIFKYKWTVTVEDGPTKSDPRCLTRYYSSFVNMERDLASGLIGPLLICYKESVDQRGNQIMSDKRNVILFSVFDENRSWYLTENIQRFLPNPAGVQLEDPEFQASNIMHSINGYVFDSLQLSVCLHEVAYWYILSIGAQTDFLSVFFSGYTFKHKMVYEDTLTLFPFSGETVFMSMENPGLWILGCHNSDFRNRGMTALLKVSSCDKNTGDYYEDSYEDISAYLLSKNNAIEPRSFSQNPPVLKRHQREITRTTLQSDQEEIDYDDTISVEMKKEDFDIYDEDENQSPRSFQKKTRHYFIAAVERLWDYGMSSSPHVLRNRAQSGSVPQFKKVVFQEFTDGSFTQPLYRGELNEHLGLLGPYIRAEVEDNIMVTFRNQASRPYSFYSSLISYEEDQRQGAEPRKNFVKPNETKTYFWKVQHHMAPTKDEFDCKAWAYFSDVDLEKDVHSGLIGPLLVCHTNTLNPAHGRQVTVQEFALFFTIFDETKSWYFTENMERNCRAPCNIQMEDPTFKENYRFHAINGYIMDTLPGLVMAQDQRIRWYLLSMGSNENIHSIHFSGHVFTVRKKEEYKMALYNLYPGVFETVEMLPSKAGIWRVECLIGEHLHAGMSTLFLVYSNKCQTPLGMASGHIRDFQITASGQYGQWAPKLARLHYSGSINAWSTKEPFSWIKVDLLAPMIIHGIKTQGARQKFSSLYISQFIIMYSLDGKKWQTYRGNSTGTLMVFFGNVDSSGIKHNIFNPPIIARYIRLHPTHYSIRSTLRMELMGCDLNSCSMPLGMESKAISDAQITASSYFTNMFATWSPSKARLHLQGRSNAWRPQVNNPKEWLQVDFQKTMKVTGVTTQGVKSLLTSMYVKEFLISSSQDGHQWTLFFQNGKVKVFQGNQDSFTPVVNSLDPPLLTRYLRIHPQSWVHQIALRMEVLGCEAQDLYGAGSPGAETAEQKLISEEDLSPATGHHHHHH

SEQ ID NO: 738 - DNA, 4860 bp, synthetic construct
  misc_feature 1..4860: note = Description of Artificial Sequence: Synthetic polynucleotide
  source 1..4860: mol_type = other DNA
gccaccagaagatactacctgggtgcagtggaactgtcatgggactatatgcaaagtgatctcggtgagctgcctgtggacgcaagatttcctcctagagtgccaaaatcttttccattcaacacctcagtcgtgtacaaaaagactctgtttgtagaattcacggatcaccttttcaacatcgctaagccaaggccaccctggatgggtctgctaggtcctaccatccaggctgaggtttatgatacagtggtcattacacttaagaacatggcttcccatcctgtcagtcttcatgctgttggtgtatcctactggaaagcttctgagggagctgaatatgatgatcagaccagtcaaagggagaaagaagatgataaagtcttccctggtggaagccatacatatgtctggcaggtcctgaaagagaatggtccaatggcctctgacccactgtgccttacctactcatatctttctcatgtggacctggtaaaagacttgaattcaggcctcattggagccctactagtatgtagagaagggagtctggccaaggaaaagacacagaccttgcacaaatttatactactttttgctgtatttgatgaagggaaaagttggcactcagaaacaaagaactccttgatgcaggatagggatgctgcatctggcgcgccaggctccagcccctccgcgagcacgggaaccggaccaggttcgtcaccctcagcatcaacggggacgggaccgggggcgtcaccaggaacgtcctccaccggctcgccgggtgcatcacccggaacgtcatcgaccggatcgccagggagctcgacgccatcaggcgcaacaggatcacctggctcaagccctagcgcgtcaaccggcacgggtccgggtgcctcccctggcacgtccagcaccggatcacccggatcgagcccatccgcctcaaccggaaccggacccggtacaccagggtcgggaacagcctcctcgtcaccaggctcctcaaccccctcgggagccacgggttcgcccggttcgtcaacgccttccggagcaactggtagccccggagcatcgccaggaacttcgagcacggggtcgcccgcctcgagcgctcgggcctggcctaaaatgcacacagtcaatggttatgtaaacaggtctctgccaggtctgattggatgccacaggaaatcagtctattggcatgtgattggaatgggcaccactcctgaagtgcactcaatattcctcgaaggtcacacatttcttgtgaggaaccatcgccaggctagcttggaaatctcgccaataactttccttactgctcaaacactcttgatggaccttggacagtttctactgttttgtcatatctcttcccaccaacatgatggcatggaagcttatgtcaaagtagacagctgtccagaggaaccccaactacgaatgaaaaataatgaagaagcggaagactatgatgatgatcttactgattctgaaatggatgtggtcaggtttgatgatgacaactctccttcctttatccaaattcgctcagttgccaagaagcatcctaaaacttgggtacattacattgctgctgaagaggaggactgggactatgctcccttagtcctcgcccccgatgacagaagttataaaagtcaatatttgaacaatggccctcagcggattggtaggaagtacaaaaaagtccgatttatggcatacacagatgaaacctttaagactcgtgaagctattcagcatgaatcaggaatcttgggacctttactttatggggaagttggagacacactgttgattatatttaagaatcaagcaagcagaccatataacatctaccctcacggaatcactgatgtccgtcctttgtattcaaggagattaccaaaaggtgtaaaacatttgaaggattttccaattctgccaggagaaatattcaaatataaatggacagtgactgtagaagatgggccaactaaatcagatcctcggtgcctgacccgctattactctagtttcgttaatatggagagagatctagcttcaggactcattggccctctcctcatctgctacaaagaatctgtagatcaaagaggaaaccagataatgtcagacaagaggaatgtcatcctgttttctgtatttgatgagaaccgaagctggtacctcacagagaatatacaacgctttctccccaatccagctggagtgcagcttgaggatccagagttccaagcctccaacatcatgcacagcatcaatggctatgtttttgatagtttgcagttgtcagtttgtttgcatgaggtggcatactggtacattctaagcattggagcacagactgacttcctttctgtcttcttctctggatataccttcaaacacaaaatggtctatgaagacacactcaccctattcccattctcaggagaaactgtcttcatgtcgatggaaaacccaggtctatggattctggggtgccacaactcagactttcggaacagaggcatgaccgccttactgaaggtttctagttgtgacaagaacactggtgattattacgaggacagttatgaagatatttcagcatacttgctgagtaaaaacaatgccattgaaccaagaagcttctctcaaaacccaccagtcttgaaacgccatcaacgggaaataactcgtactactcttcagtcagatcaagaggaaatcgattatgatgataccatatcagttgaaatgaagaaggaagattttgacatttatgatgaggatgaaaatcagagcccccgcagctttcaaaagaaaacacgacactattttattgctgcagtggagaggctctgggattatgggatgagtagctccccacatgttctaagaaacagggctcagagtggcagtgtccctcagttcaagaaagttgttttccaggaatttactgatggctcctttactcagcccttataccgtggagaactaaatgaacatttgggactcctggggccatatataagagcagaagttgaagataatatcatggtaactttcagaaatcaggcctctcgtccctattccttctattctagccttatttcttatgaggaagatcagaggcaaggagcagaacctagaaaaaactttgtcaagcctaatgaaaccaaaacttacttttggaaagtgcaacatcatatggcacccactaaagatgagtttgactgcaaagcctgggcttatttctctgatgttgacctggaaaaagatgtgcactcaggcctgattggaccccttctggtctgccacactaacacactgaaccctgctcatgggagacaagtgacagtacaggaatttgctctgtttttcaccatctttgatgagaccaaaagctggtacttcactgaaaatatggaaagaaactgcagggctccctgcaatatccagatggaagatcccacttttaaagagaattatcgcttccatgcaatcaatggctacataatggatacactacctggcttagtaatggctcaggatcaaaggattcgatggtatctgctcagcatgggcagcaatgaaaacatccattctattcatttcagtggacatgtgttcactgtacgaaaaaaagaggagtataaaatggcactgtacaatctctatccaggtgtttttgagacagtggaaatgttaccatccaaagctggaatttggcgggtggaatgccttattggcgagcatctacatgctgggatgagcacactttttctggtgtacagcaataagtgtcagactcccctgggaatggcttctggacacattagagattttcagattacagcttcaggacaatatggacagtgggccccaaagctggccagacttcattattccggatcaatcaatgcctggagcaccaaggagcccttttcttggatcaaggtggatctgttggcaccaatgattattcacggcatcaagacccagggtgcccgtcagaagttctccagcctctacatctctcagtttatcatcatgtatagtcttgatgggaagaagtggcagacttatcgaggaaattccactggaaccttaatggtcttctttggcaatgtggattcatctgggataaaacacaatatttttaaccctccaattattgctcgatacatccgtttgcacccaactcattatagcattcgcagcactcttcgcatggagttgatgggctgtgatttaaatagttgcagcatgccattgggaatggagagtaaagcaatatcagatgcacagattactgcttcatcctactttaccaatatgtttgccacctggtctccttcaaaagctcgacttcacctccaagggaggagtaatgcctggagacctcaggtgaataatccaaaagagtggctgcaagtggacttccagaagacaatgaaagtcacaggagtaactactcagggagtaaaatctctgcttaccagcatgtatgtgaaggagttcctcatctccagcagtcaagatggccatcagtggactctcttttttcagaatggcaaagtaaaggtttttcagggaaatcaagactccttcacacctgtggtgaactctctagacccaccgttactgactcgctaccttcgaattcacccccagagttgggtgcaccagattgccctgaggatggaggttctgggctgcgaggcacaggacctctacggcgccggatcacctggggccgaaacggccgaacaaaaactcatctcagaagaggatctgtcacctgcaaccggtcatcatcaccatcaccattga

SEQ ID NO: 739 - protein, 1619 aa, synthetic construct
  REGION 1..1619: note = Description of Artificial Sequence: Synthetic polypeptide
ATRRYYLGAVELSWDYMQSDLGELPVDARFPPRVPKSFPFNTSVVYKKTLFVEFTDHLFNIAKPRPPWMGLLGPTIQAEVYDTVVITLKNMASHPVSLHAVGVSYWKASEGAEYDDQTSQREKEDDKVFPGGSHTYVWQVLKENGPMASDPLCLTYSYLSHVDLVKDLNSGLIGALLVCREGSLAKEKTQTLHKFILLFAVFDEGKSWHSETKNSLMQDRDAASARAWPKMHTVNGYVNRSLPGLIGCHRKSVYWHVIGMGTTPEVHSIFLEGHTFLVRNHRQASLEISPITFLTAQTLLMDLGQFLLFCHISSHQHDGMEAYVKVDSCPEEPQLRGAPGSSPSASTGTGPGSSPSASTGTGPGASPGTSSTGSPGASPGTSSTGSPGSSTPSGATGSPGSSPSASTGTGPGASPGTSSTGSPGSSPSASTGTGPGTPGSGTASSSPGSSTPSGATGSPGSSTPSGATGSPGASPGTSSTGSPASSMKNNEEAEDYDDDLTDSEMDVVRFDDDNSPSFIQIRSVAKKHPKTWVHYIAAEEEDWDYAPLVLAPDDRSYKSQYLNNGPQRIGRKYKKVRFMAYTDETFKTREAIQHESGILGPLLYGEVGDTLLIIFKNQASRPYNIYPHGITDVRPLYSRRLPKGVKHLKDFPILPGEIFKYKWTVTVEDGPTKSDPRCLTRYYSSFVNMERDLASGLIGPLLICYKESVDQRGNQIMSDKRNVILFSVFDENRSWYLTENIQRFLPNPAGVQLEDPEFQASNIMHSINGYVFDSLQLSVCLHEVAYWYILSIGAQTDFLSVFFSGYTFKHKMVYEDTLTLFPFSGETVFMSMENPGLWILGCHNSDFRNRGMTALLKVSSCDKNTGDYYEDSYEDISAYLLSKNNAIEPRSFSQNPPVLKRHQREITRTTLQSDQEEIDYDDTISVEMKKEDFDIYDEDENQSPRSFQKKTRHYFIAAVERLWDYGMSSSPHVLRNRAQSGSVPQFKKVVFQEFTDGSFTQPLYRGELNEHLGLLGPYIRAEVEDNIMVTFRNQASRPYSFYSSLISYEEDQRQGAEPRKNFVKPNETKTYFWKVQHHMAPTKDEFDCKAWAYFSDVDLEKDVHSGLIGPLLVCHTNTLNPAHGRQVTVQEFALFFTIFDETKSWYFTENMERNCRAPCNIQMEDPTFKENYRFHAINGYIMDTLPGLVMAQDQRIRWYLLSMGSNENIHSIHFSGHVFTVRKKEEYKMALYNLYPGVFETVEMLPSKAGIWRVECLIGEHLHAGMSTLFLVYSNKCQTPLGMASGHIRDFQITASGQYGQWAPKLARLHYSGSINAWSTKEPFSWIKVDLLAPMIIHGIKTQGARQKFSSLYISQFIIMYSLDGKKWQTYRGNSTGTLMVFFGNVDSSGIKHNIFNPPIIARYIRLHPTHYSIRSTLRMELMGCDLNSCSMPLGMESKAISDAQITASSYFTNMFATWSPSKARLHLQGRSNAWRPQVNNPKEWLQVDFQKTMKVTGVTTQGVKSLLTSMYVKEFLISSSQDGHQWTLFFQNGKVKVFQGNQDSFTPVVNSLDPPLLTRYLRIHPQSWVHQIALRMEVLGCEAQDLYGAGSPGAETAEQKLISEEDLSPATGHHHHHH

SEQ ID NO: 740 - DNA, 4860 bp, synthetic construct
  misc_feature 1..4860: note = Description of Artificial Sequence: Synthetic polynucleotide
  source 1..4860: mol_type = other DNA
gccaccagaagatactacctgggtgcagtggaactgtcatgggactatatgcaaagtgatctcggtgagctgcctgtggacgcaagatttcctcctagagtgccaaaatcttttccattcaacacctcagtcgtgtacaaaaagactctgtttgtagaattcacggatcaccttttcaacatcgctaagccaaggccaccctggatgggtctgctaggtcctaccatccaggctgaggtttatgatacagtggtcattacacttaagaacatggcttcccatcctgtcagtcttcatgctgttggtgtatcctactggaaagcttctgagggagctgaatatgatgatcagaccagtcaaagggagaaagaagatgataaagtcttccctggtggaagccatacatatgtctggcaggtcctgaaagagaatggtccaatggcctctgacccactgtgccttacctactcatatctttctcatgtggacctggtaaaagacttgaattcaggcctcattggagccctactagtatgtagagaagggagtctggccaaggaaaagacacagaccttgcacaaatttatactactttttgctgtatttgatgaagggaaaagttggcactcagaaacaaagaactccttgatgcaggatagggatgctgcatctgctcgggcctggcctaaaatgcacacagtcaatggttatgtaaacaggtctctgccaggtctgattggatgccacaggaaatcagtctattggcatgtgattggaatgggcaccactcctgaagtgcactcaatattcctcgaaggtcacacatttcttgtgaggaaccatcgccaggctagcttggaaatctcgccaataactttccttactgctcaaacactcttgatggaccttggacagtttctactgttttgtcatatctcttcccaccaacatgatggcatggaagcttatgtcaaagtagacagctgtccagaggaaccccaactacgaggcgcgccaggctccagcccctccgcgagcacgggaaccggaccaggttcgtcaccctcagcatcaacggggacgggaccgggggcgtcaccaggaacgtcctccaccggctcgccgggtgcatcacccggaacgtcatcgaccggatcgccagggagctcgacgccatcaggcgcaacaggatcacctggctcaagccctagcgcgtcaaccggcacgggtccgggtgcctcccctggcacgtccagcaccggatcacccggatcgagcccatccgcctcaaccggaaccggacccggtacaccagggtcgggaacagcctcctcgtcaccaggctcctcaaccccctcgggagccacgggttcgcccggttcgtcaacgccttccggagcaactggtagccccggagcatcgccaggaacttcgagcacggggtcgcccgcctcgagcatgaaaaataatgaagaagcggaagactatgatgatgatcttactgattctgaaatggatgtggtcaggtttgatgatgacaactctccttcctttatccaaattcgctcagttgccaagaagcatcctaaaacttgggtacattacattgctgctgaagaggaggactgggactatgctcccttagtcctcgcccccgatgacagaagttataaaagtcaatatttgaacaatggccctcagcggattggtaggaagtacaaaaaagtccgatttatggcatacacagatgaaacctttaagactcgtgaagctattcagcatgaatcaggaatcttgggacctttactttatggggaagttggagacacactgttgattatatttaagaatcaagcaagcagaccatataacatctaccctcacggaatcactgatgtccgtcctttgtattcaaggagattaccaaaaggtgtaaaacatttgaaggattttccaattctgccaggagaaatattcaaatataaatggacagtgactgtagaagatgggccaactaaatcagatcctcggtgcctgacccgctattactctagtttcgttaatatggagagagatctagcttcaggactcattggccctctcctcatctgctacaaagaatctgtagatcaaagaggaaaccagataatgtcagacaagaggaatgtcatcctgttttctgtatttgatgagaaccgaagctggtacctcacagagaatatacaacgctttctccccaatccagctggagtgcagcttgaggatccagagttccaagcctccaacatcatgcacagcatcaatggctatgtttttgatagtttgcagttgtcagtttgtttgcatgaggtggcatactggtacattctaagcattggagcacagactgacttcctttctgtcttcttctctggatataccttcaaacacaaaatggtctatgaagacacactcaccctattcccattctcaggagaaactgtcttcatgtcgatggaaaacccaggtctatggattctggggtgccacaactcagactttcggaacagaggcatgaccgccttactgaaggtttctagttgtgacaagaacactggtgattattacgaggacagttatgaagatatttcagcatacttgctgagtaaaaacaatgccattgaaccaagaagcttctctcaaaacccaccagtcttgaaacgccatcaacgggaaataactcgtactactcttcagtcagatcaagaggaaatcgattatgatgataccatatcagttgaaatgaagaaggaagattttgacatttatgatgaggatgaaaatcagagcccccgcagctttcaaaagaaaacacgacactattttattgctgcagtggagaggctctgggattatgggatgagtagctccccacatgttctaagaaacagggctcagagtggcagtgtccctcagttcaagaaagttgttttccaggaatttactgatggctcctttactcagcccttataccgtggagaactaaatgaacatttgggactcctggggccatatataagagcagaagttgaagataatatcatggtaactttcagaaatcaggcctctcgtccctattccttctattctagccttatttcttatgaggaagatcagaggcaaggagcagaacctagaaaaaactttgtcaagcctaatgaaaccaaaacttacttttggaaagtgcaacatcatatggcacccactaaagatgagtttgactgcaaagcctgggcttatttctctgatgttgacctggaaaaagatgtgcactcaggcctgattggaccccttctggtctgccacactaacacactgaaccctgctcatgggagacaagtgacagtacaggaatttgctctgtttttcaccatctttgatgagaccaaaagctggtacttcactgaaaatatggaaagaaactgcagggctccctgcaatatccagatggaagatcccacttttaaagagaattatcgcttccatgcaatcaatggctacataatggatacactacctggcttagtaatggctcaggatcaaaggattcgatggtatctgctcagcatgggcagcaatgaaaacatccattctattcatttcagtggacatgtgttcactgtacgaaaaaaagaggagtataaaatggcactgtacaatctctatccaggtgtttttgagacagtggaaatgttaccatccaaagctggaatttggcgggtggaatgccttattggcgagcatctacatgctgggatgagcacactttttctggtgtacagcaataagtgtcagactcccctgggaatggcttctggacacattagagattttcagattacagcttcaggacaatatggacagtgggccccaaagctggccagacttcattattccggatcaatcaatgcctggagcaccaaggagcccttttcttggatcaaggtggatctgttggcaccaatgattattcacggcatcaagacccagggtgcccgtcagaagttctccagcctctacatctctcagtttatcatcatgtatagtcttgatgggaagaagtggcagacttatcgaggaaattccactggaaccttaatggtcttctttggcaatgtggattcatctgggataaaacacaatatttttaaccctccaattattgctcgatacatccgtttgcacccaactcattatagcattcgcagcactcttcgcatggagttgatgggctgtgatttaaatagttgcagcatgccattgggaatggagagtaaagcaatatcagatgcacagattactgcttcatcctactttaccaatatgtttgccacctggtctccttcaaaagctcgacttcacctccaagggaggagtaatgcctggagacctcaggtgaataatccaaaagagtggctgcaagtggacttccagaagacaatgaaagtcacaggagtaactactcagggagtaaaatctctgcttaccagcatgtatgtgaaggagttcctcatctccagcagtcaagatggccatcagtggactctcttttttcagaatggcaaagtaaaggtttttcagggaaatcaagactccttcacacctgtggtgaactctctagacccaccgttactgactcgctaccttcgaattcacccccagagttgggtgcaccagattgccctgaggatggaggttctgggctgcgaggcacaggacctctacggcgccggatcacctggggccgaaacggccgaacaaaaactcatctcagaagaggatctgtcacctgcaaccggtcatcatcaccatcaccattga

SEQ ID NO: 741 - protein, 1619 aa, synthetic construct
  REGION 1..1619: note = Description of Artificial Sequence: Synthetic polypeptide
ATRRYYLGAVELSWDYMQSDLGELPVDARFPPRVPKSFPFNTSVVYKKTLFVEFTDHLFNIAKPRPPWMGLLGPTIQAEVYDTVVITLKNMASHPVSLHAVGVSYWKASEGAEYDDQTSQREKEDDKVFPGGSHTYVWQVLKENGPMASDPLCLTYSYLSHVDLVKDLNSGLIGALLVCREGSLAKEKTQTLHKFILLFAVFDEGKSWHSETKNSLMQDRDAASARAWPKMHTVNGYVNRSLPGLIGCHRKSVYWHVIGMGTTPEVHSIFLEGHTFLVRNHRQASLEISPITFLTAQTLLMDLGQFLLFCHISSHQHDGMEAYVKVDSCPEEPQLRMKNGAPGSSPSASTGTGPGSSPSASTGTGPGASPGTSSTGSPGASPGTSSTGSPGSSTPSGATGSPGSSPSASTGTGPGASPGTSSTGSPGSSPSASTGTGPGTPGSGTASSSPGSSTPSGATGSPGSSTPSGATGSPGASPGTSSTGSPASSNEEAEDYDDDLTDSEMDVVRFDDDNSPSFIQIRSVAKKHPKTWVHYIAAEEEDWDYAPLVLAPDDRSYKSQYLNNGPQRIGRKYKKVRFMAYTDETFKTREAIQHESGILGPLLYGEVGDTLLIIFKNQASRPYNIYPHGITDVRPLYSRRLPKGVKHLKDFPILPGEIFKYKWTVTVEDGPTKSDPRCLTRYYSSFVNMERDLASGLIGPLLICYKESVDQRGNQIMSDKRNVILFSVFDENRSWYLTENIQRFLPNPAGVQLEDPEFQASNIMHSINGYVFDSLQLSVCLHEVAYWYILSIGAQTDFLSVFFSGYTFKHKMVYEDTLTLFPFSGETVFMSMENPGLWILGCHNSDFRNRGMTALLKVSSCDKNTGDYYEDSYEDISAYLLSKNNAIEPRSFSQNPPVLKRHQREITRTTLQSDQEEIDYDDTISVEMKKEDFDIYDEDENQSPRSFQKKTRHYFIAAVERLWDYGMSSSPHVLRNRAQSGSVPQFKKVVFQEFTDGSFTQPLYRGELNEHLGLLGPYIRAEVEDNIMVTFRNQASRPYSFYSSLISYEEDQRQGAEPRKNFVKPNETKTYFWKVQHHMAPTKDEFDCKAWAYFSDVDLEKDVHSGLIGPLLVCHTNTLNPAHGRQVTVQEFALFFTIFDETKSWYFTENMERNCRAPCNIQMEDPTFKENYRFHAINGYIMDTLPGLVMAQDQRIRWYLLSMGSNENIHSIHFSGHVFTVRKKEEYKMALYNLYPGVFETVEMLPSKAGIWRVECLIGEHLHAGMSTLFLVYSNKCQTPLGMASGHIRDFQITASGQYGQWAPKLARLHYSGSINAWSTKEPFSWIKVDLLAPMIIHGIKTQGARQKFSSLYISQFIIMYSLDGKKWQTYRGNSTGTLMVFFGNVDSSGIKHNIFNPPIIARYIRLHPTHYSIRSTLRMELMGCDLNSCSMPLGMESKAISDAQITASSYFTNMFATWSPSKARLHLQGRSNAWRPQVNNPKEWLQVDFQKTMKVTGVTTQGVKSLLTSMYVKEFLISSSQDGHQWTLFFQNGKVKVFQGNQDSFTPVVNSLDPPLLTRYLRIHPQSWVHQIALRMEVLGCEAQDLYGAGSPGAETAEQKLISEEDLSPATGHHHHHH

SEQ ID NO: 742 - DNA, 4860 bp, synthetic construct
  misc_feature 1..4860: note = Description of Artificial Sequence: Synthetic polynucleotide
  source 1..4860: mol_type = other DNA
gccaccagaagatactacctgggtgcagtggaactgtcatgggactatatgcaaagtgatctcggtgagctgcctgtggacgcaagatttcctcctagagtgccaaaatcttttccattcaacacctcagtcgtgtacaaaaagactctgtttgtagaattcacggatcaccttttcaacatcgctaagccaaggccaccctggatgggtctgctaggtcctaccatccaggctgaggtttatgatacagtggtcattacacttaagaacatggcttcccatcctgtcagtcttcatgctgttggtgtatcctactggaaagcttctgagggagctgaatatgatgatcagaccagtcaaagggagaaagaagatgataaagtcttccctggtggaagccatacatatgtctggcaggtcctgaaagagaatggtccaatggcctctgacccactgtgccttacctactcatatctttctcatgtggacctggtaaaagacttgaattcaggcctcattggagccctactagtatgtagagaagggagtctggccaaggaaaagacacagaccttgcacaaatttatactactttttgctgtatttgatgaagggaaaagttggcactcagaaacaaagaactccttgatgcaggatagggatgctgcatctgctcgggcctggcctaaaatgcacacagtcaatggttatgtaaacaggtctctgccaggtctgattggatgccacaggaaatcagtctattggcatgtgattggaatgggcaccactcctgaagtgcactcaatattcctcgaaggtcacacatttcttgtgaggaaccatcgccaggctagcttggaaatctcgccaataactttccttactgctcaaacactcttgatggaccttggacagtttctactgttttgtcatatctcttcccaccaacatgatggcatggaagcttatgtcaaagtagacagctgtccagaggaaccccaactacgaatgaaaaatggcgcgccaggctccagcccctccgcgagcacgggaaccggaccaggttcgtcaccctcagcatcaacggggacgggaccgggggcgtcaccaggaacgtcctccaccggctcgccgggtgcatcacccggaacgtcatcgaccggatcgccagggagctcgacgccatcaggcgcaacaggatcacctggctcaagccctagcgcgtcaaccggcacgggtccgggtgcctcccctggcacgtccagcaccggatcacccggatcgagcccatccgcctcaaccggaaccggacccggtacaccagggtcgggaacagcctcctcgtcaccaggctcctcaaccccctcgggagccacgggttcgcccggttcgtcaacgccttccggagcaactggtagccccggagcatcgccaggaacttcgagcacggggtcgcccgcctcgagcaatgaagaagcggaagactatgatgatgatcttactgattctgaaatggatgtggtcaggtttgatgatgacaactctccttcctttatccaaattcgctcagttgccaagaagcatcctaaaacttgggtacattacattgctgctgaagaggaggactgggactatgctcccttagtcctcgcccccgatgacagaagttataaaagtcaatatttgaacaatggccctcagcggattggtaggaagtacaaaaaagtccgatttatggcatacacagatgaaacctttaagactcgtgaagctattcagcatgaatcaggaatcttgggacctttactttatggggaagttggagacacactgttgattatatttaagaatcaagcaagcagaccatataacatctaccctcacggaatcactgatgtccgtcctttgtattcaaggagattaccaaaaggtgtaaaacatttgaaggattttccaattctgccaggagaaatattcaaatataaatggacagtgactgtagaagatgggccaactaaatcagatcctcggtgcctgacccgctattactctagtttcgttaatatggagagagatctagcttcaggactcattggccctctcctcatctgctacaaagaatctgtagatcaaagaggaaaccagataatgtcagacaagaggaatgtcatcctgttttctgtatttgatgagaaccgaagctggtacctcacagagaatatacaacgctttctccccaatccagctggagtgcagcttgaggatccagagttccaagcctccaacatcatgcacagcatcaatggctatgtttttgatagtttgcagttgtcagtttgtttgcatgaggtggcatactggtacattctaagcattggagcacagactgacttcctttctgtcttcttctctggatataccttcaaacacaaaatggtctatgaagacacactcaccctattcccattctcaggagaaactgtcttcatgtcgatggaaaacccaggtctatggattctggggtgccacaactcagactttcggaacagaggcatgaccgccttactgaaggtttctagttgtgacaagaacactggtgattattacgaggacagttatgaagatatttcagcatacttgctgagtaaaaacaatgccattgaaccaagaagcttctctcaaaacccaccagtcttgaaacgccatcaacgggaaataactcgtactactcttcagtcagatcaagaggaaatcgattatgatgataccatatcagttgaaatgaagaaggaagattttgacatttatgatgaggatgaaaatcagagcccccgcagctttcaaaagaaaacacgacactattttattgctgcagtggagaggctctgggattatgggatgagtagctccccacatgttctaagaaacagggctcagagtggcagtgtccctcagttcaagaaagttgttttccaggaatttactgatggctcctttactcagcccttataccgtggagaactaaatgaacatttgggactcctggggccatatataagagcagaagttgaagataatatcatggtaactttcagaaatcaggcctctcgtccctattccttctattctagccttatttcttatgaggaagatcagaggcaaggagcagaacctagaaaaaactttgtcaagcctaatgaaaccaaaacttacttttggaaagtgcaacatcatatggcacccactaaagatgagtttgactgcaaagcctgggcttatttctctgatgttgacctggaaaaagatgtgcactcaggcctgattggaccccttctggtctgccacactaacacactgaaccctgctcatgggagacaagtgacagtacaggaatttgctctgtttttcaccatctttgatgagaccaaaagctggtacttcactgaaaatatggaaagaaactgcagggctccctgcaatatccagatggaagatcccacttttaaagagaattatcgcttccatgcaatcaatggctacataatggatacactacctggcttagtaatggctcaggatcaaaggattcgatggtatctgctcagcatgggcagcaatgaaaacatccattctattcatttcagtggacatgtgttcactgtacgaaaaaaagaggagtataaaatggcactgtacaatctctatccaggtgtttttgagacagtggaaatgttaccatccaaagctggaatttggcgggtggaatgccttattggcgagcatctacatgctgggatgagcacactttttctggtgtacagcaataagtgtcagactcccctgggaatggcttctggacacattagagattttcagattacagcttcaggacaatatggacagtgggccccaaagctggccagacttcattattccggatcaatcaatgcctggagcaccaaggagcccttttcttggatcaaggtggatctgttggcaccaatgattattcacggcatcaagacccagggtgcccgtcagaagttctccagcctctacatctctcagtttatcatcatgtatagtcttgatgggaagaagtggcagacttatcgaggaaattccactggaaccttaatggtcttctttggcaatgtggattcatctgggataaaacacaatatttttaaccctccaattattgctcgatacatccgtttgcacccaactcattatagcattcgcagcactcttcgcatggagttgatgggctgtgatttaaatagttgcagcatgccattgggaatggagagtaaagcaatatcagatgcacagattactgcttcatcctactttaccaatatgtttgccacctggtctccttcaaaagctcgacttcacctccaagggaggagtaatgcctggagacctcaggtgaataatccaaaagagtggctgcaagtggacttccagaagacaatgaaagtcacaggagtaactactcagggagtaaaatctctgcttaccagcatgtatgtgaaggagttcctcatctccagcagtcaagatggccatcagtggactctcttttttcagaatggcaaagtaaaggtttttcagggaaatcaagactccttcacacctgtggtgaactctctagacccaccgttactgactcgctaccttcgaattcacccccagagttgggtgcaccagattgccctgaggatggaggttctgggctgcgaggcacaggacctctacggcgccggatcacctggggccgaaacggccgaacaaaaactcatctcagaagaggatctgtcacctgcaaccggtcatcatcaccatcaccattga

SEQ ID NO: 743 - protein, 1619 aa, synthetic construct
  REGION 1..1619: note = Description of Artificial Sequence: Synthetic polypeptide
ATRRYYLGAVELSWDYMQSDLGELPVDARFPPRVPKSFPFNTSVVYKKTLFVEFTDHLFNIAKPRPPWMGLLGPTIQAEVYDTVVITLKNMASHPVSLHAVGVSYWKASEGAEYDDQTSQREKEDDKVFPGGSHTYVWQVLKENGPMASDPLCLTYSYLSHVDLVKDLNSGLIGALLVCREGSLAKEKTQTLHKFILLFAVFDEGKSWHSETKNSLMQDRDAASARAWPKMHTVNGYVNRSLPGLIGCHRKSVYWHVIGMGTTPEVHSIFLEGHTFLVRNHRQASLEISPITFLTAQTLLMDLGQFLLFCHISSHQHDGMEAYVKVDSCPEEPQLRMKNNEEAEDYDDDLTDSEMDVVRFDDDNSPSFIQIRSVAKKHGAPTSTEPSEGSAPGSPAGSPTSTEEGTSTEPSEGSAPGTSTEPSEGSAPGTSESATPESGPGTSTEPSEGSAPGTSESATPESGPGSEPATSGSETPGTSTEPSEGSAPGTSTEPSEGSAPGTSESATPESGPGTSESATPESGPGASSPKTWVHYIAAEEEDWDYAPLVLAPDDRSYKSQYLNNGPQRIGRKYKKVRFMAYTDETFKTREAIQHESGILGPLLYGEVGDTLLIIFKNQASRPYNIYPHGITDVRPLYSRRLPKGVKHLKDFPILPGEIFKYKWTVTVEDGPTKSDPRCLTRYYSSFVNMERDLASGLIGPLLICYKESVDQRGNQIMSDKRNVILFSVFDENRSWYLTENIQRFLPNPAGVQLEDPEFQASNIMHSINGYVFDSLQLSVCLHEVAYWYILSIGAQTDFLSVFFSGYTFKHKMVYEDTLTLFPFSGETVFMSMENPGLWILGCHNSDFRNRGMTALLKVSSCDKNTGDYYEDSYEDISAYLLSKNNAIEPRSFSQNPPVLKRHQREITRTTLQSDQEEIDYDDTISVEMKKEDFDIYDEDENQSPRSFQKKTRHYFIAAVERLWDYGMSSSPHVLRNRAQSGSVPQFKKVVFQEFTDGSFTQPLYRGELNEHLGLLGPYIRAEVEDNIMVTFRNQASRPYSFYSSLISYEEDQRQGAEPRKNFVKPNETKTYFWKVQHHMAPTKDEFDCKAWAYFSDVDLEKDVHSGLIGPLLVCHTNTLNPAHGRQVTVQEFALFFTIFDETKSWYFTENMERNCRAPCNIQMEDPTFKENYRFHAINGYIMDTLPGLVMAQDQRIRWYLLSMGSNENIHSIHFSGHVFTVRKKEEYKMALYNLYPGVFETVEMLPSKAGIWRVECLIGEHLHAGMSTLFLVYSNKCQTPLGMASGHIRDFQITASGQYGQWAPKLARLHYSGSINAWSTKEPFSWIKVDLLAPMIIHGIKTQGARQKFSSLYISQFIIMYSLDGKKWQTYRGNSTGTLMVFFGNVDSSGIKHNIFNPPIIARYIRLHPTHYSIRSTLRMELMGCDLNSCSMPLGMESKAISDAQITASSYFTNMFATWSPSKARLHLQGRSNAWRPQVNNPKEWLQVDFQKTMKVTGVTTQGVKSLLTSMYVKEFLISSSQDGHQWTLFFQNGKVKVFQGNQDSFTPVVNSLDPPLLTRYLRIHPQSWVHQIALRMEVLGCEAQDLYGAGSPGAETAEQKLISEEDLSPATGHHHHHH

SEQ ID NO: 744 - DNA, 4860 bp, synthetic construct
  misc_feature 1..4860: note = Description of Artificial Sequence: Synthetic polynucleotide
  source 1..4860: mol_type = other DNA
gccaccagaagatactacctgggtgcagtggaactgtcatgggactatatgcaaagtgatctcggtgagctgcctgtggacgcaagatttcctcctagagtgccaaaatcttttccattcaacacctcagtcgtgtacaaaaagactctgtttgtagaattcacggatcaccttttcaacatcgctaagccaaggccaccctggatgggtctgctaggtcctaccatccaggctgaggtttatgatacagtggtcattacacttaagaacatggcttcccatcctgtcagtcttcatgctgttggtgtatcctactggaaagcttctgagggagctgaatatgatgatcagaccagtcaaagggagaaagaagatgataaagtcttccctggtggaagccatacatatgtctggcaggtcctgaaagagaatggtccaatggcctctgacccactgtgccttacctactcatatctttctcatgtggacctggtaaaagacttgaattcaggcctcattggagccctactagtatgtagagaagggagtctggccaaggaaaagacacagaccttgcacaaatttatactactttttgctgtatttgatgaagggaaaagttggcactcagaaacaaagaactccttgatgcaggatagggatgctgcatctgctcgggcctggcctaaaatgcacacagtcaatggttatgtaaacaggtctctgccaggtctgattggatgccacaggaaatcagtctattggcatgtgattggaatgggcaccactcctgaagtgcactcaatattcctcgaaggtcacacatttcttgtgaggaaccatcgccaggctagcttggaaatctcgccaataactttccttactgctcaaacactcttgatggaccttggacagtttctactgttttgtcatatctcttcccaccaacatgatggcatggaagcttatgtcaaagtagacagctgtccagaggaaccccaactacgaatgaaaaataatgaagaagcggaagactatgatgatgatcttactgattctgaaatggatgtggtcaggtttgatgatgacaactctccttcctttatccaaattcgctcagttgccaagaagcatggcgcgccaaccagtacggagccgtccgaggggagcgcaccaggaagcccggctgggagcccgacttctaccgaagagggtacatctaccgaaccaagtgaaggttcagcaccaggcacctcaacagaaccctctgagggctcggcgcctggtacaagtgagtccgccaccccagaatccgggcctgggacaagcacagaaccttcggaagggagtgcccctggaacatccgaatcggcaaccccagaatcagggccaggatctgagcccgcgacttcgggctccgagacgcctgggacatccaccgagccctccgaaggatcagccccaggcaccagcacggagccctctgagggaagcgcacctggtaccagcgaaagcgcaactcccgaatcaggtcccggtacgagcgagtcggcgaccccggagagcgggccaggtgcctcgagccctaaaacttgggtacattacattgctgctgaagaggaggactgggactatgctcccttagtcctcgcccccgatgacagaagttataaaagtcaatatttgaacaatggccctcagcggattggtaggaagtacaaaaaagtccgatttatggcatacacagatgaaacctttaagactcgtgaagctattcagcatgaatcaggaatcttgggacctttactttatggggaagttggagacacactgttgattatatttaagaatcaagcaagcagaccatataacatctaccctcacggaatcactgatgtccgtcctttgtattcaaggagattaccaaaaggtgtaaaacatttgaaggattttccaattctgccaggagaaatattcaaatataaatggacagtgactgtagaagatgggccaactaaatcagatcctcggtgcctgacccgctattactctagtttcgttaatatggagagagatctagcttcaggactcattggccctctcctcatctgctacaaagaatctgtagatcaaagaggaaaccagataatgtcagacaagaggaatgtcatcctgttttctgtatttgatgagaaccgaagctggtacctcacagagaatatacaacgctttctccccaatccagctggagtgcagcttgaggatccagagttccaagcctccaacatcatgcacagcatcaatggctatgtttttgatagtttgcagttgtcagtttgtttgcatgaggtggcatactggtacattctaagcattggagcacagactgacttcctttctgtcttcttctctggatataccttcaaacacaaaatggtctatgaagacacactcaccctattcccattctcaggagaaactgtcttcatgtcgatggaaaacccaggtctatggattctggggtgccacaactcagactttcggaacagaggcatgaccgccttactgaaggtttctagttgtgacaagaacactggtgattattacgaggacagttatgaagatatttcagcatacttgctgagtaaaaacaatgccattgaaccaagaagcttctctcaaaacccaccagtcttgaaacgccatcaacgggaaataactcgtactactcttcagtcagatcaagaggaaatcgattatgatgataccatatcagttgaaatgaagaaggaagattttgacatttatgatgaggatgaaaatcagagcccccgcagctttcaaaagaaaacacgacactattttattgctgcagtggagaggctctgggattatgggatgagtagctccccacatgttctaagaaacagggctcagagtggcagtgtccctcagttcaagaaagttgttttccaggaatttactgatggctcctttactcagcccttataccgtggagaactaaatgaacatttgggactcctggggccatatataagagcagaagttgaagataatatcatggtaactttcagaaatcaggcctctcgtccctattccttctattctagccttatttcttatgaggaagatcagaggcaaggagcagaacctagaaaaaactttgtcaagcctaatgaaaccaaaacttacttttggaaagtgcaacatcatatggcacccactaaagatgagtttgactgcaaagcctgggcttatttctctgatgttgacctggaaaaagatgtgcactcaggcctgattggaccccttctggtctgccacactaacacactgaaccctgctcatgggagacaagtgacagtacaggaatttgctctgtttttcaccatctttgatgagaccaaaagctggtacttcactgaaaatatggaaagaaactgcagggctccctgcaatatccagatggaagatcccacttttaaagagaattatcgcttccatgcaatcaatggctacataatggatacactacctggcttagtaatggctcaggatcaaaggattcgatggtatctgctcagcatgggcagcaatgaaaacatccattctattcatttcagtggacatgtgttcactgtacgaaaaaaagaggagtataaaatggcactgtacaatctctatccaggtgtttttgagacagtggaaatgttaccatccaaagctggaatttggcgggtggaatgccttattggcgagcatctacatgctgggatgagcacactttttctggtgtacagcaataagtgtcagactcccctgggaatggcttctggacacattagagattttcagattacagcttcaggacaatatggacagtgggccccaaagctggccagacttcattattccggatcaatcaatgcctggagcaccaaggagcccttttcttggatcaaggtggatctgttggcaccaatgattattcacggcatcaagacccagggtgcccgtcagaagttctccagcctctacatctctcagtttatcatcatgtatagtcttgatgggaagaagtggcagacttatcgaggaaattccactggaaccttaatggtcttctttggcaatgtggattcatctgggataaaacacaatatttttaaccctccaattattgctcgatacatccgtttgcacccaactcattatagcattcgcagcactcttcgcatggagttgatgggctgtgatttaaatagttgcagcatgccattgggaatggagagtaaagcaatatcagatgcacagattactgcttcatcctactttaccaatatgtttgccacctggtctccttcaaaagctcgacttcacctccaagggaggagtaatgcctggagacctcaggtgaataatccaaaagagtggctgcaagtggacttccagaagacaatgaaagtcacaggagtaactactcagggagtaaaatctctgcttaccagcatgtatgtgaaggagttcctcatctccagcagtcaagatggccatcagtggactctcttttttcagaatggcaaagtaaaggtttttcagggaaatcaagactccttcacacctgtggtgaactctctagacccaccgttactgactcgctaccttcgaattcacccccagagttgggtgcaccagattgccctgaggatggaggttctgggctgcgaggcacaggacctctacggcgccggatcacctggggccgaaacggccgaacaaaaactcatctcagaagaggatctgtcacctgcaaccggtcatcatcaccatcaccattga

SEQ ID NO: 745 - protein, 1619 aa, synthetic construct
  REGION 1..1619: note = Description of Artificial Sequence: Synthetic polypeptide
ATRRYYLGAVELSWDYMQSDLGELPVDARFPPRVPKSFPFNTSVVYKKTLFVEFTDHLFNIAKPRPPWMGLLGPTIQAEVYDTVVITLKNMASHPVSLHAVGVSYWKASEGAEYDDQTSQREKEDDKVFPGGSHTYVWQVLKENGPMASDPLCLTYSYLSHVDLVKDLNSGLIGALLVCREGSLAKEKTQTLHKFILLFAVFDEGKSWHSETKNSLMQDRDAASARAWPKMHTVNGYVNRSLPGLIGCHRKSVYWHVIGMGTTPEVHSIFLEGHTFLVRNHRQASLEISPITFLTAQTLLMDLGQFLLFCHISSHQHDGMEAYVKVDSCPEEPQLRMKNNEEAEDYDDDLTDSEMDVVRFDDDNSPSFIQIRSVAKKHPKTWVHYIAAEEEDWDYAPLVGAPTSTEPSEGSAPGSPAGSPTSTEEGTSTEPSEGSAPGTSTEPSEGSAPGTSESATPESGPGTSTEPSEGSAPGTSESATPESGPGSEPATSGSETPGTSTEPSEGSAPGTSTEPSEGSAPGTSESATPESGPGTSESATPESGPGASSLAPDDRSYKSQYLNNGPQRIGRKYKKVRFMAYTDETFKTREAIQHESGILGPLLYGEVGDTLLIIFKNQASRPYNIYPHGITDVRPLYSRRLPKGVKHLKDFPILPGEIFKYKWTVTVEDGPTKSDPRCLTRYYSSFVNMERDLASGLIGPLLICYKESVDQRGNQIMSDKRNVILFSVFDENRSWYLTENIQRFLPNPAGVQLEDPEFQASNIMHSINGYVFDSLQLSVCLHEVAYWYILSIGAQTDFLSVFFSGYTFKHKMVYEDTLTLFPFSGETVFMSMENPGLWILGCHNSDFRNRGMTALLKVSSCDKNTGDYYEDSYEDISAYLLSKNNAIEPRSFSQNPPVLKRHQREITRTTLQSDQEEIDYDDTISVEMKKEDFDIYDEDENQSPRSFQKKTRHYFIAAVERLWDYGMSSSPHVLRNRAQSGSVPQFKKVVFQEFTDGSFTQPLYRGELNEHLGLLGPYIRAEVEDNIMVTFRNQASRPYSFYSSLISYEEDQRQGAEPRKNFVKPNETKTYFWKVQHHMAPTKDEFDCKAWAYFSDVDLEKDVHSGLIGPLLVCHTNTLNPAHGRQVTVQEFALFFTIFDETKSWYFTENMERNCRAPCNIQMEDPTFKENYRFHAINGYIMDTLPGLVMAQDQRIRWYLLSMGSNENIHSIHFSGHVFTVRKKEEYKMALYNLYPGVFETVEMLPSKAGIWRVECLIGEHLHAGMSTLFLVYSNKCQTPLGMASGHIRDFQITASGQYGQWAPKLARLHYSGSINAWSTKEPFSWIKVDLLAPMIIHGIKTQGARQKFSSLYISQFIIMYSLDGKKWQTYRGNSTGTLMVFFGNVDSSGIKHNIFNPPIIARYIRLHPTHYSIRSTLRMELMGCDLNSCSMPLGMESKAISDAQITASSYFTNMFATWSPSKARLHLQGRSNAWRPQVNNPKEWLQVDFQKTMKVTGVTTQGVKSLLTSMYVKEFLISSSQDGHQWTLFFQNGKVKVFQGNQDSFTPVVNSLDPPLLTRYLRIHPQSWVHQIALRMEVLGCEAQDLYGAGSPGAETAEQKLISEEDLSPATGHHHHHH

SEQ ID NO: 746 - DNA, 4860 bp, synthetic construct
  misc_feature 1..4860: note = Description of Artificial Sequence: Synthetic polynucleotide
  source 1..4860: mol_type = other DNA
gccaccagaagatactacctgggtgcagtggaactgtcatgggactatatgcaaagtgatctcggtgagctgcctgtggacgcaagatttcctcctagagtgccaaaatcttttccattcaacacctcagtcgtgtacaaaaagactctgtttgtagaattcacggatcaccttttcaacatcgctaagccaaggccaccctggatgggtctgctaggtcctaccatccaggctgaggtttatgatacagtggtcattacacttaagaacatggcttcccatcctgtcagtcttcatgctgttggtgtatcctactggaaagcttctgagggagctgaatatgatgatcagaccagtcaaagggagaaagaagatgataaagtcttccctggtggaagccatacatatgtctggcaggtcctgaaagagaatggtccaatggcctctgacccactgtgccttacctactcatatctttctcatgtggacctggtaaaagacttgaattcaggcctcattggagccctactagtatgtagagaagggagtctggccaaggaaaagacacagaccttgcacaaatttatactactttttgctgtatttgatgaagggaaaagttggcactcagaaacaaagaactccttgatgcaggatagggatgctgcatctgctcgggcctggcctaaaatgcacacagtcaatggttatgtaaacaggtctctgccaggtctgattggatgccacaggaaatcagtctattggcatgtgattggaatgggcaccactcctgaagtgcactcaatattcctcgaaggtcacacatttcttgtgaggaaccatcgccaggctagcttggaaatctcgccaataactttccttactgctcaaacactcttgatggaccttggacagtttctactgttttgtcatatctcttcccaccaacatgatggcatggaagcttatgtcaaagtagacagctgtccagaggaaccccaactacgaatgaaaaataatgaagaagcggaagactatgatgatgatcttactgattctgaaatggatgtggtcaggtttgatgatgacaactctccttcctttatccaaattcgctcagttgccaagaagcatcctaaaacttgggtacattacattgctgctgaagaggaggactgggactatgctcccttagtcggcgcgccaaccagtacggagccgtccgaggggagcgcaccaggaagcccggctgggagcccgacttctaccgaagagggtacatctaccgaaccaagtgaaggttcagcaccaggcacctcaacagaaccctctgagggctcggcgcctggtacaagtgagtccgccaccccagaatccgggcctgggacaagcacagaaccttcggaagggagtgcccctggaacatccgaatcggcaaccccagaatcagggccaggatctgagcccgcgacttcgggctccgagacgcctgggacatccaccgagccctccgaaggatcagccccaggcaccagcacggagccctctgagggaagcgcacctggtaccagcgaaagcgcaactcccgaatcaggtcccggtacgagcgagtcggcgaccccggagagcgggccaggtgcctcgagcctcgcccccgatgacagaagttataaaagtcaatatttgaacaatggccctcagcggattggtaggaagtacaaaaaagtccgatttatggcatacacagatgaaacctttaagactcgtgaagctattcagcatgaatcaggaatcttgggacctttactttatggggaagttggagacacactgttgattatatttaagaatcaagcaagcagaccatataacatctaccctcacggaatcactgatgtccgtcctttgtattcaaggagattaccaaaaggtgtaaaacatttgaaggattttccaattctgccaggagaaatattcaaatataaatggacagtgactgtagaagatgggccaactaaatcagatcctcggtgcctgacccgctattactctagtttcgttaatatggagagagatctagcttcaggactcattggccctctcctcatctgctacaaagaatctgtagatcaaagaggaaaccagataatgtcagacaagaggaatgtcatcctgttttctgtatttgatgagaaccgaagctggtacctcacagagaatatacaacgctttctccccaatccagctggagtgcagcttgaggatccagagttccaagcctccaacatcatgcacagcatcaatggctatgtttttgatagtttgcagttgtcagtttgtttgcatgaggtggcatactggtacattctaagcattggagcacagactgacttcctttctgtcttcttctctggatataccttcaaacacaaaatggtctatgaagacacactcaccctattcccattctcaggagaaactgtcttcatgtcgatggaaaacccaggtctatggattctggggtgccacaactcagactttcggaacagaggcatgaccgccttactgaaggtttctagttgtgacaagaacactggtgattattacgaggacagttatgaagatatttcagcatacttgctgagtaaaaacaatgccattgaaccaagaagcttctctcaaaacccaccagtcttgaaacgccatcaacgggaaataactcgtactactcttcagtcagatcaagaggaaatcgattatgatgataccatatcagttgaaatgaagaaggaagattttgacatttatgatgaggatgaaaatcagagcccccgcagctttcaaaagaaaacacgacactattttattgctgcagtggagaggctctgggattatgggatgagtagctccccacatgttctaagaaacagggctcagagtggcagtgtccctcagttcaagaaagttgttttccaggaatttactgatggctcctttactcagcccttataccgtggagaactaaatgaacatttgggactcctggggccatatataagagcagaagttgaagataatatcatggtaactttcagaaatcaggcctctcgtccctattccttctattctagccttatttcttatgaggaagatcagaggcaaggagcagaacctagaaaaaactttgtcaagcctaatgaaaccaaaacttacttttggaaagtgcaacatcatatggcacccactaaagatgagtttgactgcaaagcctgggcttatttctctgatgttgacctggaaaaagatgtgcactcaggcctgattggaccccttctggtctgccacactaacacactgaaccctgctcatgggagacaagtgacagtacaggaatttgctctgtttttcaccatctttgatgagaccaaaagctggtacttcactgaaaatatggaaagaaactgcagggctccctgcaatatccagatggaagatcccacttttaaagagaattatcgcttccatgcaatcaatggctacataatggatacactacctggcttagtaatggctcaggatcaaaggattcgatggtatctgctcagcatgggcagcaatgaaaacatccattctattcatttcagtggacatgtgttcactgtacgaaaaaaagaggagtataaaatggcactgtacaatctctatccaggtgtttttgagacagtggaaatgttaccatccaaagctggaatttggcgggtggaatgccttattggcgagcatctacatgctgggatgagcacactttttctggtgtacagcaataagtgtcagactcccctgggaatggcttctggacacattagagattttcagattacagcttcaggacaatatggacagtgggccccaaagctggccagacttcattattccggatcaatcaatgcctggagcaccaaggagcccttttcttggatcaaggtggatctgttggcaccaatgattattcacggcatcaagacccagggtgcccgtcagaagttctccagcctctacatctctcagtttatcatcatgtatagtcttgatgggaagaagtggcagacttatcgaggaaattccactggaaccttaatggtcttctttggcaatgtggattcatctgggataaaacacaatatttttaaccctccaattattgctcgatacatccgtttgcacccaactcattatagcattcgcagcactcttcgcatggagttgatgggctgtgatttaaatagttgcagcatgccattgggaatggagagtaaagcaatatcagatgcacagattactgcttcatcctactttaccaatatgtttgccacctggtctccttcaaaagctcgacttcacctccaagggaggagtaatgcctggagacctcaggtgaataatccaaaagagtggctgcaagtggacttccagaagacaatgaaagtcacaggagtaactactcagggagtaaaatctctgcttaccagcatgtatgtgaaggagttcctcatctccagcagtcaagatggccatcagtggactctcttttttcagaatggcaaagtaaaggtttttcagggaaatcaagactccttcacacctgtggtgaactctctagacccaccgttactgactcgctaccttcgaattcacccccagagttgggtgcaccagattgccctgaggatggaggttctgggctgcgaggcacaggacctctacggcgccggatcacctggggccgaaacggccgaacaaaaactcatctcagaagaggatctgtcacctgcaaccggtcatcatcaccatcaccattga

SEQ ID NO: 747 - protein, 1619 aa, synthetic construct
  REGION 1..1619: note = Description of Artificial Sequence: Synthetic polypeptide
ATRRYYLGAVELSWDYMQSDLGELPVDARFPPRVPKSFPFNTSVVYKKTLFVEFTDHLFNIAKPRPPWMGLLGPTIQAEVYDTVVITLKNMASHPVSLHAVGVSYWKASEGAEYDDQTSQREKEDDKVFPGGSHTYVWQVLKENGPMASDPLCLTYSYLSHVDLVKDLNSGLIGALLVCREGSLAKEKTQTLHKFILLFAVFDEGKSWHSETKNSLMQDRDAASARAWPKMHTVNGYVNRSLPGLIGCHRKSVYWHVIGMGTTPEVHSIFLEGHTFLVRNHRQASLEISPITFLTAQTLLMDLGQFLLFCHISSHQHDGMEAYVKVDSCPEEPQLRMKNNEEAEDYDDDLTDSEMDVVRFDDDNSPSFIQIRSVAKKHPKTWVHYIAAEEEDWDYAPLVLAPDDRSYKSGAPTSTEPSEGSAPGSPAGSPTSTEEGTSTEPSEGSAPGTSTEPSEGSAPGTSESATPESGPGTSTEPSEGSAPGTSESATPESGPGSEPATSGSETPGTSTEPSEGSAPGTSTEPSEGSAPGTSESATPESGPGTSESATPESGPGASSQYLNNGPQRIGRKYKKVRFMAYTDETFKTREAIQHESGILGPLLYGEVGDTLLIIFKNQASRPYNIYPHGITDVRPLYSRRLPKGVKHLKDFPILPGEIFKYKWTVTVEDGPTKSDPRCLTRYYSSFVNMERDLASGLIGPLLICYKESVDQRGNQIMSDKRNVILFSVFDENRSWYLTENIQRFLPNPAGVQLEDPEFQASNIMHSINGYVFDSLQLSVCLHEVAYWYILSIGAQTDFLSVFFSGYTFKHKMVYEDTLTLFPFSGETVFMSMENPGLWILGCHNSDFRNRGMTALLKVSSCDKNTGDYYEDSYEDISAYLLSKNNAIEPRSFSQNPPVLKRHQREITRTTLQSDQEEIDYDDTISVEMKKEDFDIYDEDENQSPRSFQKKTRHYFIAAVERLWDYGMSSSPHVLRNRAQSGSVPQFKKVVFQEFTDGSFTQPLYRGELNEHLGLLGPYIRAEVEDNIMVTFRNQASRPYSFYSSLISYEEDQRQGAEPRKNFVKPNETKTYFWKVQHHMAPTKDEFDCKAWAYFSDVDLEKDVHSGLIGPLLVCHTNTLNPAHGRQVTVQEFALFFTIFDETKSWYFTENMERNCRAPCNIQMEDPTFKENYRFHAINGYIMDTLPGLVMAQDQRIRWYLLSMGSNENIHSIHFSGHVFTVRKKEEYKMALYNLYPGVFETVEMLPSKAGIWRVECLIGEHLHAGMSTLFLVYSNKCQTPLGMASGHIRDFQITASGQYGQWAPKLARLHYSGSINAWSTKEPFSWIKVDLLAPMIIHGIKTQGARQKFSSLYISQFIIMYSLDGKKWQTYRGNSTGTLMVFFGNVDSSGIKHNIFNPPIIARYIRLHPTHYSIRSTLRMELMGCDLNSCSMPLGMESKAISDAQITASSYFTNMFATWSPSKARLHLQGRSNAWRPQVNNPKEWLQVDFQKTMKVTGVTTQGVKSLLTSMYVKEFLISSSQDGHQWTLFFQNGKVKVFQGNQDSFTPVVNSLDPPLLTRYLRIHPQSWVHQIALRMEVLGCEAQDLYGAGSPGAETAEQKLISEEDLSPATGHHHHHH

SEQ ID NO: 748 - DNA, 4860 bp, synthetic construct
  misc_feature 1..4860: note = Description of Artificial Sequence: Synthetic polynucleotide
  source 1..4860: mol_type = other DNA
gccaccagaagatactacctgggtgcagtggaactgtcatgggactatatgcaaagtgatctcggtgagctgcctgtggacgcaagatttcctcctagagtgccaaaatcttttccattcaacacctcagtcgtgtacaaaaagactctgtttgtagaattcacggatcaccttttcaacatcgctaagccaaggccaccctggatgggtctgctaggtcctaccatccaggctgaggtttatgatacagtggtcattacacttaagaacatggcttcccatcctgtcagtcttcatgctgttggtgtatcctactggaaagcttctgagggagctgaatatgatgatcagaccagtcaaagggagaaagaagatgataaagtcttccctggtggaagccatacatatgtctggcaggtcctgaaagagaatggtccaatggcctctgacccactgtgccttacctactcatatctttctcatgtggacctggtaaaagacttgaattcaggcctcattggagccctactagtatgtagagaagggagtctggccaaggaaaagacacagaccttgcacaaatttatactactttttgctgtatttgatgaagggaaaagttggcactcagaaacaaagaactccttgatgcaggatagggatgctgcatctgctcgggcctggcctaaaatgcacacagtcaatggttatgtaaacaggtctctgccaggtctgattggatgccacaggaaatcagtctattggcatgtgattggaatgggcaccactcctgaagtgcactcaatattcctcgaaggtcacacatttcttgtgaggaaccatcgccaggctagcttggaaatctcgccaataactttccttactgctcaaacactcttgatggaccttggacagtttctactgttttgtcatatctcttcccaccaacatgatggcatggaagcttatgtcaaagtagacagctgtccagaggaaccccaactacgaatgaaaaataatgaagaagcggaagactatgatgatgatcttactgattctgaaatggatgtggtcaggtttgatgatgacaactctccttcctttatccaaattcgctcagttgccaagaagcatcctaaaacttgggtacattacattgctgctgaagaggaggactgggactatgctcccttagtcctcgcccccgatgacagaagttataaaagtggcgcgccaaccagtacggagccgtccgaggggagcgcaccaggaagcccggctgggagcccgacttctaccgaagagggtacatctaccgaaccaagtgaaggttcagcaccaggcacctcaacagaaccctctgagggctcggcgcctggtacaagtgagtccgccaccccagaatccgggcctgggacaagcacagaaccttcggaagggagtgcccctggaacatccgaatcggcaaccccagaatcagggccaggatctgagcccgcgacttcgggctccgagacgcctgggacatccaccgagccctccgaaggatcagccccaggcaccagcacggagccctctgagggaagcgcacctggtaccagcgaaagcgcaactcccgaatcaggtcccggtacgagcgagtcggcgaccccggagagcgggccaggtgcctcgagccaatatttgaacaatggccctcagcggattggtaggaagtacaaaaaagtccgatttatggcatacacagatgaaacctttaagactcgtgaagctattcagcatgaatcaggaatcttgggacctttactttatggggaagttggagacacactgttgattatatttaagaatcaagcaagcagaccatataacatctaccctcacggaatcactgatgtccgtcctttgtattcaaggagattaccaaaaggtgtaaaacatttgaaggattttccaattctgccaggagaaatattcaaatataaatggacagtgactgtagaagatgggccaactaaatcagatcctcggtgcctgacccgctattactctagtttcgttaatatggagagagatctagcttcaggactcattggccctctcctcatctgctacaaagaatctgtagatcaaagaggaaaccagataatgtcagacaagaggaatgtcatcctgttttctgtatttgatgagaaccgaagctggtacctcacagagaatatacaacgctttctccccaatccagctggagtgcagcttgaggatccagagttccaagcctccaacatcatgcacagcatcaatggctatgtttttgatagtttgcagttgtcagtttgtttgcatgaggtggcatactggtacattctaagcattggagcacagactgacttcctttctgtcttcttctctggatataccttcaaacacaaaatggtctatgaagacacactcaccctattcccattctcaggagaaactgtcttcatgtcgatggaaaacccaggtctatggattctggggtgccacaactcagactttcggaacagaggcatgaccgccttactgaaggtttctagttgtgacaagaacactggtgattattacgaggacagttatgaagatatttcagcatacttgctgagtaaaaacaatgccattgaaccaagaagcttctctcaaaacccaccagtcttgaaacgccatcaacgggaaataactcgtactactcttcagtcagatcaagaggaaatcgattatgatgataccatatcagttgaaatgaagaaggaagattttgacatttatgatgaggatgaaaatcagagcccccgcagctttcaaaagaaaacacgacactattttattgctgcagtggagaggctctgggattatgggatgagtagctccccacatgttctaagaaacagggctcagagtggcagtgtccctcagttcaagaaagttgttttccaggaatttactgatggctcctttactcagcccttataccgtggagaactaaatgaacatttgggactcctggggccatatataagagcagaagttgaagataatatcatggtaactttcagaaatcaggcctctcgtccctattccttctattctagccttatttcttatgaggaagatcagaggcaaggagcagaacctagaaaaaactttgtcaagcctaatgaaaccaaaacttacttttggaaagtgcaacatcatatggcacccactaaagatgagtttgactgcaaagcctgggcttatttctctgatgttgacctggaaaaagatgtgcactcaggcctgattggaccccttctggtctgccacactaacacactgaaccctgctcatgggagacaagtgacagtacaggaatttgctctgtttttcaccatctttgatgagaccaaaagctggtacttcactgaaaatatggaaagaaactgcagggctccctgcaatatccagatggaagatcccacttttaaagagaattatcgcttccatgcaatcaatggctacataatggatacactacctggcttagtaatggctcaggatcaaaggattcgatggtatctgctcagcatgggcagcaatgaaaacatccattctattcatttcagtggacatgtgttcactgtacgaaaaaaagaggagtataaaatggcactgtacaatctctatccaggtgtttttgagacagtggaaatgttaccatccaaagctggaatttggcgggtggaatgccttattggcgagcatctacatgctgggatgagcacactttttctggtgtacagcaataagtgtcagactcccctgggaatggcttctggacacattagagattttcagattacagcttcaggacaatatggacagtgggccccaaagctggccagacttcattattccggatcaatcaatgcctggagcaccaaggagcccttttcttggatcaaggtggatctgttggcaccaatgattattcacggcatcaagacccagggtgcccgtcagaagttctccagcctctacatctctcagtttatcatcatgtatagtcttgatgggaagaagtggcagacttatcgaggaaattccactggaaccttaatggtcttctttggcaatgtggattcatctgggataaaacacaatatttttaaccctccaattattgctcgatacatccgtttgcacccaactcattatagcattcgcagcactcttcgcatggagttgatgggctgtgatttaaatagttgcagcatgccattgggaatggagagtaaagcaatatcagatgcacagattactgcttcatcctactttaccaatatgtttgccacctggtctccttcaaaagctcgacttcacctccaagggaggagtaatgcctggagacctcaggtgaataatccaaaagagtggctgcaagtggacttccagaagacaatgaaagtcacaggagtaactactcagggagtaaaatctctgcttaccagcatgtatgtgaaggagttcctcatctccagcagtcaagatggccatcagtggactctcttttttcagaatggcaaagtaaaggtttttcagggaaatcaagactccttcacacctgtggtgaactctctagacccaccgttactgactcgctaccttcgaattcacccccagagttgggtgcaccagattgccctgaggatggaggttctgggctgcgaggcacaggacctctacggcgccggatcacctggggccgaaacggccgaacaaaaactcatctcagaagaggatctgtcacctgcaaccggtcatcatcaccatcaccattga

SEQ ID NO: 749 - protein, 1619 aa, synthetic construct
  REGION 1..1619: note = Description of Artificial Sequence: Synthetic polypeptide
ATRRYYLGAVELSWDYMQSDLGELPVDARFPPRVPKSFPFNTSVVYKKTLFVEFTDHLFNIAKPRPPWMGLLGPTIQAEVYDTVVITLKNMASHPVSLHAVGVSYWKASEGAEYDDQTSQREKEDDKVFPGGSHTYVWQVLKENGPMASDPLCLTYSYLSHVDLVKDLNSGLIGALLVCREGSLAKEKTQTLHKFILLFAVFDEGKSWHSETKNSLMQDRDAASARAWPKMHTVNGYVNRSLPGLIGCHRKSVYWHVIGMGTTPEVHSIFLEGHTFLVRNHRQASLEISPITFLTAQTLLMDLGQFLLFCHISSHQHDGMEAYVKVDSCPEEPQLRMKNNEEAEDYDDDLTDSEMDVVRFDDDNSPSFIQIRSVAKKHPKTWVHYIAAEEEDWDYAPLVLAPDDRSYKSQYLNNGPGAPTSTEPSEGSAPGSPAGSPTSTEEGTSTEPSEGSAPGTSTEPSEGSAPGTSESATPESGPGTSTEPSEGSAPGTSESATPESGPGSEPATSGSETPGTSTEPSEGSAPGTSTEPSEGSAPGTSESATPESGPGTSESATPESGPGASSQRIGRKYKKVRFMAYTDETFKTREAIQHESGILGPLLYGEVGDTLLIIFKNQASRPYNIYPHGITDVRPLYSRRLPKGVKHLKDFPILPGEIFKYKWTVTVEDGPTKSDPRCLTRYYSSFVNMERDLASGLIGPLLICYKESVDQRGNQIMSDKRNVILFSVFDENRSWYLTENIQRFLPNPAGVQLEDPEFQASNIMHSINGYVFDSLQLSVCLHEVAYWYILSIGAQTDFLSVFFSGYTFKHKMVYEDTLTLFPFSGETVFMSMENPGLWILGCHNSDFRNRGMTALLKVSSCDKNTGDYYEDSYEDISAYLLSKNNAIEPRSFSQNPPVLKRHQREITRTTLQSDQEEIDYDDTISVEMKKEDFDIYDEDENQSPRSFQKKTRHYFIAAVERLWDYGMSSSPHVLRNRAQSGSVPQFKKVVFQEFTDGSFTQPLYRGELNEHLGLLGPYIRAEVEDNIMVTFRNQASRPYSFYSSLISYEEDQRQGAEPRKNFVKPNETKTYFWKVQHHMAPTKDEFDCKAWAYFSDVDLEKDVHSGLIGPLLVCHTNTLNPAHGRQVTVQEFALFFTIFDETKSWYFTENMERNCRAPCNIQMEDPTFKENYRFHAINGYIMDTLPGLVMAQDQRIRWYLLSMGSNENIHSIHFSGHVFTVRKKEEYKMALYNLYPGVFETVEMLPSKAGIWRVECLIGEHLHAGMSTLFLVYSNKCQTPLGMASGHIRDFQITASGQYGQWAPKLARLHYSGSINAWSTKEPFSWIKVDLLAPMIIHGIKTQGARQKFSSLYISQFIIMYSLDGKKWQTYRGNSTGTLMVFFGNVDSSGIKHNIFNPPIIARYIRLHPTHYSIRSTLRMELMGCDLNSCSMPLGMESKAISDAQITASSYFTNMFATWSPSKARLHLQGRSNAWRPQVNNPKEWLQVDFQKTMKVTGVTTQGVKSLLTSMYVKEFLISSSQDGHQWTLFFQNGKVKVFQGNQDSFTPVVNSLDPPLLTRYLRIHPQSWVHQIALRMEVLGCEAQDLYGAGSPGAETAEQKLISEEDLSPATGHHHHHH

SEQ ID NO: 750 - DNA, 4860 bp, synthetic construct
  misc_feature 1..4860: note = Description of Artificial Sequence: Synthetic polynucleotide
  source 1..4860: mol_type = other DNA
gccaccagaagatactacctgggtgcagtggaactgtcatgggactatatgcaaagtgatctcggtgagctgcctgtggacgcaagatttcctcctagagtgccaaaatcttttccattcaacacctcagtcgtgtacaaaaagactctgtttgtagaattcacggatcaccttttcaacatcgctaagccaaggccaccctggatgggtctgctaggtcctaccatccaggctgaggtttatgatacagtggtcattacacttaagaacatggcttcccatcctgtcagtcttcatgctgttggtgtatcctactggaaagcttctgagggagctgaatatgatgatcagaccagtcaaagggagaaagaagatgataaagtcttccctggtggaagccatacatatgtctggcaggtcctgaaagagaatggtccaatggcctctgacccactgtgccttacctactcatatctttctcatgtggacctggtaaaagacttgaattcaggcctcattggagccctactagtatgtagagaagggagtctggccaaggaaaagacacagaccttgcacaaatttatactactttttgctgtatttgatgaagggaaaagttggcactcagaaacaaagaactccttgatgcaggatagggatgctgcatctgctcgggcctggcctaaaatgcacacagtcaatggttatgtaaacaggtctctgccaggtctgattggatgccacaggaaatcagtctattggcatgtgattggaatgggcaccactcctgaagtgcactcaatattcctcgaaggtcacacatttcttgtgaggaaccatcgccaggctagcttggaaatctcgccaataactttccttactgctcaaacactcttgatggaccttggacagtttctactgttttgtcatatctcttcccaccaacatgatggcatggaagcttatgtcaaagtagacagctgtccagaggaaccccaactacgaatgaaaaataatgaagaagcggaagactatgatgatgatcttactgattctgaaatggatgtggtcaggtttgatgatgacaactctccttcctttatccaaattcgctcagttgccaagaagcatcctaaaacttgggtacattacattgctgctgaagaggaggactgggactatgctcccttagtcctcgcccccgatgacagaagttataaaagtcaatatttgaacaatggccctggcgcgccaaccagtacggagccgtccgaggggagcgcaccaggaagcccggctgggagcccgacttctaccgaagagggtacatctaccgaaccaagtgaaggttcagcaccaggcacctcaacagaaccctctgagggctcggcgcctggtacaagtgagtccgccaccccagaatccgggcctgggacaagcacagaaccttcggaagggagtgcccctggaacatccgaatcggcaaccccagaatcagggccaggatctgagcccgcgacttcgggctccgagacgcctgggacatccaccgagccctccgaaggatcagccccaggcaccagcacggagccctctgagggaagcgcacctggtaccagcgaaagcgcaactcccgaatcaggtcccggtacgagcgagtcggcgaccccggagagcgggccaggtgcctcgagccagcggattggtaggaagtacaaaaaagtccgatttatggcatacacagatgaaacctttaagactcgtgaagctattcagcatgaatcaggaatcttgggacctttactttatggggaagttggagacacactgttgattatatttaagaatcaagcaagcagaccatataacatctaccctcacggaatcactgatgtccgtcctttgtattcaaggagattaccaaaaggtgtaaaacatttgaaggattttccaattctgccaggagaaatattcaaatataaatggacagtgactgtagaagatgggccaactaaatcagatcctcggtgcctgacccgctattactctagtttcgttaatatggagagagatctagcttcaggactcattggccctctcctcatctgctacaaagaatctgtagatcaaagaggaaaccagataatgtcagacaagaggaatgtcatcctgttttctgtatttgatgagaaccgaagctggtacctcacagagaatatacaacgctttctccccaatccagctggagtgcagcttgaggatccagagttccaagcctccaacatcatgcacagcatcaatggctatgtttttgatagtttgcagttgtcagtttgtttgcatgaggtggcatactggtacattctaagcattggagcacagactgacttcctttctgtcttcttctctggatataccttcaaacacaaaatggtctatgaagacacactcaccctattcccattctcaggagaaactgtcttcatgtcgatggaaaacccaggtctatggattctggggtgccacaactcagactttcggaacagaggcatgaccgccttactgaaggtttctagttgtgacaagaacactggtgattattacgaggacagttatgaagatatttcagcatacttgctgagtaaaaacaatgccattgaaccaagaagcttctctcaaaacccaccagtcttgaaacgccatcaacgggaaataactcgtactactcttcagtcagatcaagaggaaatcgattatgatgataccatatcagttgaaatgaagaaggaagattttgacatttatgatgaggatgaaaatcagagcccccgcagctttcaaaagaaaacacgacactattttattgctgcagtggagaggctctgggattatgggatgagtagctccccacatgttctaagaaacagggctcagagtggcagtgtccctcagttcaagaaagttgttttccaggaatttactgatggctcctttactcagcccttataccgtggagaactaaatgaacatttgggactcctggggccatatataagagcagaagttgaagataatatcatggtaactttcagaaatcaggcctctcgtccctattccttctattctagccttatttcttatgaggaagatcagaggcaaggagcagaacctagaaaaaactttgtcaagcctaatgaaaccaaaacttacttttggaaagtgcaacatcatatggcacccactaaagatgagtttgactgcaaagcctgggcttatttctctgatgttgacctggaaaaagatgtgcactcaggcctgattggaccccttctggtctgccacactaacacactgaaccctgctcatgggagacaagtgacagtacaggaatttgctctgtttttcaccatctttgatgagaccaaaagctggtacttcactgaaaatatggaaagaaactgcagggctccctgcaatatccagatggaagatcccacttttaaagagaattatcgcttccatgcaatcaatggctacataatggatacactacctggcttagtaatggctcaggatcaaaggattcgatggtatctgctcagcatgggcagcaatgaaaacatccattctattcatttcagtggacatgtgttcactgtacgaaaaaaagaggagtataaaatggcactgtacaatctctatccaggtgtttttgagacagtggaaatgttaccatccaaagctggaatttggcgggtggaatgccttattggcgagcatctacatgctgggatgagcacactttttctggtgtacagcaataagtgtcagactcccctgggaatggcttctggacacattagagattttcagattacagcttcaggacaatatggacagtgggccccaaagctggccagacttcattattccggatcaatcaatgcctggagcaccaaggagcccttttcttggatcaaggtggatctgttggcaccaatgattattcacggcatcaagacccagggtgcccgtcagaagttctccagcctctacatctctcagtttatcatcatgtatagtcttgatgggaagaagtggcagacttatcgaggaaattccactggaaccttaatggtcttctttggcaatgtggattcatctgggataaaacacaatatttttaaccctccaattattgctcgatacatccgtttgcacccaactcattatagcattcgcagcactcttcgcatggagttgatgggctgtgatttaaatagttgcagcatgccattgggaatggagagtaaagcaatatcagatgcacagattactgcttcatcctactttaccaatatgtttgccacctggtctccttcaaaagctcgacttcacctccaagggaggagtaatgcctggagacctcaggtgaataatccaaaagagtggctgcaagtggacttccagaagacaatgaaagtcacaggagtaactactcagggagtaaaatctctgcttaccagcatgtatgtgaaggagttcctcatctccagcagtcaagatggccatcagtggactctcttttttcagaatggcaaagtaaaggtttttcagggaaatcaagactccttcacacctgtggtgaactctctagacccaccgttactgactcgctaccttcgaattcacccccagagttgggtgcaccagattgccctgaggatggaggttctgggctgcgaggcacaggacctctacggcgccggatcacctggggccgaaacggccgaacaaaaactcatctcagaagaggatctgtcacctgcaaccggtcatcatcaccatcaccattga

SEQ ID NO: 751 - protein, 1619 aa, synthetic construct
  REGION 1..1619: note = Description of Artificial Sequence: Synthetic polypeptide
ATRRYYLGAVELSWDYMQSDLGELPVDARFPPRVPKSFPFNTSVVYKKTLFVEFTDHLFNIAKPRPPWMGLLGPTIQAEVYDTVVITLKNMASHPVSLHAVGVSYWKASEGAEYDDQTSQREKEDDKVFPGGSHTYVWQVLKENGPMASDPLCLTYSYLSHVDLVKDLNSGLIGALLVCREGSLAKEKTQTLHKFILLFAVFDEGKSWHSETKNSLMQDRDAASARAWPKMHTVNGYVNRSLPGLIGCHRKSVYWHVIGMGTTPEVHSIFLEGHTFLVRNHRQASLEISPITFLTAQTLLMDLGQFLLFCHISSHQHDGMEAYVKVDSCPEEPQLRMKNNEEAEDYDDDLTDSEMDVVRFDDDNSPSFIQIRSVAKKHPKTWVHYIAAEEEDWDYAPLVLAPDDRSYKSQYLNNGPQRIGRKYKKVRFMAYTDETFKTREAIQHESGILGPLLYGEVGDTLLIIFKNQASRPYNIYPHGITDVRPLYGAPTSTEPSEGSAPGSPAGSPTSTEEGTSTEPSEGSAPGTSTEPSEGSAPGTSESATPESGPGTSTEPSEGSAPGTSESATPESGPGSEPATSGSETPGTSTEPSEGSAPGTSTEPSEGSAPGTSESATPESGPGTSESATPESGPGASSSRRLPKGVKHLKDFPILPGEIFKYKWTVTVEDGPTKSDPRCLTRYYSSFVNMERDLASGLIGPLLICYKESVDQRGNQIMSDKRNVILFSVFDENRSWYLTENIQRFLPNPAGVQLEDPEFQASNIMHSINGYVFDSLQLSVCLHEVAYWYILSIGAQTDFLSVFFSGYTFKHKMVYEDTLTLFPFSGETVFMSMENPGLWILGCHNSDFRNRGMTALLKVSSCDKNTGDYYEDSYEDISAYLLSKNNAIEPRSFSQNPPVLKRHQREITRTTLQSDQEEIDYDDTISVEMKKEDFDIYDEDENQSPRSFQKKTRHYFIAAVERLWDYGMSSSPHVLRNRAQSGSVPQFKKVVFQEFTDGSFTQPLYRGELNEHLGLLGPYIRAEVEDNIMVTFRNQASRPYSFYSSLISYEEDQRQGAEPRKNFVKPNETKTYFWKVQHHMAPTKDEFDCKAWAYFSDVDLEKDVHSGLIGPLLVCHTNTLNPAHGRQVTVQEFALFFTIFDETKSWYFTENMERNCRAPCNIQMEDPTFKENYRFHAINGYIMDTLPGLVMAQDQRIRWYLLSMGSNENIHSIHFSGHVFTVRKKEEYKMALYNLYPGVFETVEMLPSKAGIWRVECLIGEHLHAGMSTLFLVYSNKCQTPLGMASGHIRDFQITASGQYGQWAPKLARLHYSGSINAWSTKEPFSWIKVDLLAPMIIHGIKTQGARQKFSSLYISQFIIMYSLDGKKWQTYRGNSTGTLMVFFGNVDSSGIKHNIFNPPIIARYIRLHPTHYSIRSTLRMELMGCDLNSCSMPLGMESKAISDAQITASSYFTNMFATWSPSKARLHLQGRSNAWRPQVNNPKEWLQVDFQKTMKVTGVTTQGVKSLLTSMYVKEFLISSSQDGHQWTLFFQNGKVKVFQGNQDSFTPVVNSLDPPLLTRYLRIHPQSWVHQIALRMEVLGCEAQDLYGAGSPGAETAEQKLISEEDLSPATGHHHHHH

SEQ ID NO: 752 - DNA, 4860 bp, synthetic construct
  misc_feature 1..4860: note = Description of Artificial Sequence: Synthetic polynucleotide
  source 1..4860: mol_type = other DNA
gccaccagaagatactacctgggtgcagtggaactgtcatgggactatatgcaaagtgatctcggtgagctgcctgtggacgcaagatttcctcctagagtgccaaaatcttttccattcaacacctcagtcgtgtacaaaaagactctgtttgtagaattcacggatcaccttttcaacatcgctaagccaaggccaccctggatgggtctgctaggtcctaccatccaggctgaggtttatgatacagtggtcattacacttaagaacatggcttcccatcctgtcagtcttcatgctgttggtgtatcctactggaaagcttctgagggagctgaatatgatgatcagaccagtcaaagggagaaagaagatgataaagtcttccctggtggaagccatacatatgtctggcaggtcctgaaagagaatggtccaatggcctctgacccactgtgccttacctactcatatctttctcatgtggacctggtaaaagacttgaattcaggcctcattggagccctactagtatgtagagaagggagtctggccaaggaaaagacacagaccttgcacaaatttatactactttttgctgtatttgatgaagggaaaagttggcactcagaaacaaagaactccttgatgcaggatagggatgctgcatctgctcgggcctggcctaaaatgcacacagtcaatggttatgtaaacaggtctctgccaggtctgattggatgccacaggaaatcagtctattggcatgtgattggaatgggcaccactcctgaagtgcactcaatattcctcgaaggtcacacatttcttgtgaggaaccatcgccaggctagcttggaaatctcgccaataactttccttactgctcaaacactcttgatggaccttggacagtttctactgttttgtcatatctcttcccaccaacatgatggcatggaagcttatgtcaaagtagacagctgtccagaggaaccccaactacgaatgaaaaataatgaagaagcggaagactatgatgatgatcttactgattctgaaatggatgtggtcaggtttgatgatgacaactctccttcctttatccaaattcgctcagttgccaagaagcatcctaaaacttgggtacattacattgctgctgaagaggaggactgggactatgctcccttagtcctcgcccccgatgacagaagttataaaagtcaatatttgaacaatggccctcagcggattggtaggaagtacaaaaaagtccgatttatggcatacacagatgaaacctttaagactcgtgaagctattcagcatgaatcaggaatcttgggacctttactttatggggaagttggagacacactgttgattatatttaagaatcaagcaagcagaccatataacatctaccctcacggaatcactgatgtccgtcctttgtatggcgcgccaaccagtacggagccgtccgaggggagcgcaccaggaagcccggctgggagcccgacttctaccgaagagggtacatctaccgaaccaagtgaaggttcagcaccaggcacctcaacagaaccctctgagggctcggcgcctggtacaagtgagtccgccaccccagaatccgggcctgggacaagcacagaaccttcggaagggagtgcccctggaacatccgaatcggcaaccccagaatcagggccaggatctgagcccgcgacttcgggctccgagacgcctgggacatccaccgagccctccgaaggatcagccccaggcaccagcacggagccctctgagggaagcgcacctggtaccagcgaaagcgcaactcccgaatcaggtcccggtacgagcgagtcggcgaccccggagagcgggccaggtgcctcgagctcaaggagattaccaaaaggtgtaaaacatttgaaggattttccaattctgccaggagaaatattcaaatataaatggacagtgactgtagaagatgggccaactaaatcagatcctcggtgcctgacccgctattactctagtttcgttaatatggagagagatctagcttcaggactcattggccctctcctcatctgctacaaagaatctgtagatcaaagaggaaaccagataatgtcagacaagaggaatgtcatcctgttttctgtatttgatgagaaccgaagctggtacctcacagagaatatacaacgctttctccccaatccagctggagtgcagcttgaggatccagagttccaagcctccaacatcatgcacagcatcaatggctatgtttttgatagtttgcagttgtcagtttgtttgcatgaggtggcatactggtacattctaagcattggagcacagactgacttcctttctgtcttcttctctggatataccttcaaacacaaaatggtctatgaagacacactcaccctattcccattctcaggagaaactgtcttcatgtcgatggaaaacccaggtctatggattctggggtgccacaactcagactttcggaacagaggcatgaccgccttactgaaggtttctagttgtgacaagaacactggtgattattacgaggacagttatgaagatatttcagcatacttgctgagtaaaaacaatgccattgaaccaagaagcttctctcaaaacccaccagtcttgaaacgccatcaacgggaaataactcgtactactcttcagtcagatcaagaggaaatcgattatgatgataccatatcagttgaaatgaagaaggaagattttgacatttatgatgaggatgaaaatcagagcccccgcagctttcaaaagaaaacacgacactattttattgctgcagtggagaggctctgggattatgggatgagtagctccccacatgttctaagaaacagggctcagagtggcagtgtccctcagttcaagaaagttgttttccaggaatttactgatggctcctttactcagcccttataccgtggagaactaaatgaacatttgggactcctggggccatatataagagcagaagttgaagataatatcatggtaactttcagaaatcaggcctctcgtccctattccttctattctagccttatttcttatgaggaagatcagaggcaaggagcagaacctagaaaaaactttgtcaagcctaatgaaaccaaaacttacttttggaaagtgcaacatcatatggcacccactaaagatgagtttgactgcaaagcctgggcttatttctctgatgttgacctggaaaaagatgtgcactcaggcctgattggaccccttctggtctgccacactaacacactgaaccctgctcatgggagacaagtgacagtacaggaatttgctctgtttttcaccatctttgatgagaccaaaagctggtacttcactgaaaatatggaaagaaactgcagggctccctgcaatatccagatggaagatcccacttttaaagagaattatcgcttccatgcaatcaatggctacataatggatacactacctggcttagtaatggctcaggatcaaaggattcgatggtatctgctcagcatgggcagcaatgaaaacatccattctattcatttcagtggacatgtgttcactgtacgaaaaaaagaggagtataaaatggcactgtacaatctctatccaggtgtttttgagacagtggaaatgttaccatccaaagctggaatttggcgggtggaatgccttattggcgagcatctacatgctgggatgagcacactttttctggtgtacagcaataagtgtcagactcccctgggaatggcttctggacacattagagattttcagattacagcttcaggacaatatggacagtgggccccaaagctggccagacttcattattccggatcaatcaatgcctggagcaccaaggagcccttttcttggatcaaggtggatctgttggcaccaatgattattcacggcatcaagacccagggtgcccgtcagaagttctccagcctctacatctctcagtttatcatcatgtatagtcttgatgggaagaagtggcagacttatcgaggaaattccactggaaccttaatggtcttctttggcaatgtggattcatctgggataaaacacaatatttttaaccctccaattattgctcgatacatccgtttgcacccaactcattatagcattcgcagcactcttcgcatggagttgatgggctgtgatttaaatagttgcagcatgccattgggaatggagagtaaagcaatatcagatgcacagattactgcttcatcctactttaccaatatgtttgccacctggtctccttcaaaagctcgacttcacctccaagggaggagtaatgcctggagacctcaggtgaataatccaaaagagtggctgcaagtggacttccagaagacaatgaaagtcacaggagtaactactcagggagtaaaatctctgcttaccagcatgtatgtgaaggagttcctcatctccagcagtcaagatggccatcagtggactctcttttttcagaatggcaaagtaaaggtttttcagggaaatcaagactccttcacacctgtggtgaactctctagacccaccgttactgactcgctaccttcgaattcacccccagagttgggtgcaccagattgccctgaggatggaggttctgggctgcgaggcacaggacctctacggcgccggatcacctggggccgaaacggccgaacaaaaactcatctcagaagaggatctgtcacctgcaaccggtcatcatcaccatcaccattga

SEQ ID NO: 753 - protein, 1619 aa, synthetic construct
  REGION 1..1619: note = Description of Artificial Sequence: Synthetic polypeptide
ATRRYYLGAVELSWDYMQSDLGELPVDARFPPRVPKSFPFNTSVVYKKTLFVEFTDHLFNIAKPRPPWMGLLGPTIQAEVYDTVVITLKNMASHPVSLHAVGVSYWKASEGAEYDDQTSQREKEDDKVFPGGSHTYVWQVLKENGPMASDPLCLTYSYLSHVDLVKDLNSGLIGALLVCREGSLAKEKTQTLHKFILLFAVFDEGKSWHSETKNSLMQDRDAASARAWPKMHTVNGYVNRSLPGLIGCHRKSVYWHVIGMGTTPEVHSIFLEGHTFLVRNHRQASLEISPITFLTAQTLLMDLGQFLLFCHISSHQHDGMEAYVKVDSCPEEPQLRMKNNEEAEDYDDDLTDSEMDVVRFDDDNSPSFIQIRSVAKKHPKTWVHYIAAEEEDWDYAPLVLAPDDRSYKSQYLNNGPQRIGRKYKKVRFMAYTDETFKTREAIQHESGILGPLLYGEVGDTLLIIFKNQASRPYNIYPHGITDVRPLYSRRLPKGGAPTSTEPSEGSAPGSPAGSPTSTEEGTSTEPSEGSAPGTSTEPSEGSAPGTSESATPESGPGTSTEPSEGSAPGTSESATPESGPGSEPATSGSETPGTSTEPSEGSAPGTSTEPSEGSAPGTSESATPESGPGTSESATPESGPGASSVKHLKDFPILPGEIFKYKWTVTVEDGPTKSDPRCLTRYYSSFVNMERDLASGLIGPLLICYKESVDQRGNQIMSDKRNVILFSVFDENRSWYLTENIQRFLPNPAGVQLEDPEFQASNIMHSINGYVFDSLQLSVCLHEVAYWYILSIGAQTDFLSVFFSGYTFKHKMVYEDTLTLFPFSGETVFMSMENPGLWILGCHNSDFRNRGMTALLKVSSCDKNTGDYYEDSYEDISAYLLSKNNAIEPRSFSQNPPVLKRHQREITRTTLQSDQEEIDYDDTISVEMKKEDFDIYDEDENQSPRSFQKKTRHYFIAAVERLWDYGMSSSPHVLRNRAQSGSVPQFKKVVFQEFTDGSFTQPLYRGELNEHLGLLGPYIRAEVEDNIMVTFRNQASRPYSFYSSLISYEEDQRQGAEPRKNFVKPNETKTYFWKVQHHMAPTKDEFDCKAWAYFSDVDLEKDVHSGLIGPLLVCHTNTLNPAHGRQVTVQEFALFFTIFDETKSWYFTENMERNCRAPCNIQMEDPTFKENYRFHAINGYIMDTLPGLVMAQDQRIRWYLLSMGSNENIHSIHFSGHVFTVRKKEEYKMALYNLYPGVFETVEMLPSKAGIWRVECLIGEHLHAGMSTLFLVYSNKCQTPLGMASGHIRDFQITASGQYGQWAPKLARLHYSGSINAWSTKEPFSWIKVDLLAPMIIHGIKTQGARQKFSSLYISQFIIMYSLDGKKWQTYRGNSTGTLMVFFGNVDSSGIKHNIFNPPIIARYIRLHPTHYSIRSTLRMELMGCDLNSCSMPLGMESKAISDAQITASSYFTNMFATWSPSKARLHLQGRSNAWRPQVNNPKEWLQVDFQKTMKVTGVTTQGVKSLLTSMYVKEFLISSSQDGHQWTLFFQNGKVKVFQGNQDSFTPVVNSLDPPLLTRYLRIHPQSWVHQIALRMEVLGCEAQDLYGAGSPGAETAEQKLISEEDLSPATGHHHHHH

SEQ ID NO: 754 - DNA, 4860 bp, synthetic construct
  misc_feature 1..4860: note = Description of Artificial Sequence: Synthetic polynucleotide
  source 1..4860: mol_type = other DNA
gccaccagaagatactacctgggtgcagtggaactgtcatgggactatatgcaaagtgatctcggtgagctgcctgtggacgcaagatttcctcctagagtgccaaaatcttttccattcaacacctcagtcgtgtacaaaaagactctgtttgtagaattcacggatcaccttttcaacatcgctaagccaaggccaccctggatgggtctgctaggtcctaccatccaggctgaggtttatgatacagtggtcattacacttaagaacatggcttcccatcctgtcagtcttcatgctgttggtgtatcctactggaaagcttctgagggagctgaatatgatgatcagaccagtcaaagggagaaagaagatgataaagtcttccctggtggaagccatacatatgtctggcaggtcctgaaagagaatggtccaatggcctctgacccactgtgccttacctactcatatctttctcatgtggacctggtaaaagacttgaattcaggcctcattggagccctactagtatgtagagaagggagtctggccaaggaaaagacacagaccttgcacaaatttatactactttttgctgtatttgatgaagggaaaagttggcactcagaaacaaagaactccttgatgcaggatagggatgctgcatctgctcgggcctggcctaaaatgcacacagtcaatggttatgtaaacaggtctctgccaggtctgattggatgccacaggaaatcagtctattggcatgtgattggaatgggcaccactcctgaagtgcactcaatattcctcgaaggtcacacatttcttgtgaggaaccatcgccaggctagcttggaaatctcgccaataactttccttactgctcaaacactcttgatggaccttggacagtttctactgttttgtcatatctcttcccaccaacatgatggcatggaagcttatgtcaaagtagacagctgtccagaggaaccccaactacgaatgaaaaataatgaagaagcggaagactatgatgatgatcttactgattctgaaatggatgtggtcaggtttgatgatgacaactctccttcctttatccaaattcgctcagttgccaagaagcatcctaaaacttgggtacattacattgctgctgaagaggaggactgggactatgctcccttagtcctcgcccccgatgacagaagttataaaagtcaatatttgaacaatggccctcagcggattggtaggaagtacaaaaaagtccgatttatggcatacacagatgaaacctttaagactcgtgaagctattcagcatgaatcaggaatcttgggacctttactttatggggaagttggagacacactgttgattatatttaagaatcaagcaagcagaccatataacatctaccctcacggaatcactgatgtccgtcctttgtattcaaggagattaccaaaaggtggcgcgccaaccagtacggagccgtccgaggggagcgcaccaggaagcccggctgggagcccgacttctaccgaagagggtacatctaccgaaccaagtgaaggttcagcaccaggcacctcaacagaaccctctgagggctcggcgcctggtacaagtgagtccgccaccccagaatccgggcctgggacaagcacagaaccttcggaagggagtgcccctggaacatccgaatcggcaaccccagaatcagggccaggatctgagcccgcgacttcgggctccgagacgcctgggacatccaccgagccctccgaaggatcagccccaggcaccagcacggagccctctgagggaagcgcacctggtaccagcgaaagcgcaactcccgaatcaggtcccggtacgagcgagtcggcgaccccggagagcgggccaggtgcctcgagcgtaaaacatttgaaggattttccaattctgccaggagaaatattcaaatataaatggacagtgactgtagaagatgggccaactaaatcagatcctcggtgcctgacccgctattactctagtttcgttaatatggagagagatctagcttcaggactcattggccctctcctcatctgctacaaagaatctgtagatcaaagaggaaaccagataatgtcagacaagaggaatgtcatcctgttttctgtatttgatgagaaccgaagctggtacctcacagagaatatacaacgctttctccccaatccagctggagtgcagcttgaggatccagagttccaagcctccaacatcatgcacagcatcaatggctatgtttttgatagtttgcagttgtcagtttgtttgcatgaggtggcatactggtacattctaagcattggagcacagactgacttcctttctgtcttcttctctggatataccttcaaacacaaaatggtctatgaagacacactcaccctattcccattctcaggagaaactgtcttcatgtcgatggaaaacccaggtctatggattctggggtgccacaactcagactttcggaacagaggcatgaccgccttactgaaggtttctagttgtgacaagaacactggtgattattacgaggacagttatgaagatatttcagcatacttgctgagtaaaaacaatgccattgaaccaagaagcttctctcaaaacccaccagtcttgaaacgccatcaacgggaaataactcgtactactcttcagtcagatcaagaggaaatcgattatgatgataccatatcagttgaaatgaagaaggaagattttgacatttatgatgaggatgaaaatcagagcccccgcagctttcaaaagaaaacacgacactattttattgctgcagtggagaggctctgggattatgggatgagtagctccccacatgttctaagaaacagggctcagagtggcagtgtccctcagttcaagaaagttgttttccaggaatttactgatggctcctttactcagcccttataccgtggagaactaaatgaacatttgggactcctggggccatatataagagcagaagttgaagataatatcatggtaactttcagaaatcaggcctctcgtccctattccttctattctagccttatttcttatgaggaagatcagaggcaaggagcagaacctagaaaaaactttgtcaagcctaatgaaaccaaaacttacttttggaaagtgcaacatcatatggcacccactaaagatgagtttgactgcaaagcctgggcttatttctctgatgttgacctggaaaaagatgtgcactcaggcctgattggaccccttctggtctgccacactaacacactgaaccctgctcatgggagacaagtgacagtacaggaatttgctctgtttttcaccatctttgatgagaccaaaagctggtacttcactgaaaatatggaaagaaactgcagggctccctgcaatatccagatggaagatcccacttttaaagagaattatcgcttccatgcaatcaatggctacataatggatacactacctggcttagtaatggctcaggatcaaaggattcgatggtatctgctcagcatgggcagcaatgaaaacatccattctattcatttcagtggacatgtgttcactgtacgaaaaaaagaggagtataaaatggcactgtacaatctctatccaggtgtttttgagacagtggaaatgttaccatccaaagctggaatttggcgggtggaatgccttattggcgagcatctacatgctgggatgagcacactttttctggtgtacagcaataagtgtcagactcccctgggaatggcttctggacacattagagattttcagattacagcttcaggacaatatggacagtgggccccaaagctggccagacttcattattccggatcaatcaatgcctggagcaccaaggagcccttttcttggatcaaggtggatctgttggcaccaatgattattcacggcatcaagacccagggtgcccgtcagaagttctccagcctctacatctctcagtttatcatcatgtatagtcttgatgggaagaagtggcagacttatcgaggaaattccactggaaccttaatggtcttctttggcaatgtggattcatctgggataaaacacaatatttttaaccctccaattattgctcgatacatccgtttgcacccaactcattatagcattcgcagcactcttcgcatggagttgatgggctgtgatttaaatagttgcagcatgccattgggaatggagagtaaagcaatatcagatgcacagattactgcttcatcctactttaccaatatgtttgccacctggtctccttcaaaagctcgacttcacctccaagggaggagtaatgcctggagacctcaggtgaataatccaaaagagtggctgcaagtggacttccagaagacaatgaaagtcacaggagtaactactcagggagtaaaatctctgcttaccagcatgtatgtgaaggagttcctcatctccagcagtcaagatggccatcagtggactctcttttttcagaatggcaaagtaaaggtttttcagggaaatcaagactccttcacacctgtggtgaactctctagacccaccgttactgactcgctaccttcgaattcacccccagagttgggtgcaccagattgccctgaggatggaggttctgggctgcgaggcacaggacctctacggcgccggatcacctggggccgaaacggccgaacaaaaactcatctcagaagaggatctgtcacctgcaaccggtcatcatcaccatcaccattga

SEQ ID NO: 755 - protein, 1619 aa, synthetic construct
  REGION 1..1619: note = Description of Artificial Sequence: Synthetic polypeptide
ATRRYYLGAVELSWDYMQSDLGELPVDARFPPRVPKSFPFNTSVVYKKTLFVEFTDHLFNIAKPRPPWMGLLGPTIQAEVYDTVVITLKNMASHPVSLHAVGVSYWKASEGAEYDDQTSQREKEDDKVFPGGSHTYVWQVLKENGPMASDPLCLTYSYLSHVDLVKDLNSGLIGALLVCREGSLAKEKTQTLHKFILLFAVFDEGKSWHSETKNSLMQDRDAASARAWPKMHTVNGYVNRSLPGLIGCHRKSVYWHVIGMGTTPEVHSIFLEGHTFLVRNHRQASLEISPITFLTAQTLLMDLGQFLLFCHISSHQHDGMEAYVKVDSCPEEPQLRMKNNEEAEDYDDDLTDSEMDVVRFDDDNSPSFIQIRSVAKKHPKTWVHYIAAEEEDWDYAPLVLAPDDRSYKSQYLNNGPQRIGRKYKKVRFMAYTDETFKTREAIQHESGILGPLLYGEVGDTLLIIFKNQASRPYNIYPHGITDVRPLYSRRLPKGVKHLKDGAPTSTEPSEGSAPGSPAGSPTSTEEGTSTEPSEGSAPGTSTEPSEGSAPGTSESATPESGPGTSTEPSEGSAPGTSESATPESGPGSEPATSGSETPGTSTEPSEGSAPGTSTEPSEGSAPGTSESATPESGPGTSESATPESGPGASSFPILPGEIFKYKWTVTVEDGPTKSDPRCLTRYYSSFVNMERDLASGLIGPLLICYKESVDQRGNQIMSDKRNVILFSVFDENRSWYLTENIQRFLPNPAGVQLEDPEFQASNIMHSINGYVFDSLQLSVCLHEVAYWYILSIGAQTDFLSVFFSGYTFKHKMVYEDTLTLFPFSGETVFMSMENPGLWILGCHNSDFRNRGMTALLKVSSCDKNTGDYYEDSYEDISAYLLSKNNAIEPRSFSQNPPVLKRHQREITRTTLQSDQEEIDYDDTISVEMKKEDFDIYDEDENQSPRSFQKKTRHYFIAAVERLWDYGMSSSPHVLRNRAQSGSVPQFKKVVFQEFTDGSFTQPLYRGELNEHLGLLGPYIRAEVEDNIMVTFRNQASRPYSFYSSLISYEEDQRQGAEPRKNFVKPNETKTYFWKVQHHMAPTKDEFDCKAWAYFSDVDLEKDVHSGLIGPLLVCHTNTLNPAHGRQVTVQEFALFFTIFDETKSWYFTENMERNCRAPCNIQMEDPTFKENYRFHAINGYIMDTLPGLVMAQDQRIRWYLLSMGSNENIHSIHFSGHVFTVRKKEEYKMALYNLYPGVFETVEMLPSKAGIWRVECLIGEHLHAGMSTLFLVYSNKCQTPLGMASGHIRDFQITASGQYGQWAPKLARLHYSGSINAWSTKEPFSWIKVDLLAPMIIHGIKTQGARQKFSSLYISQFIIMYSLDGKKWQTYRGNSTGTLMVFFGNVDSSGIKHNIFNPPIIARYIRLHPTHYSIRSTLRMELMGCDLNSCSMPLGMESKAISDAQITASSYFTNMFATWSPSKARLHLQGRSNAWRPQVNNPKEWLQVDFQKTMKVTGVTTQGVKSLLTSMYVKEFLISSSQDGHQWTLFFQNGKVKVFQGNQDSFTPVVNSLDPPLLTRYLRIHPQSWVHQIALRMEVLGCEAQDLYGAGSPGAETAEQKLISEEDLSPATGHHHHHH

SEQ ID NO: 756 - DNA, 4860 bp, synthetic construct
  misc_feature 1..4860: note = Description of Artificial Sequence: Synthetic polynucleotide
  source 1..4860: mol_type = other DNA
gccaccagaagatactacctgggtgcagtggaactgtcatgggactatatgcaaagtgatctcggtgagctgcctgtggacgcaagatttcctcctagagtgccaaaatcttttccattcaacacctcagtcgtgtacaaaaagactctgtttgtagaattcacggatcaccttttcaacatcgctaagccaaggccaccctggatgggtctgctaggtcctaccatccaggctgaggtttatgatacagtggtcattacacttaagaacatggcttcccatcctgtcagtcttcatgctgttggtgtatcctactggaaagcttctgagggagctgaatatgatgatcagaccagtcaaagggagaaagaagatgataaagtcttccctggtggaagccatacatatgtctggcaggtcctgaaagagaatggtccaatggcctctgacccactgtgccttacctactcatatctttctcatgtggacctggtaaaagacttgaattcaggcctcattggagccctactagtatgtagagaagggagtctggccaaggaaaagacacagaccttgcacaaatttatactactttttgctgtatttgatgaagggaaaagttggcactcagaaacaaagaactccttgatgcaggatagggatgctgcatctgctcgggcctggcctaaaatgcacacagtcaatggttatgtaaacaggtctctgccaggtctgattggatgccacaggaaatcagtctattggcatgtgattggaatgggcaccactcctgaagtgcactcaatattcctcgaaggtcacacatttcttgtgaggaaccatcgccaggctagcttggaaatctcgccaataactttccttactgctcaaacactcttgatggaccttggacagtttctactgttttgtcatatctcttcccaccaacatgatggcatggaagcttatgtcaaagtagacagctgtccagaggaaccccaactacgaatgaaaaataatgaagaagcggaagactatgatgatgatcttactgattctgaaatggatgtggtcaggtttgatgatgacaactctccttcctttatccaaattcgctcagttgccaagaagcatcctaaaacttgggtacattacattgctgctgaagaggaggactgggactatgctcccttagtcctcgcccccgatgacagaagttataaaagtcaatatttgaacaatggccctcagcggattggtaggaagtacaaaaaagtccgatttatggcatacacagatgaaacctttaagactcgtgaagctattcagcatgaatcaggaatcttgggacctttactttatggggaagttggagacacactgttgattatatttaagaatcaagcaagcagaccatataacatctaccctcacggaatcactgatgtccgtcctttgtattcaaggagattaccaaaaggtgtaaaacatttgaaggatggcgcgccaaccagtacggagccgtccgaggggagcgcaccaggaagcccggctgggagcccgacttctaccgaagagggtacatctaccgaaccaagtgaaggttcagcaccaggcacctcaacagaaccctctgagggctcggcgcctggtacaagtgagtccgccaccccagaatccgggcctgggacaagcacagaaccttcggaagggagtgcccctggaacatccgaatcggcaaccccagaatcagggccaggatctgagcccgcgacttcgggctccgagacgcctgggacatccaccgagccctccgaaggatcagccccaggcaccagcacggagccctctgagggaagcgcacctggtaccagcgaaagcgcaactcccgaatcaggtcccggtacgagcgagtcggcgaccccggagagcgggccaggtgcctcgagctttccaattctgccaggagaaatattcaaatataaatggacagtgactgtagaagatgggccaactaaatcagatcctcggtgcctgacccgctattactctagtttcgttaatatggagagagatctagcttcaggactcattggccctctcctcatctgctacaaagaatctgtagatcaaagaggaaaccagataatgtcagacaagaggaatgtcatcctgttttctgtatttgatgagaaccgaagctggtacctcacagagaatatacaacgctttctccccaatccagctggagtgcagcttgaggatccagagttccaagcctccaacatcatgcacagcatcaatggctatgtttttgatagtttgcagttgtcagtttgtttgcatgaggtggcatactggtacattctaagcattggagcacagactgacttcctttctgtcttcttctctggatataccttcaaacacaaaatggtctatgaagacacactcaccctattcccattctcaggagaaactgtcttcatgtcgatggaaaacccaggtctatggattctggggtgccacaactcagactttcggaacagaggcatgaccgccttactgaaggtttctagttgtgacaagaacactggtgattattacgaggacagttatgaagatatttcagcatacttgctgagtaaaaacaatgccattgaaccaagaagcttctctcaaaacccaccagtcttgaaacgccatcaacgggaaataactcgtactactcttcagtcagatcaagaggaaatcgattatgatgataccatatcagttgaaatgaagaaggaagattttgacatttatgatgaggatgaaaatcagagcccccgcagctttcaaaagaaaacacgacactattttattgctgcagtggagaggctctgggattatgggatgagtagctccccacatgttctaagaaacagggctcagagtggcagtgtccctcagttcaagaaagttgttttccaggaatttactgatggctcctttactcagcccttataccgtggagaactaaatgaacatttgggactcctggggccatatataagagcagaagttgaagataatatcatggtaactttcagaaatcaggcctctcgtccctattccttctattctagccttatttcttatgaggaagatcagaggcaaggagcagaacctagaaaaaactttgtcaagcctaatgaaaccaaaacttacttttggaaagtgcaacatcatatggcacccactaaagatgagtttgactgcaaagcctgggcttatttctctgatgttgacctggaaaaagatgtgcactcaggcctgattggaccccttctggtctgccacactaacacactgaaccctgctcatgggagacaagtgacagtacaggaatttgctctgtttttcaccatctttgatgagaccaaaagctggtacttcactgaaaatatggaaagaaactgcagggctccctgcaatatccagatggaagatcccacttttaaagagaattatcgcttccatgcaatcaatggctacataatggatacactacctggcttagtaatggctcaggatcaaaggattcgatggtatctgctcagcatgggcagcaatgaaaacatccattctattcatttcagtggacatgtgttcactgtacgaaaaaaagaggagtataaaatggcactgtacaatctctatccaggtgtttttgagacagtggaaatgttaccatccaaagctggaatttggcgggtggaatgccttattggcgagcatctacatgctgggatgagcacactttttctggtgtacagcaataagtgtcagactcccctgggaatggcttctggacacattagagattttcagattacagcttcaggacaatatggacagtgggccccaaagctggccagacttcattattccggatcaatcaatgcctggagcaccaaggagcccttttcttggatcaaggtggatctgttggcaccaatgattattcacggcatcaagacccagggtgcccgtcagaagttctccagcctctacatctctcagtttatcatcatgtatagtcttgatgggaagaagtggcagacttatcgaggaaattccactggaaccttaatggtcttctttggcaatgtggattcatctgggataaaacacaatatttttaaccctccaattattgctcgatacatccgtttgcacccaactcattatagcattcgcagcactcttcgcatggagttgatgggctgtgatttaaatagttgcagcatgccattgggaatggagagtaaagcaatatcagatgcacagattactgcttcatcctactttaccaatatgtttgccacctggtctccttcaaaagctcgacttcacctccaagggaggagtaatgcctggagacctcaggtgaataatccaaaagagtggctgcaagtggacttccagaagacaatgaaagtcacaggagtaactactcagggagtaaaatctctgcttaccagcatgtatgtgaaggagttcctcatctccagcagtcaagatggccatcagtggactctcttttttcagaatggcaaagtaaaggtttttcagggaaatcaagactccttcacacctgtggtgaactctctagacccaccgttactgactcgctaccttcgaattcacccccagagttgggtgcaccagattgccctgaggatggaggttctgggctgcgaggcacaggacctctacggcgccggatcacctggggccgaaacggccgaacaaaaactcatctcagaagaggatctgtcacctgcaaccggtcatcatcaccatcaccattga

SEQ ID NO: 757 - protein, 1619 aa, synthetic construct
  REGION 1..1619: note = Description of Artificial Sequence: Synthetic polypeptide
ATRRYYLGAVELSWDYMQSDLGELPVDARFPPRVPKSFPFNTSVVYKKTLFVEFTDHLFNIAKPRPPWMGLLGPTIQAEVYDTVVITLKNMASHPVSLHAVGVSYWKASEGAEYDDQTSQREKEDDKVFPGGSHTYVWQVLKENGPMASDPLCLTYSYLSHVDLVKDLNSGLIGALLVCREGSLAKEKTQTLHKFILLFAVFDEGKSWHSETKNSLMQDRDAASARAWPKMHTVNGYVNRSLPGLIGCHRKSVYWHVIGMGTTPEVHSIFLEGHTFLVRNHRQASLEISPITFLTAQTLLMDLGQFLLFCHISSHQHDGMEAYVKVDSCPEEPQLRMKNNEEAEDYDDDLTDSEMDVVRFDDDNSPSFIQIRSVAKKHPKTWVHYIAAEEEDWDYAPLVLAPDDRSYKSQYLNNGPQRIGRKYKKVRFMAYTDETFKTREAIQHESGILGPLLYGEVGDTLLIIFKNQASRPYNIYPHGITDVRPLYSRRLPKGVKHLKDFPILPGEIFKYKWTVTVEDGPTKSDPRCLTRYYSSFVNMERDLASGLIGPLLICYKESVDQRGNQIMSDKRNVILFSVFDENRSWYLTENIQRFLPNPAGVQLGAPGASPGTSSTGSPGSSPSASTGTGPGSSPSASTGTGPGTPGSGTASSSPGSSTPSGATGSPGSSPSASTGTGPGASPGTSSTGSPGTPGSGTASSSPGSSTPSGATGSPGTPGSGTASSSPGASPGTSSTGSPGASPGTSSTGSPASSEDPEFQASNIMHSINGYVFDSLQLSVCLHEVAYWYILSIGAQTDFLSVFFSGYTFKHKMVYEDTLTLFPFSGETVFMSMENPGLWILGCHNSDFRNRGMTALLKVSSCDKNTGDYYEDSYEDISAYLLSKNNAIEPRSFSQNPPVLKRHQREITRTTLQSDQEEIDYDDTISVEMKKEDFDIYDEDENQSPRSFQKKTRHYFIAAVERLWDYGMSSSPHVLRNRAQSGSVPQFKKVVFQEFTDGSFTQPLYRGELNEHLGLLGPYIRAEVEDNIMVTFRNQASRPYSFYSSLISYEEDQRQGAEPRKNFVKPNETKTYFWKVQHHMAPTKDEFDCKAWAYFSDVDLEKDVHSGLIGPLLVCHTNTLNPAHGRQVTVQEFALFFTIFDETKSWYFTENMERNCRAPCNIQMEDPTFKENYRFHAINGYIMDTLPGLVMAQDQRIRWYLLSMGSNENIHSIHFSGHVFTVRKKEEYKMALYNLYPGVFETVEMLPSKAGIWRVECLIGEHLHAGMSTLFLVYSNKCQTPLGMASGHIRDFQITASGQYGQWAPKLARLHYSGSINAWSTKEPFSWIKVDLLAPMIIHGIKTQGARQKFSSLYISQFIIMYSLDGKKWQTYRGNSTGTLMVFFGNVDSSGIKHNIFNPPIIARYIRLHPTHYSIRSTLRMELMGCDLNSCSMPLGMESKAISDAQITASSYFTNMFATWSPSKARLHLQGRSNAWRPQVNNPKEWLQVDFQKTMKVTGVTTQGVKSLLTSMYVKEFLISSSQDGHQWTLFFQNGKVKVFQGNQDSFTPVVNSLDPPLLTRYLRIHPQSWVHQIALRMEVLGCEAQDLYGAGSPGAETAEQKLISEEDLSPATGHHHHHH

SEQ ID NO: 758 - DNA, 4860 bp, synthetic construct
  misc_feature 1..4860: note = Description of Artificial Sequence: Synthetic polynucleotide
  source 1..4860: mol_type = other DNA
gccaccagaagatactacctgggtgcagtggaactgtcatgggactatatgcaaagtgatctcggtgagctgcctgtggacgcaagatttcctcctagagtgccaaaatcttttccattcaacacctcagtcgtgtacaaaaagactctgtttgtagaattcacggatcaccttttcaacatcgctaagccaaggccaccctggatgggtctgctaggtcctaccatccaggctgaggtttatgatacagtggtcattacacttaagaacatggcttcccatcctgtcagtcttcatgctgttggtgtatcctactggaaagcttctgagggagctgaatatgatgatcagaccagtcaaagggagaaagaagatgataaagtcttccctggtggaagccatacatatgtctggcaggtcctgaaagagaatggtccaatggcctctgacccactgtgccttacctactcatatctttctcatgtggacctggtaaaagacttgaattcaggcctcattggagccctactagtatgtagagaagggagtctggccaaggaaaagacacagaccttgcacaaatttatactactttttgctgtatttgatgaagggaaaagttggcactcagaaacaaagaactccttgatgcaggatagggatgctgcatctgctcgggcctggcctaaaatgcacacagtcaatggttatgtaaacaggtctctgccaggtctgattggatgccacaggaaatcagtctattggcatgtgattggaatgggcaccactcctgaagtgcactcaatattcctcgaaggtcacacatttcttgtgaggaaccatcgccaggctagcttggaaatctcgccaataactttccttactgctcaaacactcttgatggaccttggacagtttctactgttttgtcatatctcttcccaccaacatgatggcatggaagcttatgtcaaagtagacagctgtccagaggaaccccaactacgaatgaaaaataatgaagaagcggaagactatgatgatgatcttactgattctgaaatggatgtggtcaggtttgatgatgacaactctccttcctttatccaaattcgctcagttgccaagaagcatcctaaaacttgggtacattacattgctgctgaagaggaggactgggactatgctcccttagtcctcgcccccgatgacagaagttataaaagtcaatatttgaacaatggccctcagcggattggtaggaagtacaaaaaagtccgatttatggcatacacagatgaaacctttaagactcgtgaagctattcagcatgaatcaggaatcttgggacctttactttatggggaagttggagacacactgttgattatatttaagaatcaagcaagcagaccatataacatctaccctcacggaatcactgatgtccgtcctttgtattcaaggagattaccaaaaggtgtaaaacatttgaaggattttccaattctgccaggagaaatattcaaatataaatggacagtgactgtagaagatgggccaactaaatcagatcctcggtgcctgacccgctattactctagtttcgttaatatggagagagatctagcttcaggactcattggccctctcctcatctgctacaaagaatctgtagatcaaagaggaaaccagataatgtcagacaagaggaatgtcatcctgttttctgtatttgatgagaaccgaagctggtacctcacagagaatatacaacgctttctccccaatccagctggagtgcagcttggcgcgccaggtgcctcgccgggaacatcatcaactggttcacccgggtcatccccctcggcctcaaccgggacgggtcccggctcatcccccagcgccagcactggaacaggtcctggcactcctggttccggtacggcatcgtcatccccgggaagctcaacaccgtccggagcgacaggatcacctggctcgtcaccttcggcgtcaactggaacggggccaggggcctcacccggaacgtcctcgactgggtcgcctggtacgccgggatcaggaacggcctcatcctcgcctgggtcctcaacgccctcgggtgcgactggttcgccgggaactcctggctcggggacggcctcgtcgtcgcctggggcatcaccggggacgagctccacggggtcccctggagcgtcaccggggacctcctcgacaggtagcccggcctcgagcgaggatccagagttccaagcctccaacatcatgcacagcatcaatggctatgtttttgatagtttgcagttgtcagtttgtttgcatgaggtggcatactggtacattctaagcattggagcacagactgacttcctttctgtcttcttctctggatataccttcaaacacaaaatggtctatgaagacacactcaccctattcccattctcaggagaaactgtcttcatgtcgatggaaaacccaggtctatggattctggggtgccacaactcagactttcggaacagaggcatgaccgccttactgaaggtttctagttgtgacaagaacactggtgattattacgaggacagttatgaagatatttcagcatacttgctgagtaaaaacaatgccattgaaccaagaagcttctctcaaaacccaccagtcttgaaacgccatcaacgggaaataactcgtactactcttcagtcagatcaagaggaaatcgattatgatgataccatatcagttgaaatgaagaaggaagattttgacatttatgatgaggatgaaaatcagagcccccgcagctttcaaaagaaaacacgacactattttattgctgcagtggagaggctctgggattatgggatgagtagctccccacatgttctaagaaacagggctcagagtggcagtgtccctcagttcaagaaagttgttttccaggaatttactgatggctcctttactcagcccttataccgtggagaactaaatgaacatttgggactcctggggccatatataagagcagaagttgaagataatatcatggtaactttcagaaatcaggcctctcgtccctattccttctattctagccttatttcttatgaggaagatcagaggcaaggagcagaacctagaaaaaactttgtcaagcctaatgaaaccaaaacttacttttggaaagtgcaacatcatatggcacccactaaagatgagtttgactgcaaagcctgggcttatttctctgatgttgacctggaaaaagatgtgcactcaggcctgattggaccccttctggtctgccacactaacacactgaaccctgctcatgggagacaagtgacagtacaggaatttgctctgtttttcaccatctttgatgagaccaaaagctggtacttcactgaaaatatggaaagaaactgcagggctccctgcaatatccagatggaagatcccacttttaaagagaattatcgcttccatgcaatcaatggctacataatggatacactacctggcttagtaatggctcaggatcaaaggattcgatggtatctgctcagcatgggcagcaatgaaaacatccattctattcatttcagtggacatgtgttcactgtacgaaaaaaagaggagtataaaatggcactgtacaatctctatccaggtgtttttgagacagtggaaatgttaccatccaaagctggaatttggcgggtggaatgccttattggcgagcatctacatgctgggatgagcacactttttctggtgtacagcaataagtgtcagactcccctgggaatggcttctggacacattagagattttcagattacagcttcaggacaatatggacagtgggccccaaagctggccagacttcattattccggatcaatcaatgcctggagcaccaaggagcccttttcttggatcaaggtggatctgttggcaccaatgattattcacggcatcaagacccagggtgcccgtcagaagttctccagcctctacatctctcagtttatcatcatgtatagtcttgatgggaagaagtggcagacttatcgaggaaattccactggaaccttaatggtcttctttggcaatgtggattcatctgggataaaacacaatatttttaaccctccaattattgctcgatacatccgtttgcacccaactcattatagcattcgcagcactcttcgcatggagttgatgggctgtgatttaaatagttgcagcatgccattgggaatggagagtaaagcaatatcagatgcacagattactgcttcatcctactttaccaatatgtttgccacctggtctccttcaaaagctcgacttcacctccaagggaggagtaatgcctggagacctcaggtgaataatccaaaagagtggctgcaagtggacttccagaagacaatgaaagtcacaggagtaactactcagggagtaaaatctctgcttaccagcatgtatgtgaaggagttcctcatctccagcagtcaagatggccatcagtggactctcttttttcagaatggcaaagtaaaggtttttcagggaaatcaagactccttcacacctgtggtgaactctctagacccaccgttactgactcgctaccttcgaattcacccccagagttgggtgcaccagattgccctgaggatggaggttctgggctgcgaggcacaggacctctacggcgccggatcacctggggccgaaacggccgaacaaaaactcatctcagaagaggatctgtcacctgcaaccggtcatcatcaccatcaccattga

SEQ ID NO: 759 - protein, 1619 aa, synthetic construct
  REGION 1..1619: note = Description of Artificial Sequence: Synthetic polypeptide
ATRRYYLGAVELSWDYMQSDLGELPVDARFPPRVPKSFPFNTSVVYKKTLFVEFTDHLFNIAKPRPPWMGLLGPTIQAEVYDTVVITLKNMASHPVSLHAVGVSYWKASEGAEYDDQTSQREKEDDKVFPGGSHTYVWQVLKENGPMASDPLCLTYSYLSHVDLVKDLNSGLIGALLVCREGSLAKEKTQTLHKFILLFAVFDEGKSWHSETKNSLMQDRDAASARAWPKMHTVNGYVNRSLPGLIGCHRKSVYWHVIGMGTTPEVHSIFLEGHTFLVRNHRQASLEISPITFLTAQTLLMDLGQFLLFCHISSHQHDGMEAYVKVDSCPEEPQLRMKNNEEAEDYDDDLTDSEMDVVRFDDDNSPSFIQIRSVAKKHPKTWVHYIAAEEEDWDYAPLVLAPDDRSYKSQYLNNGPQRIGRKYKKVRFMAYTDETFKTREAIQHESGILGPLLYGEVGDTLLIIFKNQASRPYNIYPHGITDVRPLYSRRLPKGVKHLKDFPILPGEIFKYKWTVTVEDGPTKSDPRCLTRYYSSFVNMERDLASGLIGPLLICYKESVDQRGNQIMSDKRNVILFSVFDENRSWYLTENIQRFLPNPAGVQLEDPEFQASNIMHSINGYVFDSLQLSVCLHEVAYWYILSIGAQTDFLSVFFSGYTFKHKMVYEDTLTLFPFSGETVFMSMENPGLWILGCHNSDFRNRGMTALLKVSSCDKNTGDYYEDSYEDISAYLLSKNNAIEPRSFSQNPPVLKRHQREITRTTLQGAPGTPGSGTASSSPGASPGTSSTGSPGASPGTSSTGSPGASPGTSSTGSPGSSPSASTGTGPGTPGSGTASSSPGASPGTSSTGSPGASPGTSSTGSPGASPGTSSTGSPGSSTPSGATGSPGSSTPSGATGSPGASPGTSSTGSPASSSDQEEIDYDDTISVEMKKEDFDIYDEDENQSPRSFQKKTRHYFIAAVERLWDYGMSSSPHVLRNRAQSGSVPQFKKVVFQEFTDGSFTQPLYRGELNEHLGLLGPYIRAEVEDNIMVTFRNQASRPYSFYSSLISYEEDQRQGAEPRKNFVKPNETKTYFWKVQHHMAPTKDEFDCKAWAYFSDVDLEKDVHSGLIGPLLVCHTNTLNPAHGRQVTVQEFALFFTIFDETKSWYFTENMERNCRAPCNIQMEDPTFKENYRFHAINGYIMDTLPGLVMAQDQRIRWYLLSMGSNENIHSIHFSGHVFTVRKKEEYKMALYNLYPGVFETVEMLPSKAGIWRVECLIGEHLHAGMSTLFLVYSNKCQTPLGMASGHIRDFQITASGQYGQWAPKLARLHYSGSINAWSTKEPFSWIKVDLLAPMIIHGIKTQGARQKFSSLYISQFIIMYSLDGKKWQTYRGNSTGTLMVFFGNVDSSGIKHNIFNPPIIARYIRLHPTHYSIRSTLRMELMGCDLNSCSMPLGMESKAISDAQITASSYFTNMFATWSPSKARLHLQGRSNAWRPQVNNPKEWLQVDFQKTMKVTGVTTQGVKSLLTSMYVKEFLISSSQDGHQWTLFFQNGKVKVFQGNQDSFTPVVNSLDPPLLTRYLRIHPQSWVHQIALRMEVLGCEAQDLYGAGSPGAETAEQKLISEEDLSPATGHHHHHH

SEQ ID NO: 760 - DNA, 4860 bp, synthetic construct
  misc_feature 1..4860: note = Description of Artificial Sequence: Synthetic polynucleotide
  source 1..4860: mol_type = other DNA
gccaccagaagatactacctgggtgcagtggaactgtcatgggactatatgcaaagtgatctcggtgagctgcctgtggacgcaagatttcctcctagagtgccaaaatcttttccattcaacacctcagtcgtgtacaaaaagactctgtttgtagaattcacggatcaccttttcaacatcgctaagccaaggccaccctggatgggtctgctaggtcctaccatccaggctgaggtttatgatacagtggtcattacacttaagaacatggcttcccatcctgtcagtcttcatgctgttggtgtatcctactggaaagcttctgagggagctgaatatgatgatcagaccagtcaaagggagaaagaagatgataaagtcttccctggtggaagccatacatatgtctggcaggtcctgaaagagaatggtccaatggcctctgacccactgtgccttacctactcatatctttctcatgtggacctggtaaaagacttgaattcaggcctcattggagccctactagtatgtagagaagggagtctggccaaggaaaagacacagaccttgcacaaatttatactactttttgctgtatttgatgaagggaaaagttggcactcagaaacaaagaactccttgatgcaggatagggatgctgcatctgctcgggcctggcctaaaatgcacacagtcaatggttatgtaaacaggtctctgccaggtctgattggatgccacaggaaatcagtctattggcatgtgattggaatgggcaccactcctgaagtgcactcaatattcctcgaaggtcacacatttcttgtgaggaaccatcgccaggctagcttggaaatctcgccaataactttccttactgctcaaacactcttgatggaccttggacagtttctactgttttgtcatatctcttcccaccaacatgatggcatggaagcttatgtcaaagtagacagctgtccagaggaaccccaactacgaatgaaaaataatgaagaagcggaagactatgatgatgatcttactgattctgaaatggatgtggtcaggtttgatgatgacaactctccttcctttatccaaattcgctcagttgccaagaagcatcctaaaacttgggtacattacattgctgctgaagaggaggactgggactatgctcccttagtcctcgcccccgatgacagaagttataaaagtcaatatttgaacaatggccctcagcggattggtaggaagtacaaaaaagtccgatttatggcatacacagatgaaacctttaagactcgtgaagctattcagcatgaatcaggaatcttgggacctttactttatggggaagttggagacacactgttgattatatttaagaatcaagcaagcagaccatataacatctaccctcacggaatcactgatgtccgtcctttgtattcaaggagattaccaaaaggtgtaaaacatttgaaggattttccaattctgccaggagaaatattcaaatataaatggacagtgactgtagaagatgggccaactaaatcagatcctcggtgcctgacccgctattactctagtttcgttaatatggagagagatctagcttcaggactcattggccctctcctcatctgctacaaagaatctgtagatcaaagaggaaaccagataatgtcagacaagaggaatgtcatcctgttttctgtatttgatgagaaccgaagctggtacctcacagagaatatacaacgctttctccccaatccagctggagtgcagcttgaggatccagagttccaagcctccaacatcatgcacagcatcaatggctatgtttttgatagtttgcagttgtcagtttgtttgcatgaggtggcatactggtacattctaagcattggagcacagactgacttcctttctgtcttcttctctggatataccttcaaacacaaaatggtctatgaagacacactcaccctattcccattctcaggagaaactgtcttcatgtcgatggaaaacccaggtctatggattctggggtgccacaactcagactttcggaacagaggcatgaccgccttactgaaggtttctagttgtgacaagaacactggtgattattacgaggacagttatgaagatatttcagcatacttgctgagtaaaaacaatgccattgaaccaagaagcttctctcaaaacccaccagtcttgaaacgccatcaacgggaaataactcgtactactcttcagggcgcgccaggtacacccggatcgggtacagcgtcatcgagccccggtgcgtcacctggtacgtcgagcacggggtcgccaggggcgtcccctgggacgtcctcaacaggctcgcccggtgcgtcacccggcacgtcgtccacgggttcacctggtagctccccttccgcgtccactggcaccgggcctggaactccggggagcggcacagcgagctcgtcgccgggagcatcgcctgggacatcgagcaccgggtcgccaggagcatcgcccggaacatccagcacaggaagccccggcgcgtcgcccgggacatcaagcacaggttccccgggatcgagcacgccgtccggagccactggatcaccagggagctcgacaccttccggcgcaacgggatcgcccggagccagcccgggtacgtcaagcactggctcccctgcctcgagctcagatcaagaggaaatcgattatgatgataccatatcagttgaaatgaagaaggaagattttgacatttatgatgaggatgaaaatcagagcccccgcagctttcaaaagaaaacacgacactattttattgctgcagtggagaggctctgggattatgggatgagtagctccccacatgttctaagaaacagggctcagagtggcagtgtccctcagttcaagaaagttgttttccaggaatttactgatggctcctttactcagcccttataccgtggagaactaaatgaacatttgggactcctggggccatatataagagcagaagttgaagataatatcatggtaactttcagaaatcaggcctctcgtccctattccttctattctagccttatttcttatgaggaagatcagaggcaaggagcagaacctagaaaaaactttgtcaagcctaatgaaaccaaaacttacttttggaaagtgcaacatcatatggcacccactaaagatgagtttgactgcaaagcctgggcttatttctctgatgttgacctggaaaaagatgtgcactcaggcctgattggaccccttctggtctgccacactaacacactgaaccctgctcatgggagacaagtgacagtacaggaatttgctctgtttttcaccatctttgatgagaccaaaagctggtacttcactgaaaatatggaaagaaactgcagggctccctgcaatatccagatggaagatcccacttttaaagagaattatcgcttccatgcaatcaatggctacataatggatacactacctggcttagtaatggctcaggatcaaaggattcgatggtatctgctcagcatgggcagcaatgaaaacatccattctattcatttcagtggacatgtgttcactgtacgaaaaaaagaggagtataaaatggcactgtacaatctctatccaggtgtttttgagacagtggaaatgttaccatccaaagctggaatttggcgggtggaatgccttattggcgagcatctacatgctgggatgagcacactttttctggtgtacagcaataagtgtcagactcccctgggaatggcttctggacacattagagattttcagattacagcttcaggacaatatggacagtgggccccaaagctggccagacttcattattccggatcaatcaatgcctggagcaccaaggagcccttttcttggatcaaggtggatctgttggcaccaatgattattcacggcatcaagacccagggtgcccgtcagaagttctccagcctctacatctctcagtttatcatcatgtatagtcttgatgggaagaagtggcagacttatcgaggaaattccactggaaccttaatggtcttctttggcaatgtggattcatctgggataaaacacaatatttttaaccctccaattattgctcgatacatccgtttgcacccaactcattatagcattcgcagcactcttcgcatggagttgatgggctgtgatttaaatagttgcagcatgccattgggaatggagagtaaagcaatatcagatgcacagattactgcttcatcctactttaccaatatgtttgccacctggtctccttcaaaagctcgacttcacctccaagggaggagtaatgcctggagacctcaggtgaataatccaaaagagtggctgcaagtggacttccagaagacaatgaaagtcacaggagtaactactcagggagtaaaatctctgcttaccagcatgtatgtgaaggagttcctcatctccagcagtcaagatggccatcagtggactctcttttttcagaatggcaaagtaaaggtttttcagggaaatcaagactccttcacacctgtggtgaactctctagacccaccgttactgactcgctaccttcgaattcacccccagagttgggtgcaccagattgccctgaggatggaggttctgggctgcgaggcacaggacctctacggcgccggatcacctggggccgaaacggccgaacaaaaactcatctcagaagaggatctgtcacctgcaaccggtcatcatcaccatcaccattga

SEQ ID NO: 761 - protein, 1619 aa, synthetic construct
  REGION 1..1619: note = Description of Artificial Sequence: Synthetic polypeptide
ATRRYYLGAVELSWDYMQSDLGELPVDARFPPRVPKSFPFNTSVVYKKTLFVEFTDHLFNIAKPRPPWMGLLGPTIQAEVYDTVVITLKNMASHPVSLHAVGVSYWKASEGAEYDDQTSQREKEDDKVFPGGSHTYVWQVLKENGPMASDPLCLTYSYLSHVDLVKDLNSGLIGALLVCREGSLAKEKTQTLHKFILLFAVFDEGKSWHSETKNSLMQDRDAASARAWPKMHTVNGYVNRSLPGLIGCHRKSVYWHVIGMGTTPEVHSIFLEGHTFLVRNHRQASLEISPITFLTAQTLLMDLGQFLLFCHISSHQHDGMEAYVKVDSCPEEPQLRMKNNEEAEDYDDDLTDSEMDVVRFDDDNSPSFIQIRSVAKKHPKTWVHYIAAEEEDWDYAPLVLAPDDRSYKSQYLNNGPQRIGRKYKKVRFMAYTDETFKTREAIQHESGILGPLLYGEVGDTLLIIFKNQASRPYNIYPHGITDVRPLYSRRLPKGVKHLKDFPILPGEIFKYKWTVTVEDGPTKSDPRCLTRYYSSFVNMERDLASGLIGPLLICYKESVDQRGNQIMSDKRNVILFSVFDENRSWYLTENIQRFLPNPAGVQLEDPEFQASNIMHSINGYVFDSLQLSVCLHEVAYWYILSIGAQTDFLSVFFSGYTFKHKMVYEDTLTLFPFSGETVFMSMENPGLWILGCHNSDFRNRGMTALLKVSSCDKNTGDYYEDSYEDISAYLLSKNNAIEPRSFSQNPPVLKRHQREITRTTLQSDQEEIDYDDTISVEMKKEDFDIYDEDENQSPRSFQKKTRHYFIAAVERLWDYGMGAPTSESATPESGPGSEPATSGSETPGTSESATPESGPGSEPATSGSETPGTSESATPESGPGTSTEPSEGSAPGTSESATPESGPGSPAGSPTSTEEGSPAGSPTSTEEGSPAGSPTSTEEGTSESATPESGPGTSTEPSEGSAPGASSSSSPHVLRNRAQSGSVPQFKKVVFQEFTDGSFTQPLYRGELNEHLGLLGPYIRAEVEDNIMVTFRNQASRPYSFYSSLISYEEDQRQGAEPRKNFVKPNETKTYFWKVQHHMAPTKDEFDCKAWAYFSDVDLEKDVHSGLIGPLLVCHTNTLNPAHGRQVTVQEFALFFTIFDETKSWYFTENMERNCRAPCNIQMEDPTFKENYRFHAINGYIMDTLPGLVMAQDQRIRWYLLSMGSNENIHSIHFSGHVFTVRKKEEYKMALYNLYPGVFETVEMLPSKAGIWRVECLIGEHLHAGMSTLFLVYSNKCQTPLGMASGHIRDFQITASGQYGQWAPKLARLHYSGSINAWSTKEPFSWIKVDLLAPMIIHGIKTQGARQKFSSLYISQFIIMYSLDGKKWQTYRGNSTGTLMVFFGNVDSSGIKHNIFNPPIIARYIRLHPTHYSIRSTLRMELMGCDLNSCSMPLGMESKAISDAQITASSYFTNMFATWSPSKARLHLQGRSNAWRPQVNNPKEWLQVDFQKTMKVTGVTTQGVKSLLTSMYVKEFLISSSQDGHQWTLFFQNGKVKVFQGNQDSFTPVVNSLDPPLLTRYLRIHPQSWVHQIALRMEVLGCEAQDLYGAGSPGAETAEQKLISEEDLSPATGHHHHHH

SEQ ID NO: 762 - DNA, 4860 bp, synthetic construct
  misc_feature 1..4860: note = Description of Artificial Sequence: Synthetic polynucleotide
  source 1..4860: mol_type = other DNA
gccaccagaagatactacctgggtgcagtggaactgtcatgggactatatgcaaagtgatctcggtgagctgcctgtggacgcaagatttcctcctagagtgccaaaatcttttccattcaacacctcagtcgtgtacaaaaagactctgtttgtagaattcacggatcaccttttcaacatcgctaagccaaggccaccctggatgggtctgctaggtcctaccatccaggctgaggtttatgatacagtggtcattacacttaagaacatggcttcccatcctgtcagtcttcatgctgttggtgtatcctactggaaagcttctgagggagctgaatatgatgatcagaccagtcaaagggagaaagaagatgataaagtcttccctggtggaagccatacatatgtctggcaggtcctgaaagagaatggtccaatggcctctgacccactgtgccttacctactcatatctttctcatgtggacctggtaaaagacttgaattcaggcctcattggagccctactagtatgtagagaagggagtctggccaaggaaaagacacagaccttgcacaaatttatactactttttgctgtatttgatgaagggaaaagttggcactcagaaacaaagaactccttgatgcaggatagggatgctgcatctgctcgggcctggcctaaaatgcacacagtcaatggttatgtaaacaggtctctgccaggtctgattggatgccacaggaaatcagtctattggcatgtgattggaatgggcaccactcctgaagtgcactcaatattcctcgaaggtcacacatttcttgtgaggaaccatcgccaggctagcttggaaatctcgccaataactttccttactgctcaaacactcttgatggaccttggacagtttctactgttttgtcatatctcttcccaccaacatgatggcatggaagcttatgtcaaagtagacagctgtccagaggaaccccaactacgaatgaaaaataatgaagaagcggaagactatgatgatgatcttactgattctgaaatggatgtggtcaggtttgatgatgacaactctccttcctttatccaaattcgctcagttgccaagaagcatcctaaaacttgggtacattacattgctgctgaagaggaggactgggactatgctcccttagtcctcgcccccgatgacagaagttataaaagtcaatatttgaacaatggccctcagcggattggtaggaagtacaaaaaagtccgatttatggcatacacagatgaaacctttaagactcgtgaagctattcagcatgaatcaggaatcttgggacctttactttatggggaagttggagacacactgttgattatatttaagaatcaagcaagcagaccatataacatctaccctcacggaatcactgatgtccgtcctttgtattcaaggagattaccaaaaggtgtaaaacatttgaaggattttccaattctgccaggagaaatattcaaatataaatggacagtgactgtagaagatgggccaactaaatcagatcctcggtgcctgacccgctattactctagtttcgttaatatggagagagatctagcttcaggactcattggccctctcctcatctgctacaaagaatctgtagatcaaagaggaaaccagataatgtcagacaagaggaatgtcatcctgttttctgtatttgatgagaaccgaagctggtacctcacagagaatatacaacgctttctccccaatccagctggagtgcagcttgaggatccagagttccaagcctccaacatcatgcacagcatcaatggctatgtttttgatagtttgcagttgtcagtttgtttgcatgaggtggcatactggtacattctaagcattggagcacagactgacttcctttctgtcttcttctctggatataccttcaaacacaaaatggtctatgaagacacactcaccctattcccattctcaggagaaactgtcttcatgtcgatggaaaacccaggtctatggattctggggtgccacaactcagactttcggaacagaggcatgaccgccttactgaaggtttctagttgtgacaagaacactggtgattattacgaggacagttatgaagatatttcagcatacttgctgagtaaaaacaatgccattgaaccaagaagcttctctcaaaacccaccagtcttgaaacgccatcaacgggaaataactcgtactactcttcagtcagatcaagaggaaatcgattatgatgataccatatcagttgaaatgaagaaggaagattttgacatttatgatgaggatgaaaatcagagcccccgcagctttcaaaagaaaacacgacactattttattgctgcagtggagaggctctgggattatgggatgggcgcgccaacgtccgaaagtgctacccctgagtcaggccctggtagtgagcctgccacaagcggaagcgaaactccggggacctcagagtctgccactcccgaatcggggccaggctctgaaccggccacttcagggagcgaaacaccaggaacatcggagagcgctaccccggagagcgggccaggaactagtactgagcctagcgagggaagtgcacctggtacaagcgagtccgccacacccgagtctggccctggctctccagcgggctcacccacgagcactgaagagggctctcccgctggcagcccaacgtcgacagaagaaggatcaccagcaggctcccccacatcaacagaggagggtacatcagaatctgctactcccgagagtggacccggtacctccactgagcccagcgaggggagtgcaccaggtgcctcgagcagtagctccccacatgttctaagaaacagggctcagagtggcagtgtccctcagttcaagaaagttgttttccaggaatttactgatggctcctttactcagcccttataccgtggagaactaaatgaacatttgggactcctggggccatatataagagcagaagttgaagataatatcatggtaactttcagaaatcaggcctctcgtccctattccttctattctagccttatttcttatgaggaagatcagaggcaaggagcagaacctagaaaaaactttgtcaagcctaatgaaaccaaaacttacttttggaaagtgcaacatcatatggcacccactaaagatgagtttgactgcaaagcctgggcttatttctctgatgttgacctggaaaaagatgtgcactcaggcctgattggaccccttctggtctgccacactaacacactgaaccctgctcatgggagacaagtgacagtacaggaatttgctctgtttttcaccatctttgatgagaccaaaagctggtacttcactgaaaatatggaaagaaactgcagggctccctgcaatatccagatggaagatcccacttttaaagagaattatcgcttccatgcaatcaatggctacataatggatacactacctggcttagtaatggctcaggatcaaaggattcgatggtatctgctcagcatgggcagcaatgaaaacatccattctattcatttcagtggacatgtgttcactgtacgaaaaaaagaggagtataaaatggcactgtacaatctctatccaggtgtttttgagacagtggaaatgttaccatccaaagctggaatttggcgggtggaatgccttattggcgagcatctacatgctgggatgagcacactttttctggtgtacagcaataagtgtcagactcccctgggaatggcttctggacacattagagattttcagattacagcttcaggacaatatggacagtgggccccaaagctggccagacttcattattccggatcaatcaatgcctggagcaccaaggagcccttttcttggatcaaggtggatctgttggcaccaatgattattcacggcatcaagacccagggtgcccgtcagaagttctccagcctctacatctctcagtttatcatcatgtatagtcttgatgggaagaagtggcagacttatcgaggaaattccactggaaccttaatggtcttctttggcaatgtggattcatctgggataaaacacaatatttttaaccctccaattattgctcgatacatccgtttgcacccaactcattatagcattcgcagcactcttcgcatggagttgatgggctgtgatttaaatagttgcagcatgccattgggaatggagagtaaagcaatatcagatgcacagattactgcttcatcctactttaccaatatgtttgccacctggtctccttcaaaagctcgacttcacctccaagggaggagtaatgcctggagacctcaggtgaataatccaaaagagtggctgcaagtggacttccagaagacaatgaaagtcacaggagtaactactcagggagtaaaatctctgcttaccagcatgtatgtgaaggagttcctcatctccagcagtcaagatggccatcagtggactctcttttttcagaatggcaaagtaaaggtttttcagggaaatcaagactccttcacacctgtggtgaactctctagacccaccgttactgactcgctaccttcgaattcacccccagagttgggtgcaccagattgccctgaggatggaggttctgggctgcgaggcacaggacctctacggcgccggatcacctggggccgaaacggccgaacaaaaactcatctcagaagaggatctgtcacctgcaaccggtcatcatcaccatcaccattga

SEQ ID NO: 763 - protein, 1619 aa, synthetic construct
  REGION 1..1619: note = Description of Artificial Sequence: Synthetic polypeptide
ATRRYYLGAVELSWDYMQSDLGELPVDARFPPRVPKSFPFNTSVVYKKTLFVEFTDHLFNIAKPRPPWMGLLGPTIQAEVYDTVVITLKNMASHPVSLHAVGVSYWKASEGAEYDDQTSQREKEDDKVFPGGSHTYVWQVLKENGPMASDPLCLTYSYLSHVDLVKDLNSGLIGALLVCREGSLAKEKTQTLHKFILLFAVFDEGKSWHSETKNSLMQDRDAASARAWPKMHTVNGYVNRSLPGLIGCHRKSVYWHVIGMGTTPEVHSIFLEGHTFLVRNHRQASLEISPITFLTAQTLLMDLGQFLLFCHISSHQHDGMEAYVKVDSCPEEPQLRMKNNEEAEDYDDDLTDSEMDVVRFDDDNSPSFIQIRSVAKKHPKTWVHYIAAEEEDWDYAPLVLAPDDRSYKSQYLNNGPQRIGRKYKKVRFMAYTDETFKTREAIQHESGILGPLLYGEVGDTLLIIFKNQASRPYNIYPHGITDVRPLYSRRLPKGVKHLKDFPILPGEIFKYKWTVTVEDGPTKSDPRCLTRYYSSFVNMERDLASGLIGPLLICYKESVDQRGNQIMSDKRNVILFSVFDENRSWYLTENIQRFLPNPAGVQLEDPEFQASNIMHSINGYVFDSLQLSVCLHEVAYWYILSIGAQTDFLSVFFSGYTFKHKMVYEDTLTLFPFSGETVFMSMENPGLWILGCHNSDFRNRGMTALLKVSSCDKNTGDYYEDSYEDISAYLLSKNNAIEPRSFSQNPPVLKRHQREITRTTLQSDQEEIDYDDTISVEMKKEDFDIYDEDENQSPRSFQKKTRHYFIAAVERLWDYGMSSSPHVLRNRAQSGGAPTSESATPESGPGSEPATSGSETPGTSESATPESGPGSEPATSGSETPGTSESATPESGPGTSTEPSEGSAPGTSESATPESGPGSPAGSPTSTEEGSPAGSPTSTEEGSPAGSPTSTEEGTSESATPESGPGTSTEPSEGSAPGASSSVPQFKKVVFQEFTDGSFTQPLYRGELNEHLGLLGPYIRAEVEDNIMVTFRNQASRPYSFYSSLISYEEDQRQGAEPRKNFVKPNETKTYFWKVQHHMAPTKDEFDCKAWAYFSDVDLEKDVHSGLIGPLLVCHTNTLNPAHGRQVTVQEFALFFTIFDETKSWYFTENMERNCRAPCNIQMEDPTFKENYRFHAINGYIMDTLPGLVMAQDQRIRWYLLSMGSNENIHSIHFSGHVFTVRKKEEYKMALYNLYPGVFETVEMLPSKAGIWRVECLIGEHLHAGMSTLFLVYSNKCQTPLGMASGHIRDFQITASGQYGQWAPKLARLHYSGSINAWSTKEPFSWIKVDLLAPMIIHGIKTQGARQKFSSLYISQFIIMYSLDGKKWQTYRGNSTGTLMVFFGNVDSSGIKHNIFNPPIIARYIRLHPTHYSIRSTLRMELMGCDLNSCSMPLGMESKAISDAQITASSYFTNMFATWSPSKARLHLQGRSNAWRPQVNNPKEWLQVDFQKTMKVTGVTTQGVKSLLTSMYVKEFLISSSQDGHQWTLFFQNGKVKVFQGNQDSFTPVVNSLDPPLLTRYLRIHPQSWVHQIALRMEVLGCEAQDLYGAGSPGAETAEQKLISEEDLSPATGHHHHHH

SEQ ID NO: 764 - DNA, 4860 bp, synthetic construct
  misc_feature 1..4860: note = Description of Artificial Sequence: Synthetic polynucleotide
  source 1..4860: mol_type = other DNA
gccaccagaagatactacctgggtgcagtggaactgtcatgggactatatgcaaagtgatctcggtgagctgcctgtggacgcaagatttcctcctagagtgccaaaatcttttccattcaacacctcagtcgtgtacaaaaagactctgtttgtagaattcacggatcaccttttcaacatcgctaagccaaggccaccctggatgggtctgctaggtcctaccatccaggctgaggtttatgatacagtggtcattacacttaagaacatggcttcccatcctgtcagtcttcatgctgttggtgtatcctactggaaagcttctgagggagctgaatatgatgatcagaccagtcaaagggagaaagaagatgataaagtcttccctggtggaagccatacatatgtctggcaggtcctgaaagagaatggtccaatggcctctgacccactgtgccttacctactcatatctttctcatgtggacctggtaaaagacttgaattcaggcctcattggagccctactagtatgtagagaagggagtctggccaaggaaaagacacagaccttgcacaaatttatactactttttgctgtatttgatgaagggaaaagttggcactcagaaacaaagaactccttgatgcaggatagggatgctgcatctgctcgggcctggcctaaaatgcacacagtcaatggttatgtaaacaggtctctgccaggtctgattggatgccacaggaaatcagtctattggcatgtgattggaatgggcaccactcctgaagtgcactcaatattcctcgaaggtcacacatttcttgtgaggaaccatcgccaggctagcttggaaatctcgccaataactttccttactgctcaaacactcttgatggaccttggacagtttctactgttttgtcatatctcttcccaccaacatgatggcatggaagcttatgtcaaagtagacagctgtccagaggaaccccaactacgaatgaaaaataatgaagaagcggaagactatgatgatgatcttactgattctgaaatggatgtggtcaggtttgatgatgacaactctccttcctttatccaaattcgctcagttgccaagaagcatcctaaaacttgggtacattacattgctgctgaagaggaggactgggactatgctcccttagtcctcgcccccgatgacagaagttataaaagtcaatatttgaacaatggccctcagcggattggtaggaagtacaaaaaagtccgatttatggcatacacagatgaaacctttaagactcgtgaagctattcagcatgaatcaggaatcttgggacctttactttatggggaagttggagacacactgttgattatatttaagaatcaagcaagcagaccatataacatctaccctcacggaatcactgatgtccgtcctttgtattcaaggagattaccaaaaggtgtaaaacatttgaaggattttccaattctgccaggagaaatattcaaatataaatggacagtgactgtagaagatgggccaactaaatcagatcctcggtgcctgacccgctattactctagtttcgttaatatggagagagatctagcttcaggactcattggccctctcctcatctgctacaaagaatctgtagatcaaagaggaaaccagataatgtcagacaagaggaatgtcatcctgttttctgtatttgatgagaaccgaagctggtacctcacagagaatatacaacgctttctccccaatccagctggagtgcagcttgaggatccagagttccaagcctccaacatcatgcacagcatcaatggctatgtttttgatagtttgcagttgtcagtttgtttgcatgaggtggcatactggtacattctaagcattggagcacagactgacttcctttctgtcttcttctctggatataccttcaaacacaaaatggtctatgaagacacactcaccctattcccattctcaggagaaactgtcttcatgtcgatggaaaacccaggtctatggattctggggtgccacaactcagactttcggaacagaggcatgaccgccttactgaaggtttctagttgtgacaagaacactggtgattattacgaggacagttatgaagatatttcagcatacttgctgagtaaaaacaatgccattgaaccaagaagcttctctcaaaacccaccagtcttgaaacgccatcaacgggaaataactcgtactactcttcagtcagatcaagaggaaatcgattatgatgataccatatcagttgaaatgaagaaggaagattttgacatttatgatgaggatgaaaatcagagcccccgcagctttcaaaagaaaacacgacactattttattgctgcagtggagaggctctgggattatgggatgagtagctccccacatgttctaagaaacagggctcagagtggcggcgcgccaacgtccgaaagtgctacccctgagtcaggccctggtagtgagcctgccacaagcggaagcgaaactccggggacctcagagtctgccactcccgaatcggggccaggctctgaaccggccacttcagggagcgaaacaccaggaacatcggagagcgctaccccggagagcgggccaggaactagtactgagcctagcgagggaagtgcacctggtacaagcgagtccgccacacccgagtctggccctggctctccagcgggctcacccacgagcactgaagagggctctcccgctggcagcccaacgtcgacagaagaaggatcaccagcaggctcccccacatcaacagaggagggtacatcagaatctgctactcccgagagtggacccggtacctccactgagcccagcgaggggagtgcaccaggtgcctcgagcagtgtccctcagttcaagaaagttgttttccaggaatttactgatggctcctttactcagcccttataccgtggagaactaaatgaacatttgggactcctggggccatatataagagcagaagttgaagataatatcatggtaactttcagaaatcaggcctctcgtccctattccttctattctagccttatttcttatgaggaagatcagaggcaaggagcagaacctagaaaaaactttgtcaagcctaatgaaaccaaaacttacttttggaaagtgcaacatcatatggcacccactaaagatgagtttgactgcaaagcctgggcttatttctctgatgttgacctggaaaaagatgtgcactcaggcctgattggaccccttctggtctgccacactaacacactgaaccctgctcatgggagacaagtgacagtacaggaatttgctctgtttttcaccatctttgatgagaccaaaagctggtacttcactgaaaatatggaaagaaactgcagggctccctgcaatatccagatggaagatcccacttttaaagagaattatcgcttccatgcaatcaatggctacataatggatacactacctggcttagtaatggctcaggatcaaaggattcgatggtatctgctcagcatgggcagcaatgaaaacatccattctattcatttcagtggacatgtgttcactgtacgaaaaaaagaggagtataaaatggcactgtacaatctctatccaggtgtttttgagacagtggaaatgttaccatccaaagctggaatttggcgggtggaatgccttattggcgagcatctacatgctgggatgagcacactttttctggtgtacagcaataagtgtcagactcccctgggaatggcttctggacacattagagattttcagattacagcttcaggacaatatggacagtgggccccaaagctggccagacttcattattccggatcaatcaatgcctggagcaccaaggagcccttttcttggatcaaggtggatctgttggcaccaatgattattcacggcatcaagacccagggtgcccgtcagaagttctccagcctctacatctctcagtttatcatcatgtatagtcttgatgggaagaagtggcagacttatcgaggaaattccactggaaccttaatggtcttctttggcaatgtggattcatctgggataaaacacaatatttttaaccctccaattattgctcgatacatccgtttgcacccaactcattatagcattcgcagcactcttcgcatggagttgatgggctgtgatttaaatagttgcagcatgccattgggaatggagagtaaagcaatatcagatgcacagattactgcttcatcctactttaccaatatgtttgccacctggtctccttcaaaagctcgacttcacctccaagggaggagtaatgcctggagacctcaggtgaataatccaaaagagtggctgcaagtggacttccagaagacaatgaaagtcacaggagtaactactcagggagtaaaatctctgcttaccagcatgtatgtgaaggagttcctcatctccagcagtcaagatggccatcagtggactctcttttttcagaatggcaaagtaaaggtttttcagggaaatcaagactccttcacacctgtggtgaactctctagacccaccgttactgactcgctaccttcgaattcacccccagagttgggtgcaccagattgccctgaggatggaggttctgggctgcgaggcacaggacctctacggcgccggatcacctggggccgaaacggccgaacaaaaactcatctcagaagaggatctgtcacctgcaaccggtcatcatcaccatcaccattga

SEQ ID NO: 765 - protein, 1619 aa, synthetic construct
  REGION 1..1619: note = Description of Artificial Sequence: Synthetic polypeptide
ATRRYYLGAVELSWDYMQSDLGELPVDARFPPRVPKSFPFNTSVVYKKTLFVEFTDHLFNIAKPRPPWMGLLGPTIQAEVYDTVVITLKNMASHPVSLHAVGVSYWKASEGAEYDDQTSQREKEDDKVFPGGSHTYVWQVLKENGPMASDPLCLTYSYLSHVDLVKDLNSGLIGALLVCREGSLAKEKTQTLHKFILLFAVFDEGKSWHSETKNSLMQDRDAASARAWPKMHTVNGYVNRSLPGLIGCHRKSVYWHVIGMGTTPEVHSIFLEGHTFLVRNHRQASLEISPITFLTAQTLLMDLGQFLLFCHISSHQHDGMEAYVKVDSCPEEPQLRMKNNEEAEDYDDDLTDSEMDVVRFDDDNSPSFIQIRSVAKKHPKTWVHYIAAEEEDWDYAPLVLAPDDRSYKSQYLNNGPQRIGRKYKKVRFMAYTDETFKTREAIQHESGILGPLLYGEVGDTLLIIFKNQASRPYNIYPHGITDVRPLYSRRLPKGVKHLKDFPILPGEIFKYKWTVTVEDGPTKSDPRCLTRYYSSFVNMERDLASGLIGPLLICYKESVDQRGNQIMSDKRNVILFSVFDENRSWYLTENIQRFLPNPAGVQLEDPEFQASNIMHSINGYVFDSLQLSVCLHEVAYWYILSIGAQTDFLSVFFSGYTFKHKMVYEDTLTLFPFSGETVFMSMENPGLWILGCHNSDFRNRGMTALLKVSSCDKNTGDYYEDSYEDISAYLLSKNNAIEPRSFSQNPPVLKRHQREITRTTLQSDQEEIDYDDTISVEMKKEDFDIYDEDENQSPRSFQKKTRHYFIAAVERLWDYGMSSSPHVLRNRAQSGSVPQFKKVVFQEFTDGSFTQPLYRGAPTSESATPESGPGSEPATSGSETPGTSESATPESGPGSEPATSGSETPGTSESATPESGPGTSTEPSEGSAPGTSESATPESGPGSPAGSPTSTEEGSPAGSPTSTEEGSPAGSPTSTEEGTSESATPESGPGTSTEPSEGSAPGASSGELNEHLGLLGPYIRAEVEDNIMVTFRNQASRPYSFYSSLISYEEDQRQGAEPRKNFVKPNETKTYFWKVQHHMAPTKDEFDCKAWAYFSDVDLEKDVHSGLIGPLLVCHTNTLNPAHGRQVTVQEFALFFTIFDETKSWYFTENMERNCRAPCNIQMEDPTFKENYRFHAINGYIMDTLPGLVMAQDQRIRWYLLSMGSNENIHSIHFSGHVFTVRKKEEYKMALYNLYPGVFETVEMLPSKAGIWRVECLIGEHLHAGMSTLFLVYSNKCQTPLGMASGHIRDFQITASGQYGQWAPKLARLHYSGSINAWSTKEPFSWIKVDLLAPMIIHGIKTQGARQKFSSLYISQFIIMYSLDGKKWQTYRGNSTGTLMVFFGNVDSSGIKHNIFNPPIIARYIRLHPTHYSIRSTLRMELMGCDLNSCSMPLGMESKAISDAQITASSYFTNMFATWSPSKARLHLQGRSNAWRPQVNNPKEWLQVDFQKTMKVTGVTTQGVKSLLTSMYVKEFLISSSQDGHQWTLFFQNGKVKVFQGNQDSFTPVVNSLDPPLLTRYLRIHPQSWVHQIALRMEVLGCEAQDLYGAGSPGAETAEQKLISEEDLSPATGHHHHHH

SEQ ID NO: 766 - DNA, 4860 bp, synthetic construct
  misc_feature 1..4860: note = Description of Artificial Sequence: Synthetic polynucleotide
  source 1..4860: mol_type = other DNA
gccaccagaagatactacctgggtgcagtggaactgtcatgggactatatgcaaagtgatctcggtgagctgcctgtggacgcaagatttcctcctagagtgccaaaatcttttccattcaacacctcagtcgtgtacaaaaagactctgtttgtagaattcacggatcaccttttcaacatcgctaagccaaggccaccctggatgggtctgctaggtcctaccatccaggctgaggtttatgatacagtggtcattacacttaagaacatggcttcccatcctgtcagtcttcatgctgttggtgtatcctactggaaagcttctgagggagctgaatatgatgatcagaccagtcaaagggagaaagaagatgataaagtcttccctggtggaagccatacatatgtctggcaggtcctgaaagagaatggtccaatggcctctgacccactgtgccttacctactcatatctttctcatgtggacctggtaaaagacttgaattcaggcctcattggagccctactagtatgtagagaagggagtctggccaaggaaaagacacagaccttgcacaaatttatactactttttgctgtatttgatgaagggaaaagttggcactcagaaacaaagaactccttgatgcaggatagggatgctgcatctgctcgggcctggcctaaaatgcacacagtcaatggttatgtaaacaggtctctgccaggtctgattggatgccacaggaaatcagtctattggcatgtgattggaatgggcaccactcctgaagtgcactcaatattcctcgaaggtcacacatttcttgtgaggaaccatcgccaggctagcttggaaatctcgccaataactttccttactgctcaaacactcttgatggaccttggacagtttctactgttttgtcatatctcttcccaccaacatgatggcatggaagcttatgtcaaagtagacagctgtccagaggaaccccaactacgaatgaaaaataatgaagaagcggaagactatgatgatgatcttactgattctgaaatggatgtggtcaggtttgatgatgacaactctccttcctttatccaaattcgctcagttgccaagaagcatcctaaaacttgggtacattacattgctgctgaagaggaggactgggactatgctcccttagtcctcgcccccgatgacagaagttataaaagtcaatatttgaacaatggccctcagcggattggtaggaagtacaaaaaagtccgatttatggcatacacagatgaaacctttaagactcgtgaagctattcagcatgaatcaggaatcttgggacctttactttatggggaagttggagacacactgttgattatatttaagaatcaagcaagcagaccatataacatctaccctcacggaatcactgatgtccgtcctttgtattcaaggagattaccaaaaggtgtaaaacatttgaaggattttccaattctgccaggagaaatattcaaatataaatggacagtgactgtagaagatgggccaactaaatcagatcctcggtgcctgacccgctattactctagtttcgttaatatggagagagatctagcttcaggactcattggccctctcctcatctgctacaaagaatctgtagatcaaagaggaaaccagataatgtcagacaagaggaatgtcatcctgttttctgtatttgatgagaaccgaagctggtacctcacagagaatatacaacgctttctccccaatccagctggagtgcagcttgaggatccagagttccaagcctccaacatcatgcacagcatcaatggctatgtttttgatagtttgcagttgtcagtttgtttgcatgaggtggcatactggtacattctaagcattggagcacagactgacttcctttctgtcttcttctctggatataccttcaaacacaaaatggtctatgaagacacactcaccctattcccattctcaggagaaactgtcttcatgtcgatggaaaacccaggtctatggattctggggtgccacaactcagactttcggaacagaggcatgaccgccttactgaaggtttctagttgtgacaagaacactggtgattattacgaggacagttatgaagatatttcagcatacttgctgagtaaaaacaatgccattgaaccaagaagcttctctcaaaacccaccagtcttgaaacgccatcaacgggaaataactcgtactactcttcagtcagatcaagaggaaatcgattatgatgataccatatcagttgaaatgaagaaggaagattttgacatttatgatgaggatgaaaatcagagcccccgcagctttcaaaagaaaacacgacactattttattgctgcagtggagaggctctgggattatgggatgagtagctccccacatgttctaagaaacagggctcagagtggcagtgtccctcagttcaagaaagttgttttccaggaatttactgatggctcctttactcagcccttataccgtggcgcgccaacgtccgaaagtgctacccctgagtcaggccctggtagtgagcctgccacaagcggaagcgaaactccggggacctcagagtctgccactcccgaatcggggccaggctctgaaccggccacttcagggagcgaaacaccaggaacatcggagagcgctaccccggagagcgggccaggaactagtactgagcctagcgagggaagtgcacctggtacaagcgagtccgccacacccgagtctggccctggctctccagcgggctcacccacgagcactgaagagggctctcccgctggcagcccaacgtcgacagaagaaggatcaccagcaggctcccccacatcaacagaggagggtacatcagaatctgctactcccgagagtggacccggtacctccactgagcccagcgaggggagtgcaccaggtgcctcgagcggagaactaaatgaacatttgggactcctggggccatatataagagcagaagttgaagataatatcatggtaactttcagaaatcaggcctctcgtccctattccttctattctagccttatttcttatgaggaagatcagaggcaaggagcagaacctagaaaaaactttgtcaagcctaatgaaaccaaaacttacttttggaaagtgcaacatcatatggcacccactaaagatgagtttgactgcaaagcctgggcttatttctctgatgttgacctggaaaaagatgtgcactcaggcctgattggaccccttctggtctgccacactaacacactgaaccctgctcatgggagacaagtgacagtacaggaatttgctctgtttttcaccatctttgatgagaccaaaagctggtacttcactgaaaatatggaaagaaactgcagggctccctgcaatatccagatggaagatcccacttttaaagagaattatcgcttccatgcaatcaatggctacataatggatacactacctggcttagtaatggctcaggatcaaaggattcgatggtatctgctcagcatgggcagcaatgaaaacatccattctattcatttcagtggacatgtgttcactgtacgaaaaaaagaggagtataaaatggcactgtacaatctctatccaggtgtttttgagacagtggaaatgttaccatccaaagctggaatttggcgggtggaatgccttattggcgagcatctacatgctgggatgagcacactttttctggtgtacagcaataagtgtcagactcccctgggaatggcttctggacacattagagattttcagattacagcttcaggacaatatggacagtgggccccaaagctggccagacttcattattccggatcaatcaatgcctggagcaccaaggagcccttttcttggatcaaggtggatctgttggcaccaatgattattcacggcatcaagacccagggtgcccgtcagaagttctccagcctctacatctctcagtttatcatcatgtatagtcttgatgggaagaagtggcagacttatcgaggaaattccactggaaccttaatggtcttctttggcaatgtggattcatctgggataaaacacaatatttttaaccctccaattattgctcgatacatccgtttgcacccaactcattatagcattcgcagcactcttcgcatggagttgatgggctgtgatttaaatagttgcagcatgccattgggaatggagagtaaagcaatatcagatgcacagattactgcttcatcctactttaccaatatgtttgccacctggtctccttcaaaagctcgacttcacctccaagggaggagtaatgcctggagacctcaggtgaataatccaaaagagtggctgcaagtggacttccagaagacaatgaaagtcacaggagtaactactcagggagtaaaatctctgcttaccagcatgtatgtgaaggagttcctcatctccagcagtcaagatggccatcagtggactctcttttttcagaatggcaaagtaaaggtttttcagggaaatcaagactccttcacacctgtggtgaactctctagacccaccgttactgactcgctaccttcgaattcacccccagagttgggtgcaccagattgccctgaggatggaggttctgggctgcgaggcacaggacctctacggcgccggatcacctggggccgaaacggccgaacaaaaactcatctcagaagaggatctgtcacctgcaaccggtcatcatcaccatcaccattga

SEQ ID NO: 767 - protein, 1619 aa, synthetic construct
  REGION 1..1619: note = Description of Artificial Sequence: Synthetic polypeptide
ATRRYYLGAVELSWDYMQSDLGELPVDARFPPRVPKSFPFNTSVVYKKTLFVEFTDHLFNIAKPRPPWMGLLGPTIQAEVYDTVVITLKNMASHPVSLHAVGVSYWKASEGAEYDDQTSQREKEDDKVFPGGSHTYVWQVLKENGPMASDPLCLTYSYLSHVDLVKDLNSGLIGALLVCREGSLAKEKTQTLHKFILLFAVFDEGKSWHSETKNSLMQDRDAASARAWPKMHTVNGYVNRSLPGLIGCHRKSVYWHVIGMGTTPEVHSIFLEGHTFLVRNHRQASLEISPITFLTAQTLLMDLGQFLLFCHISSHQHDGMEAYVKVDSCPEEPQLRMKNNEEAEDYDDDLTDSEMDVVRFDDDNSPSFIQIRSVAKKHPKTWVHYIAAEEEDWDYAPLVLAPDDRSYKSQYLNNGPQRIGRKYKKVRFMAYTDETFKTREAIQHESGILGPLLYGEVGDTLLIIFKNQASRPYNIYPHGITDVRPLYSRRLPKGVKHLKDFPILPGEIFKYKWTVTVEDGPTKSDPRCLTRYYSSFVNMERDLASGLIGPLLICYKESVDQRGNQIMSDKRNVILFSVFDENRSWYLTENIQRFLPNPAGVQLEDPEFQASNIMHSINGYVFDSLQLSVCLHEVAYWYILSIGAQTDFLSVFFSGYTFKHKMVYEDTLTLFPFSGETVFMSMENPGLWILGCHNSDFRNRGMTALLKVSSCDKNTGDYYEDSYEDISAYLLSKNNAIEPRSFSQNPPVLKRHQREITRTTLQSDQEEIDYDDTISVEMKKEDFDIYDEDENQSPRSFQKKTRHYFIAAVERLWDYGMSSSPHVLRNRAQSGSVPQFKKVVFQEFTDGSFTQPLYRGELNEHLGLLGPYIRAEVEDNIMVTFRNQASRPYSFYSSLISYEEDQRQGAEPRKNFVKPNETKTYFWKVQHHMAPTKDEFDCKAWAYFSDVDLEKDVHSGLIGPLLVCHTNTLNPAHGRQVTVQEFALFFTIFDETKSWYFTENMERNCRAPCNIGAPGTPGSGTASSSPGASPGTSSTGSPGASPGTSSTGSPGASPGTSSTGSPGSSPSASTGTGPGTPGSGTASSSPGASPGTSSTGSPGASPGTSSTGSPGASPGTSSTGSPGSSTPSGATGSPGSSTPSGATGSPGASPGTSSTGSPASSQMEDPTFKENYRFHAINGYIMDTLPGLVMAQDQRIRWYLLSMGSNENIHSIHFSGHVFTVRKKEEYKMALYNLYPGVFETVEMLPSKAGIWRVECLIGEHLHAGMSTLFLVYSNKCQTPLGMASGHIRDFQITASGQYGQWAPKLARLHYSGSINAWSTKEPFSWIKVDLLAPMIIHGIKTQGARQKFSSLYISQFIIMYSLDGKKWQTYRGNSTGTLMVFFGNVDSSGIKHNIFNPPIIARYIRLHPTHYSIRSTLRMELMGCDLNSCSMPLGMESKAISDAQITASSYFTNMFATWSPSKARLHLQGRSNAWRPQVNNPKEWLQVDFQKTMKVTGVTTQGVKSLLTSMYVKEFLISSSQDGHQWTLFFQNGKVKVFQGNQDSFTPVVNSLDPPLLTRYLRIHPQSWVHQIALRMEVLGCEAQDLYGAGSPGAETAEQKLISEEDLSPATGHHHHHH

SEQ ID NO: 768 - DNA, 4860 bp, synthetic construct
  misc_feature 1..4860: note = Description of Artificial Sequence: Synthetic polynucleotide
  source 1..4860: mol_type = other DNA
gccaccagaagatactacctgggtgcagtggaactgtcatgggactatatgcaaagtgatctcggtgagctgcctgtggacgcaagatttcctcctagagtgccaaaatcttttccattcaacacctcagtcgtgtacaaaaagactctgtttgtagaattcacggatcaccttttcaacatcgctaagccaaggccaccctggatgggtctgctaggtcctaccatccaggctgaggtttatgatacagtggtcattacacttaagaacatggcttcccatcctgtcagtcttcatgctgttggtgtatcctactggaaagcttctgagggagctgaatatgatgatcagaccagtcaaagggagaaagaagatgataaagtcttccctggtggaagccatacatatgtctggcaggtcctgaaagagaatggtccaatggcctctgacccactgtgccttacctactcatatctttctcatgtggacctggtaaaagacttgaattcaggcctcattggagccctactagtatgtagagaagggagtctggccaaggaaaagacacagaccttgcacaaatttatactactttttgctgtatttgatgaagggaaaagttggcactcagaaacaaagaactccttgatgcaggatagggatgctgcatctgctcgggcctggcctaaaatgcacacagtcaatggttatgtaaacaggtctctgccaggtctgattggatgccacaggaaatcagtctattggcatgtgattggaatgggcaccactcctgaagtgcactcaatattcctcgaaggtcacacatttcttgtgaggaaccatcgccaggctagcttggaaatctcgccaataactttccttactgctcaaacactcttgatggaccttggacagtttctactgttttgtcatatctcttcccaccaacatgatggcatggaagcttatgtcaaagtagacagctgtccagaggaaccccaactacgaatgaaaaataatgaagaagcggaagactatgatgatgatcttactgattctgaaatggatgtggtcaggtttgatgatgacaactctccttcctttatccaaattcgctcagttgccaagaagcatcctaaaacttgggtacattacattgctgctgaagaggaggactgggactatgctcccttagtcctcgcccccgatgacagaagttataaaagtcaatatttgaacaatggccctcagcggattggtaggaagtacaaaaaagtccgatttatggcatacacagatgaaacctttaagactcgtgaagctattcagcatgaatcaggaatcttgggacctttactttatggggaagttggagacacactgttgattatatttaagaatcaagcaagcagaccatataacatctaccctcacggaatcactgatgtccgtcctttgtattcaaggagattaccaaaaggtgtaaaacatttgaaggattttccaattctgccaggagaaatattcaaatataaatggacagtgactgtagaagatgggccaactaaatcagatcctcggtgcctgacccgctattactctagtttcgttaatatggagagagatctagcttcaggactcattggccctctcctcatctgctacaaagaatctgtagatcaaagaggaaaccagataatgtcagacaagaggaatgtcatcctgttttctgtatttgatgagaaccgaagctggtacctcacagagaatatacaacgctttctccccaatccagctggagtgcagcttgaggatccagagttccaagcctccaacatcatgcacagcatcaatggctatgtttttgatagtttgcagttgtcagtttgtttgcatgaggtggcatactggtacattctaagcattggagcacagactgacttcctttctgtcttcttctctggatataccttcaaacacaaaatggtctatgaagacacactcaccctattcccattctcaggagaaactgtcttcatgtcgatggaaaacccaggtctatggattctggggtgccacaactcagactttcggaacagaggcatgaccgccttactgaaggtttctagttgtgacaagaacactggtgattattacgaggacagttatgaagatatttcagcatacttgctgagtaaaaacaatgccattgaaccaagaagcttctctcaaaacccaccagtcttgaaacgccatcaacgggaaataactcgtactactcttcagtcagatcaagaggaaatcgattatgatgataccatatcagttgaaatgaagaaggaagattttgacatttatgatgaggatgaaaatcagagcccccgcagctttcaaaagaaaacacgacactattttattgctgcagtggagaggctctgggattatgggatgagtagctccccacatgttctaagaaacagggctcagagtggcagtgtccctcagttcaagaaagttgttttccaggaatttactgatggctcctttactcagcccttataccgtggagaactaaatgaacatttgggactcctggggccatatataagagcagaagttgaagataatatcatggtaactttcagaaatcaggcctctcgtccctattccttctattctagccttatttcttatgaggaagatcagaggcaaggagcagaacctagaaaaaactttgtcaagcctaatgaaaccaaaacttacttttggaaagtgcaacatcatatggcacccactaaagatgagtttgactgcaaagcctgggcttatttctctgatgttgacctggaaaaagatgtgcactcaggcctgattggaccccttctggtctgccacactaacacactgaaccctgctcatgggagacaagtgacagtacaggaatttgctctgtttttcaccatctttgatgagaccaaaagctggtacttcactgaaaatatggaaagaaactgcagggctccctgcaatatcggcgcgccaggtacacccggatcgggtacagcgtcatcgagccccggtgcgtcacctggtacgtcgagcacggggtcgccaggggcgtcccctgggacgtcctcaacaggctcgcccggtgcgtcacccggcacgtcgtccacgggttcacctggtagctccccttccgcgtccactggcaccgggcctggaactccggggagcggcacagcgagctcgtcgccgggagcatcgcctgggacatcgagcaccgggtcgccaggagcatcgcccggaacatccagcacaggaagccccggcgcgtcgcccgggacatcaagcacaggttccccgggatcgagcacgccgtccggagccactggatcaccagggagctcgacaccttccggcgcaacgggatcgcccggagccagcccgggtacgtcaagcactggctcccctgcctcgagccagatggaagatcccacttttaaagagaattatcgcttccatgcaatcaatggctacataatggatacactacctggcttagtaatggctcaggatcaaaggattcgatggtatctgctcagcatgggcagcaatgaaaacatccattctattcatttcagtggacatgtgttcactgtacgaaaaaaagaggagtataaaatggcactgtacaatctctatccaggtgtttttgagacagtggaaatgttaccatccaaagctggaatttggcgggtggaatgccttattggcgagcatctacatgctgggatgagcacactttttctggtgtacagcaataagtgtcagactcccctgggaatggcttctggacacattagagattttcagattacagcttcaggacaatatggacagtgggccccaaagctggccagacttcattattccggatcaatcaatgcctggagcaccaaggagcccttttcttggatcaaggtggatctgttggcaccaatgattattcacggcatcaagacccagggtgcccgtcagaagttctccagcctctacatctctcagtttatcatcatgtatagtcttgatgggaagaagtggcagacttatcgaggaaattccactggaaccttaatggtcttctttggcaatgtggattcatctgggataaaacacaatatttttaaccctccaattattgctcgatacatccgtttgcacccaactcattatagcattcgcagcactcttcgcatggagttgatgggctgtgatttaaatagttgcagcatgccattgggaatggagagtaaagcaatatcagatgcacagattactgcttcatcctactttaccaatatgtttgccacctggtctccttcaaaagctcgacttcacctccaagggaggagtaatgcctggagacctcaggtgaataatccaaaagagtggctgcaagtggacttccagaagacaatgaaagtcacaggagtaactactcagggagtaaaatctctgcttaccagcatgtatgtgaaggagttcctcatctccagcagtcaagatggccatcagtggactctcttttttcagaatggcaaagtaaaggtttttcagggaaatcaagactccttcacacctgtggtgaactctctagacccaccgttactgactcgctaccttcgaattcacccccagagttgggtgcaccagattgccctgaggatggaggttctgggctgcgaggcacaggacctctacggcgccggatcacctggggccgaaacggccgaacaaaaactcatctcagaagaggatctgtcacctgcaaccggtcatcatcaccatcaccattga

SEQ ID NO: 769 - protein, 1619 aa, synthetic construct
  REGION 1..1619: note = Description of Artificial Sequence: Synthetic polypeptide
ATRRYYLGAVELSWDYMQSDLGELPVDARFPPRVPKSFPFNTSVVYKKTLFVEFTDHLFNIAKPRPPWMGLLGPTIQAEVYDTVVITLKNMASHPVSLHAVGVSYWKASEGAEYDDQTSQREKEDDKVFPGGSHTYVWQVLKENGPMASDPLCLTYSYLSHVDLVKDLNSGLIGALLVCREGSLAKEKTQTLHKFILLFAVFDEGKSWHSETKNSLMQDRDAASARAWPKMHTVNGYVNRSLPGLIGCHRKSVYWHVIGMGTTPEVHSIFLEGHTFLVRNHRQASLEISPITFLTAQTLLMDLGQFLLFCHISSHQHDGMEAYVKVDSCPEEPQLRMKNNEEAEDYDDDLTDSEMDVVRFDDDNSPSFIQIRSVAKKHPKTWVHYIAAEEEDWDYAPLVLAPDDRSYKSQYLNNGPQRIGRKYKKVRFMAYTDETFKTREAIQHESGILGPLLYGEVGDTLLIIFKNQASRPYNIYPHGITDVRPLYSRRLPKGVKHLKDFPILPGEIFKYKWTVTVEDGPTKSDPRCLTRYYSSFVNMERDLASGLIGPLLICYKESVDQRGNQIMSDKRNVILFSVFDENRSWYLTENIQRFLPNPAGVQLEDPEFQASNIMHSINGYVFDSLQLSVCLHEVAYWYILSIGAQTDFLSVFFSGYTFKHKMVYEDTLTLFPFSGETVFMSMENPGLWILGCHNSDFRNRGMTALLKVSSCDKNTGDYYEDSYEDISAYLLSKNNAIEPRSFSQNPPVLKRHQREITRTTLQSDQEEIDYDDTISVEMKKEDFDIYDEDENQSPRSFQKKTRHYFIAAVERLWDYGMSSSPHVLRNRAQSGSVPQFKKVVFQEFTDGSFTQPLYRGELNEHLGLLGPYIRAEVEDNIMVTFRNQASRPYSFYSSLISYEEDQRQGAEPRKNFVKPNETKTYFWKVQHHMAPTKDEFDCKAWAYFSDVDLEKDVHSGLIGPLLVCHTNTLNPAHGRQVTVQEFALFFTIFDETKSWYFTENMERNCRAPCNIQMEDPGAPGTPGSGTASSSPGASPGTSSTGSPGASPGTSSTGSPGASPGTSSTGSPGSSPSASTGTGPGTPGSGTASSSPGASPGTSSTGSPGASPGTSSTGSPGASPGTSSTGSPGSSTPSGATGSPGSSTPSGATGSPGASPGTSSTGSPASSTFKENYRFHAINGYIMDTLPGLVMAQDQRIRWYLLSMGSNENIHSIHFSGHVFTVRKKEEYKMALYNLYPGVFETVEMLPSKAGIWRVECLIGEHLHAGMSTLFLVYSNKCQTPLGMASGHIRDFQITASGQYGQWAPKLARLHYSGSINAWSTKEPFSWIKVDLLAPMIIHGIKTQGARQKFSSLYISQFIIMYSLDGKKWQTYRGNSTGTLMVFFGNVDSSGIKHNIFNPPIIARYIRLHPTHYSIRSTLRMELMGCDLNSCSMPLGMESKAISDAQITASSYFTNMFATWSPSKARLHLQGRSNAWRPQVNNPKEWLQVDFQKTMKVTGVTTQGVKSLLTSMYVKEFLISSSQDGHQWTLFFQNGKVKVFQGNQDSFTPVVNSLDPPLLTRYLRIHPQSWVHQIALRMEVLGCEAQDLYGAGSPGAETAEQKLISEEDLSPATGHHHHHH

SEQ ID NO: 770 - DNA, 4860 bp, synthetic construct
  misc_feature 1..4860: note = Description of Artificial Sequence: Synthetic polynucleotide
  source 1..4860: mol_type = other DNA
gccaccagaagatactacctgggtgcagtggaactgtcatgggactatatgcaaagtgatctcggtgagctgcctgtggacgcaagatttcctcctagagtgccaaaatcttttccattcaacacctcagtcgtgtacaaaaagactctgtttgtagaattcacggatcaccttttcaacatcgctaagccaaggccaccctggatgggtctgctaggtcctaccatccaggctgaggtttatgatacagtggtcattacacttaagaacatggcttcccatcctgtcagtcttcatgctgttggtgtatcctactggaaagcttctgagggagctgaatatgatgatcagaccagtcaaagggagaaagaagatgataaagtcttccctggtggaagccatacatatgtctggcaggtcctgaaagagaatggtccaatggcctctgacccactgtgccttacctactcatatctttctcatgtggacctggtaaaagacttgaattcaggcctcattggagccctactagtatgtagagaagggagtctggccaaggaaaagacacagaccttgcacaaatttatactactttttgctgtatttgatgaagggaaaagttggcactcagaaacaaagaactccttgatgcaggatagggatgctgcatctgctcgggcctggcctaaaatgcacacagtcaatggttatgtaaacaggtctctgccaggtctgattggatgccacaggaaatcagtctattggcatgtgattggaatgggcaccactcctgaagtgcactcaatattcctcgaaggtcacacatttcttgtgaggaaccatcgccaggctagcttggaaatctcgccaataactttccttactgctcaaacactcttgatggaccttggacagtttctactgttttgtcatatctcttcccaccaacatgatggcatggaagcttatgtcaaagtagacagctgtccagaggaaccccaactacgaatgaaaaataatgaagaagcggaagactatgatgatgatcttactgattctgaaatggatgtggtcaggtttgatgatgacaactctccttcctttatccaaattcgctcagttgccaagaagcatcctaaaacttgggtacattacattgctgctgaagaggaggactgggactatgctcccttagtcctcgcccccgatgacagaagttataaaagtcaatatttgaacaatggccctcagcggattggtaggaagtacaaaaaagtccgatttatggcatacacagatgaaacctttaagactcgtgaagctattcagcatgaatcaggaatcttgggacctttactttatggggaagttggagacacactgttgattatatttaagaatcaagcaagcagaccatataacatctaccctcacggaatcactgatgtccgtcctttgtattcaaggagattaccaaaaggtgtaaaacatttgaaggattttccaattctgccaggagaaatattcaaatataaatggacagtgactgtagaagatgggccaactaaatcagatcctcggtgcctgacccgctattactctagtttcgttaatatggagagagatctagcttcaggactcattggccctctcctcatctgctacaaagaatctgtagatcaaagaggaaaccagataatgtcagacaagaggaatgtcatcctgttttctgtatttgatgagaaccgaagctggtacctcacagagaatatacaacgctttctccccaatccagctggagtgcagcttgaggatccagagttccaagcctccaacatcatgcacagcatcaatggctatgtttttgatagtttgcagttgtcagtttgtttgcatgaggtggcatactggtacattctaagcattggagcacagactgacttcctttctgtcttcttctctggatataccttcaaacacaaaatggtctatgaagacacactcaccctattcccattctcaggagaaactgtcttcatgtcgatggaaaacccaggtctatggattctggggtgccacaactcagactttcggaacagaggcatgaccgccttactgaaggtttctagttgtgacaagaacactggtgattattacgaggacagttatgaagatatttcagcatacttgctgagtaaaaacaatgccattgaaccaagaagcttctctcaaaacccaccagtcttgaaacgccatcaacgggaaataactcgtactactcttcagtcagatcaagaggaaatcgattatgatgataccatatcagttgaaatgaagaaggaagattttgacatttatgatgaggatgaaaatcagagcccccgcagctttcaaaagaaaacacgacactattttattgctgcagtggagaggctctgggattatgggatgagtagctccccacatgttctaagaaacagggctcagagtggcagtgtccctcagttcaagaaagttgttttccaggaatttactgatggctcctttactcagcccttataccgtggagaactaaatgaacatttgggactcctggggccatatataagagcagaagttgaagataatatcatggtaactttcagaaatcaggcctctcgtccctattccttctattctagccttatttcttatgaggaagatcagaggcaaggagcagaacctagaaaaaactttgtcaagcctaatgaaaccaaaacttacttttggaaagtgcaacatcatatggcacccactaaagatgagtttgactgcaaagcctgggcttatttctctgatgttgacctggaaaaagatgtgcactcaggcctgattggaccccttctggtctgccacactaacacactgaaccctgctcatgggagacaagtgacagtacaggaatttgctctgtttttcaccatctttgatgagaccaaaagctggtacttcactgaaaatatggaaagaaactgcagggctccctgcaatatccagatggaagatcccggcgcgccaggtacacccggatcgggtacagcgtcatcgagccccggtgcgtcacctggtacgtcgagcacggggtcgccaggggcgtcccctgggacgtcctcaacaggctcgcccggtgcgtcacccggcacgtcgtccacgggttcacctggtagctccccttccgcgtccactggcaccgggcctggaactccggggagcggcacagcgagctcgtcgccgggagcatcgcctgggacatcgagcaccgggtcgccaggagcatcgcccggaacatccagcacaggaagccccggcgcgtcgcccgggacatcaagcacaggttccccgggatcgagcacgccgtccggagccactggatcaccagggagctcgacaccttccggcgcaacgggatcgcccggagccagcccgggtacgtcaagcactggctcccctgcctcgagcacttttaaagagaattatcgcttccatgcaatcaatggctacataatggatacactacctggcttagtaatggctcaggatcaaaggattcgatggtatctgctcagcatgggcagcaatgaaaacatccattctattcatttcagtggacatgtgttcactgtacgaaaaaaagaggagtataaaatggcactgtacaatctctatccaggtgtttttgagacagtggaaatgttaccatccaaagctggaatttggcgggtggaatgccttattggcgagcatctacatgctgggatgagcacactttttctggtgtacagcaataagtgtcagactcccctgggaatggcttctggacacattagagattttcagattacagcttcaggacaatatggacagtgggccccaaagctggccagacttcattattccggatcaatcaatgcctggagcaccaaggagcccttttcttggatcaaggtggatctgttggcaccaatgattattcacggcatcaagacccagggtgcccgtcagaagttctccagcctctacatctctcagtttatcatcatgtatagtcttgatgggaagaagtggcagacttatcgaggaaattccactggaaccttaatggtcttctttggcaatgtggattcatctgggataaaacacaatatttttaaccctccaattattgctcgatacatccgtttgcacccaactcattatagcattcgcagcactcttcgcatggagttgatgggctgtgatttaaatagttgcagcatgccattgggaatggagagtaaagcaatatcagatgcacagattactgcttcatcctactttaccaatatgtttgccacctggtctccttcaaaagctcgacttcacctccaagggaggagtaatgcctggagacctcaggtgaataatccaaaagagtggctgcaagtggacttccagaagacaatgaaagtcacaggagtaactactcagggagtaaaatctctgcttaccagcatgtatgtgaaggagttcctcatctccagcagtcaagatggccatcagtggactctcttttttcagaatggcaaagtaaaggtttttcagggaaatcaagactccttcacacctgtggtgaactctctagacccaccgttactgactcgctaccttcgaattcacccccagagttgggtgcaccagattgccctgaggatggaggttctgggctgcgaggcacaggacctctacggcgccggatcacctggggccgaaacggccgaacaaaaactcatctcagaagaggatctgtcacctgcaaccggtcatcatcaccatcaccattga

SEQ ID NO: 771 - protein, 1619 aa, synthetic construct
  REGION 1..1619: note = Description of Artificial Sequence: Synthetic polypeptide
ATRRYYLGAVELSWDYMQSDLGELPVDARFPPRVPKSFPFNTSVVYKKTLFVEFTDHLFNIAKPRPPWMGLLGPTIQAEVYDTVVITLKNMASHPVSLHAVGVSYWKASEGAEYDDQTSQREKEDDKVFPGGSHTYVWQVLKENGPMASDPLCLTYSYLSHVDLVKDLNSGLIGALLVCREGSLAKEKTQTLHKFILLFAVFDEGKSWHSETKNSLMQDRDAASARAWPKMHTVNGYVNRSLPGLIGCHRKSVYWHVIGMGTTPEVHSIFLEGHTFLVRNHRQASLEISPITFLTAQTLLMDLGQFLLFCHISSHQHDGMEAYVKVDSCPEEPQLRMKNNEEAEDYDDDLTDSEMDVVRFDDDNSPSFIQIRSVAKKHPKTWVHYIAAEEEDWDYAPLVLAPDDRSYKSQYLNNGPQRIGRKYKKVRFMAYTDETFKTREAIQHESGILGPLLYGEVGDTLLIIFKNQASRPYNIYPHGITDVRPLYSRRLPKGVKHLKDFPILPGEIFKYKWTVTVEDGPTKSDPRCLTRYYSSFVNMERDLASGLIGPLLICYKESVDQRGNQIMSDKRNVILFSVFDENRSWYLTENIQRFLPNPAGVQLEDPEFQASNIMHSINGYVFDSLQLSVCLHEVAYWYILSIGAQTDFLSVFFSGYTFKHKMVYEDTLTLFPFSGETVFMSMENPGLWILGCHNSDFRNRGMTALLKVSSCDKNTGDYYEDSYEDISAYLLSKNNAIEPRSFSQNPPVLKRHQREITRTTLQSDQEEIDYDDTISVEMKKEDFDIYDEDENQSPRSFQKKTRHYFIAAVERLWDYGMSSSPHVLRNRAQSGSVPQFKKVVFQEFTDGSFTQPLYRGELNEHLGLLGPYIRAEVEDNIMVTFRNQASRPYSFYSSLISYEEDQRQGAEPRKNFVKPNETKTYFWKVQHHMAPTKDEFDCKAWAYFSDVDLEKDVHSGLIGPLLVCHTNTLNPAHGRQVTVQEFALFFTIFDETKSWYFTENMERNCRGAPTSESATPESGPGSEPATSGSETPGTSESATPESGPGSEPATSGSETPGTSESATPESGPGTSTEPSEGSAPGTSESATPESGPGSPAGSPTSTEEGSPAGSPTSTEEGSPAGSPTSTEEGTSESATPESGPGTSTEPSEGSAPGASSAPCNIQMEDPTFKENYRFHAINGYIMDTLPGLVMAQDQRIRWYLLSMGSNENIHSIHFSGHVFTVRKKEEYKMALYNLYPGVFETVEMLPSKAGIWRVECLIGEHLHAGMSTLFLVYSNKCQTPLGMASGHIRDFQITASGQYGQWAPKLARLHYSGSINAWSTKEPFSWIKVDLLAPMIIHGIKTQGARQKFSSLYISQFIIMYSLDGKKWQTYRGNSTGTLMVFFGNVDSSGIKHNIFNPPIIARYIRLHPTHYSIRSTLRMELMGCDLNSCSMPLGMESKAISDAQITASSYFTNMFATWSPSKARLHLQGRSNAWRPQVNNPKEWLQVDFQKTMKVTGVTTQGVKSLLTSMYVKEFLISSSQDGHQWTLFFQNGKVKVFQGNQDSFTPVVNSLDPPLLTRYLRIHPQSWVHQIALRMEVLGCEAQDLYGAGSPGAETAEQKLISEEDLSPATGHHHHHH

SEQ ID NO: 772 - DNA, 4860 bp, synthetic construct
  misc_feature 1..4860: note = Description of Artificial Sequence: Synthetic polynucleotide
  source 1..4860: mol_type = other DNA
gccaccagaagatactacctgggtgcagtggaactgtcatgggactatatgcaaagtgatctcggtgagctgcctgtggacgcaagatttcctcctagagtgccaaaatcttttccattcaacacctcagtcgtgtacaaaaagactctgtttgtagaattcacggatcaccttttcaacatcgctaagccaaggccaccctggatgggtctgctaggtcctaccatccaggctgaggtttatgatacagtggtcattacacttaagaacatggcttcccatcctgtcagtcttcatgctgttggtgtatcctactggaaagcttctgagggagctgaatatgatgatcagaccagtcaaagggagaaagaagatgataaagtcttccctggtggaagccatacatatgtctggcaggtcctgaaagagaatggtccaatggcctctgacccactgtgccttacctactcatatctttctcatgtggacctggtaaaagacttgaattcaggcctcattggagccctactagtatgtagagaagggagtctggccaaggaaaagacacagaccttgcacaaatttatactactttttgctgtatttgatgaagggaaaagttggcactcagaaacaaagaactccttgatgcaggatagggatgctgcatctgctcgggcctggcctaaaatgcacacagtcaatggttatgtaaacaggtctctgccaggtctgattggatgccacaggaaatcagtctattggcatgtgattggaatgggcaccactcctgaagtgcactcaatattcctcgaaggtcacacatttcttgtgaggaaccatcgccaggctagcttggaaatctcgccaataactttccttactgctcaaacactcttgatggaccttggacagtttctactgttttgtcatatctcttcccaccaacatgatggcatggaagcttatgtcaaagtagacagctgtccagaggaaccccaactacgaatgaaaaataatgaagaagcggaagactatgatgatgatcttactgattctgaaatggatgtggtcaggtttgatgatgacaactctccttcctttatccaaattcgctcagttgccaagaagcatcctaaaacttgggtacattacattgctgctgaagaggaggactgggactatgctcccttagtcctcgcccccgatgacagaagttataaaagtcaatatttgaacaatggccctcagcggattggtaggaagtacaaaaaagtccgatttatggcatacacagatgaaacctttaagactcgtgaagctattcagcatgaatcaggaatcttgggacctttactttatggggaagttggagacacactgttgattatatttaagaatcaagcaagcagaccatataacatctaccctcacggaatcactgatgtccgtcctttgtattcaaggagattaccaaaaggtgtaaaacatttgaaggattttccaattctgccaggagaaatattcaaatataaatggacagtgactgtagaagatgggccaactaaatcagatcctcggtgcctgacccgctattactctagtttcgttaatatggagagagatctagcttcaggactcattggccctctcctcatctgctacaaagaatctgtagatcaaagaggaaaccagataatgtcagacaagaggaatgtcatcctgttttctgtatttgatgagaaccgaagctggtacctcacagagaatatacaacgctttctccccaatccagctggagtgcagcttgaggatccagagttccaagcctccaacatcatgcacagcatcaatggctatgtttttgatagtttgcagttgtcagtttgtttgcatgaggtggcatactggtacattctaagcattggagcacagactgacttcctttctgtcttcttctctggatataccttcaaacacaaaatggtctatgaagacacactcaccctattcccattctcaggagaaactgtcttcatgtcgatggaaaacccaggtctatggattctggggtgccacaactcagactttcggaacagaggcatgaccgccttactgaaggtttctagttgtgacaagaacactggtgattattacgaggacagttatgaagatatttcagcatacttgctgagtaaaaacaatgccattgaaccaagaagcttctctcaaaacccaccagtcttgaaacgccatcaacgggaaataactcgtactactcttcagtcagatcaagaggaaatcgattatgatgataccatatcagttgaaatgaagaaggaagattttgacatttatgatgaggatgaaaatcagagcccccgcagctttcaaaagaaaacacgacactattttattgctgcagtggagaggctctgggattatgggatgagtagctccccacatgttctaagaaacagggctcagagtggcagtgtccctcagttcaagaaagttgttttccaggaatttactgatggctcctttactcagcccttataccgtggagaactaaatgaacatttgggactcctggggccatatataagagcagaagttgaagataatatcatggtaactttcagaaatcaggcctctcgtccctattccttctattctagccttatttcttatgaggaagatcagaggcaaggagcagaacctagaaaaaactttgtcaagcctaatgaaaccaaaacttacttttggaaagtgcaacatcatatggcacccactaaagatgagtttgactgcaaagcctgggcttatttctctgatgttgacctggaaaaagatgtgcactcaggcctgattggaccccttctggtctgccacactaacacactgaaccctgctcatgggagacaagtgacagtacaggaatttgctctgtttttcaccatctttgatgagaccaaaagctggtacttcactgaaaatatggaaagaaactgcaggggcgcgccaacgtccgaaagtgctacccctgagtcaggccctggtagtgagcctgccacaagcggaagcgaaactccggggacctcagagtctgccactcccgaatcggggccaggctctgaaccggccacttcagggagcgaaacaccaggaacatcggagagcgctaccccggagagcgggccaggaactagtactgagcctagcgagggaagtgcacctggtacaagcgagtccgccacacccgagtctggccctggctctccagcgggctcacccacgagcactgaagagggctctcccgctggcagcccaacgtcgacagaagaaggatcaccagcaggctcccccacatcaacagaggagggtacatcagaatctgctactcccgagagtggacccggtacctccactgagcccagcgaggggagtgcaccaggtgcctcgagcgctccctgcaatatccagatggaagatcccacttttaaagagaattatcgcttccatgcaatcaatggctacataatggatacactacctggcttagtaatggctcaggatcaaaggattcgatggtatctgctcagcatgggcagcaatgaaaacatccattctattcatttcagtggacatgtgttcactgtacgaaaaaaagaggagtataaaatggcactgtacaatctctatccaggtgtttttgagacagtggaaatgttaccatccaaagctggaatttggcgggtggaatgccttattggcgagcatctacatgctgggatgagcacactttttctggtgtacagcaataagtgtcagactcccctgggaatggcttctggacacattagagattttcagattacagcttcaggacaatatggacagtgggccccaaagctggccagacttcattattccggatcaatcaatgcctggagcaccaaggagcccttttcttggatcaaggtggatctgttggcaccaatgattattcacggcatcaagacccagggtgcccgtcagaagttctccagcctctacatctctcagtttatcatcatgtatagtcttgatgggaagaagtggcagacttatcgaggaaattccactggaaccttaatggtcttctttggcaatgtggattcatctgggataaaacacaatatttttaaccctccaattattgctcgatacatccgtttgcacccaactcattatagcattcgcagcactcttcgcatggagttgatgggctgtgatttaaatagttgcagcatgccattgggaatggagagtaaagcaatatcagatgcacagattactgcttcatcctactttaccaatatgtttgccacctggtctccttcaaaagctcgacttcacctccaagggaggagtaatgcctggagacctcaggtgaataatccaaaagagtggctgcaagtggacttccagaagacaatgaaagtcacaggagtaactactcagggagtaaaatctctgcttaccagcatgtatgtgaaggagttcctcatctccagcagtcaagatggccatcagtggactctcttttttcagaatggcaaagtaaaggtttttcagggaaatcaagactccttcacacctgtggtgaactctctagacccaccgttactgactcgctaccttcgaattcacccccagagttgggtgcaccagattgccctgaggatggaggttctgggctgcgaggcacaggacctctacggcgccggatcacctggggccgaaacggccgaacaaaaactcatctcagaagaggatctgtcacctgcaaccggtcatcatcaccatcaccattga

SEQ ID NO: 773 - protein, 1619 aa, synthetic construct
  REGION 1..1619: note = Description of Artificial Sequence: Synthetic polypeptide
ATRRYYLGAVELSWDYMQSDLGELPVDARFPPRVPKSFPFNTSVVYKKTLFVEFTDHLFNIAKPRPPWMGLLGPTIQAEVYDTVVITLKNMASHPVSLHAVGVSYWKASEGAEYDDQTSQREKEDDKVFPGGSHTYVWQVLKENGPMASDPLCLTYSYLSHVDLVKDLNSGLIGALLVCREGSLAKEKTQTLHKFILLFAVFDEGKSWHSETKNSLMQDRDAASARAWPKMHTVNGYVNRSLPGLIGCHRKSVYWHVIGMGTTPEVHSIFLEGHTFLVRNHRQASLEISPITFLTAQTLLMDLGQFLLFCHISSHQHDGMEAYVKVDSCPEEPQLRMKNNEEAEDYDDDLTDSEMDVVRFDDDNSPSFIQIRSVAKKHPKTWVHYIAAEEEDWDYAPLVLAPDDRSYKSQYLNNGPQRIGRKYKKVRFMAYTDETFKTREAIQHESGILGPLLYGEVGDTLLIIFKNQASRPYNIYPHGITDVRPLYSRRLPKGVKHLKDFPILPGEIFKYKWTVTVEDGPTKSDPRCLTRYYSSFVNMERDLASGLIGPLLICYKESVDQRGNQIMSDKRNVILFSVFDENRSWYLTENIQRFLPNPAGVQLEDPEFQASNIMHSINGYVFDSLQLSVCLHEVAYWYILSIGAQTDFLSVFFSGYTFKHKMVYEDTLTLFPFSGETVFMSMENPGLWILGCHNSDFRNRGMTALLKVSSCDKNTGDYYEDSYEDISAYLLSKNNAIEPRSFSQNPPVLKRHQREITRTTLQSDQEEIDYDDTISVEMKKEDFDIYDEDENQSPRSFQKKTRHYFIAAVERLWDYGMSSSPHVLRNRAQSGSVPQFKKVVFQEFTDGSFTQPLYRGELNEHLGLLGPYIRAEVEDNIMVTFRNQASRPYSFYSSLISYEEDQRQGAEPRKNFVKPNETKTYFWKVQHHMAPTKDEFDCKAWAYFSDVDLEKDVHSGLIGPLLVCHTNTLNPAHGRQVTVQEFALFFTIFDETKSWYFTENMERNCRGAPGTPGSGTASSSPGASPGTSSTGSPGASPGTSSTGSPGASPGTSSTGSPGSSPSASTGTGPGTPGSGTASSSPGASPGTSSTGSPGASPGTSSTGSPGASPGTSSTGSPGSSTPSGATGSPGSSTPSGATGSPGASPGTSSTGSPASSAPCNIQMEDPTFKENYRFHAINGYIMDTLPGLVMAQDQRIRWYLLSMGSNENIHSIHFSGHVFTVRKKEEYKMALYNLYPGVFETVEMLPSKAGIWRVECLIGEHLHAGMSTLFLVYSNKCQTPLGMASGHIRDFQITASGQYGQWAPKLARLHYSGSINAWSTKEPFSWIKVDLLAPMIIHGIKTQGARQKFSSLYISQFIIMYSLDGKKWQTYRGNSTGTLMVFFGNVDSSGIKHNIFNPPIIARYIRLHPTHYSIRSTLRMELMGCDLNSCSMPLGMESKAISDAQITASSYFTNMFATWSPSKARLHLQGRSNAWRPQVNNPKEWLQVDFQKTMKVTGVTTQGVKSLLTSMYVKEFLISSSQDGHQWTLFFQNGKVKVFQGNQDSFTPVVNSLDPPLLTRYLRIHPQSWVHQIALRMEVLGCEAQDLYGAGSPGAETAEQKLISEEDLSPATGHHHHHH

SEQ ID NO: 774 - DNA, 4860 bp, synthetic construct
  misc_feature 1..4860: note = Description of Artificial Sequence: Synthetic polynucleotide
  source 1..4860: mol_type = other DNA
gccaccagaagatactacctgggtgcagtggaactgtcatgggactatatgcaaagtgatctcggtgagctgcctgtggacgcaagatttcctcctagagtgccaaaatcttttccattcaacacctcagtcgtgtacaaaaagactctgtttgtagaattcacggatcaccttttcaacatcgctaagccaaggccaccctggatgggtctgctaggtcctaccatccaggctgaggtttatgatacagtggtcattacacttaagaacatggcttcccatcctgtcagtcttcatgctgttggtgtatcctactggaaagcttctgagggagctgaatatgatgatcagaccagtcaaagggagaaagaagatgataaagtcttccctggtggaagccatacatatgtctggcaggtcctgaaagagaatggtccaatggcctctgacccactgtgccttacctactcatatctttctcatgtggacctggtaaaagacttgaattcaggcctcattggagccctactagtatgtagagaagggagtctggccaaggaaaagacacagaccttgcacaaatttatactactttttgctgtatttgatgaagggaaaagttggcactcagaaacaaagaactccttgatgcaggatagggatgctgcatctgctcgggcctggcctaaaatgcacacagtcaatggttatgtaaacaggtctctgccaggtctgattggatgccacaggaaatcagtctattggcatgtgattggaatgggcaccactcctgaagtgcactcaatattcctcgaaggtcacacatttcttgtgaggaaccatcgccaggctagcttggaaatctcgccaataactttccttactgctcaaacactcttgatggaccttggacagtttctactgttttgtcatatctcttcccaccaacatgatggcatggaagcttatgtcaaagtagacagctgtccagaggaaccccaactacgaatgaaaaataatgaagaagcggaagactatgatgatgatcttactgattctgaaatggatgtggtcaggtttgatgatgacaactctccttcctttatccaaattcgctcagttgccaagaagcatcctaaaacttgggtacattacattgctgctgaagaggaggactgggactatgctcccttagtcctcgcccccgatgacagaagttataaaagtcaatatttgaacaatggccctcagcggattggtaggaagtacaaaaaagtccgatttatggcatacacagatgaaacctttaagactcgtgaagctattcagcatgaatcaggaatcttgggacctttactttatggggaagttggagacacactgttgattatatttaagaatcaagcaagcagaccatataacatctaccctcacggaatcactgatgtccgtcctttgtattcaaggagattaccaaaaggtgtaaaacatttgaaggattttccaattctgccaggagaaatattcaaatataaatggacagtgactgtagaagatgggccaactaaatcagatcctcggtgcctgacccgctattactctagtttcgttaatatggagagagatctagcttcaggactcattggccctctcctcatctgctacaaagaatctgtagatcaaagaggaaaccagataatgtcagacaagaggaatgtcatcctgttttctgtatttgatgagaaccgaagctggtacctcacagagaatatacaacgctttctccccaatccagctggagtgcagcttgaggatccagagttccaagcctccaacatcatgcacagcatcaatggctatgtttttgatagtttgcagttgtcagtttgtttgcatgaggtggcatactggtacattctaagcattggagcacagactgacttcctttctgtcttcttctctggatataccttcaaacacaaaatggtctatgaagacacactcaccctattcccattctcaggagaaactgtcttcatgtcgatggaaaacccaggtctatggattctggggtgccacaactcagactttcggaacagaggcatgaccgccttactgaaggtttctagttgtgacaagaacactggtgattattacgaggacagttatgaagatatttcagcatacttgctgagtaaaaacaatgccattgaaccaagaagcttctctcaaaacccaccagtcttgaaacgccatcaacgggaaataactcgtactactcttcagtcagatcaagaggaaatcgattatgatgataccatatcagttgaaatgaagaaggaagattttgacatttatgatgaggatgaaaatcagagcccccgcagctttcaaaagaaaacacgacactattttattgctgcagtggagaggctctgggattatgggatgagtagctccccacatgttctaagaaacagggctcagagtggcagtgtccctcagttcaagaaagttgttttccaggaatttactgatggctcctttactcagcccttataccgtggagaactaaatgaacatttgggactcctggggccatatataagagcagaagttgaagataatatcatggtaactttcagaaatcaggcctctcgtccctattccttctattctagccttatttcttatgaggaagatcagaggcaaggagcagaacctagaaaaaactttgtcaagcctaatgaaaccaaaacttacttttggaaagtgcaacatcatatggcacccactaaagatgagtttgactgcaaagcctgggcttatttctctgatgttgacctggaaaaagatgtgcactcaggcctgattggaccccttctggtctgccacactaacacactgaaccctgctcatgggagacaagtgacagtacaggaatttgctctgtttttcaccatctttgatgagaccaaaagctggtacttcactgaaaatatggaaagaaactgcaggggcgcgccaggtacacccggatcgggtacagcgtcatcgagccccggtgcgtcacctggtacgtcgagcacggggtcgccaggggcgtcccctgggacgtcctcaacaggctcgcccggtgcgtcacccggcacgtcgtccacgggttcacctggtagctccccttccgcgtccactggcaccgggcctggaactccggggagcggcacagcgagctcgtcgccgggagcatcgcctgggacatcgagcaccgggtcgccaggagcatcgcccggaacatccagcacaggaagccccggcgcgtcgcccgggacatcaagcacaggttccccgggatcgagcacgccgtccggagccactggatcaccagggagctcgacaccttccggcgcaacgggatcgcccggagccagcccgggtacgtcaagcactggctcccctgcctcgagcgctccctgcaatatccagatggaagatcccacttttaaagagaattatcgcttccatgcaatcaatggctacataatggatacactacctggcttagtaatggctcaggatcaaaggattcgatggtatctgctcagcatgggcagcaatgaaaacatccattctattcatttcagtggacatgtgttcactgtacgaaaaaaagaggagtataaaatggcactgtacaatctctatccaggtgtttttgagacagtggaaatgttaccatccaaagctggaatttggcgggtggaatgccttattggcgagcatctacatgctgggatgagcacactttttctggtgtacagcaataagtgtcagactcccctgggaatggcttctggacacattagagattttcagattacagcttcaggacaatatggacagtgggccccaaagctggccagacttcattattccggatcaatcaatgcctggagcaccaaggagcccttttcttggatcaaggtggatctgttggcaccaatgattattcacggcatcaagacccagggtgcccgtcagaagttctccagcctctacatctctcagtttatcatcatgtatagtcttgatgggaagaagtggcagacttatcgaggaaattccactggaaccttaatggtcttctttggcaatgtggattcatctgggataaaacacaatatttttaaccctccaattattgctcgatacatccgtttgcacccaactcattatagcattcgcagcactcttcgcatggagttgatgggctgtgatttaaatagttgcagcatgccattgggaatggagagtaaagcaatatcagatgcacagattactgcttcatcctactttaccaatatgtttgccacctggtctccttcaaaagctcgacttcacctccaagggaggagtaatgcctggagacctcaggtgaataatccaaaagagtggctgcaagtggacttccagaagacaatgaaagtcacaggagtaactactcagggagtaaaatctctgcttaccagcatgtatgtgaaggagttcctcatctccagcagtcaagatggccatcagtggactctcttttttcagaatggcaaagtaaaggtttttcagggaaatcaagactccttcacacctgtggtgaactctctagacccaccgttactgactcgctaccttcgaattcacccccagagttgggtgcaccagattgccctgaggatggaggttctgggctgcgaggcacaggacctctacggcgccggatcacctggggccgaaacggccgaacaaaaactcatctcagaagaggatctgtcacctgcaaccggtcatcatcaccatcaccattga

SEQ ID NO: 775 - protein, 1619 aa, synthetic construct
  REGION 1..1619: note = Description of Artificial Sequence: Synthetic polypeptide
ATRRYYLGAVELSWDYMQGAPTSESATPESGPGSEPATSGSETPGTSESATPESGPGSEPATSGSETPGTSESATPESGPGTSTEPSEGSAPGSPAGSPTSTEEGTSESATPESGPGSEPATSGSETPGTSESATPESGPGSPAGSPTSTEEGSPAGSPTSTEEGASSSDLGELPVDARFPPRVPKSFPFNTSVVYKKTLFVEFTDHLFNIAKPRPPWMGLLGPTIQAEVYDTVVITLKNMASHPVSLHAVGVSYWKASEGAEYDDQTSQREKEDDKVFPGGSHTYVWQVLKENGPMASDPLCLTYSYLSHVDLVKDLNSGLIGALLVCREGSLAKEKTQTLHKFILLFAVFDEGKSWHSETKNSLMQDRDAASARAWPKMHTVNGYVNRSLPGLIGCHRKSVYWHVIGMGTTPEVHSIFLEGHTFLVRNHRQASLEISPITFLTAQTLLMDLGQFLLFCHISSHQHDGMEAYVKVDSCPEEPQLRMKNNEEAEDYDDDLTDSEMDVVRFDDDNSPSFIQIRSVAKKHPKTWVHYIAAEEEDWDYAPLVLAPDDRSYKSQYLNNGPQRIGRKYKKVRFMAYTDETFKTREAIQHESGILGPLLYGEVGDTLLIIFKNQASRPYNIYPHGITDVRPLYSRRLPKGVKHLKDFPILPGEIFKYKWTVTVEDGPTKSDPRCLTRYYSSFVNMERDLASGLIGPLLICYKESVDQRGNQIMSDKRNVILFSVFDENRSWYLTENIQRFLPNPAGVQLEDPEFQASNIMHSINGYVFDSLQLSVCLHEVAYWYILSIGAQTDFLSVFFSGYTFKHKMVYEDTLTLFPFSGETVFMSMENPGLWILGCHNSDFRNRGMTALLKVSSCDKNTGDYYEDSYEDISAYLLSKNNAIEPRSFSQNPPVLKRHQREITRTTLQSDQEEIDYDDTISVEMKKEDFDIYDEDENQSPRSFQKKTRHYFIAAVERLWDYGMSSSPHVLRNRAQSGSVPQFKKVVFQEFTDGSFTQPLYRGELNEHLGLLGPYIRAEVEDNIMVTFRNQASRPYSFYSSLISYEEDQRQGAEPRKNFVKPNETKTYFWKVQHHMAPTKDEFDCKAWAYFSDVDLEKDVHSGLIGPLLVCHTNTLNPAHGRQVTVQEFALFFTIFDETKSWYFTENMERNCRAPCNIQMEDPTFKENYRFHAINGYIMDTLPGLVMAQDQRIRWYLLSMGSNENIHSIHFSGHVFTVRKKEEYKMALYNLYPGVFETVEMLPSKAGIWRVECLIGEHLHAGMSTLFLVYSNKCQTPLGMASGHIRDFQITASGQYGQWAPKLARLHYSGSINAWSTKEPFSWIKVDLLAPMIIHGIKTQGARQKFSSLYISQFIIMYSLDGKKWQTYRGNSTGTLMVFFGNVDSSGIKHNIFNPPIIARYIRLHPTHYSIRSTLRMELMGCDLNSCSMPLGMESKAISDAQITASSYFTNMFATWSPSKARLHLQGRSNAWRPQVNNPKEWLQVDFQKTMKVTGVTTQGVKSLLTSMYVKEFLISSSQDGHQWTLFFQNGKVKVFQGNQDSFTPVVNSLDPPLLTRYLRIHPQSWVHQIALRMEVLGCEAQDLYGAGSPGAETAEQKLISEEDLSPATGHHHHHH

SEQ ID NO: 776 - DNA, 4860 bp, synthetic construct
  misc_feature 1..4860: note = Description of Artificial Sequence: Synthetic polynucleotide
  source 1..4860: mol_type = other DNA
gccaccagaagatactacctgggtgcagtggaactgtcatgggactatatgcaaggcgcgccaacatcagagagcgccacccctgaaagtggtcccgggagcgagccagccacatctgggtcggaaacgccaggcacaagtgagtctgcaactcccgagtccggacctggctccgagcctgccactagcggctccgagactccgggaacttccgagagcgctacaccagaaagcggacccggaaccagtaccgaacctagcgagggctctgctccgggcagcccagccggctctcctacatccacggaggagggcacttccgaatccgccaccccggagtcagggccaggatctgaacccgctacctcaggcagtgagacgccaggaacgagcgagtccgctacaccggagagtgggccagggagccctgctggatctcctacgtccactgaggaagggtcaccagcgggctcgcccaccagcactgaagaaggtgcctcgagcagtgatctcggtgagctgcctgtggacgcaagatttcctcctagagtgccaaaatcttttccattcaacacctcagtcgtgtacaaaaagactctgtttgtagaattcacggatcaccttttcaacatcgctaagccaaggccaccctggatgggtctgctaggtcctaccatccaggctgaggtttatgatacagtggtcattacacttaagaacatggcttcccatcctgtcagtcttcatgctgttggtgtatcctactggaaagcttctgagggagctgaatatgatgatcagaccagtcaaagggagaaagaagatgataaagtcttccctggtggaagccatacatatgtctggcaggtcctgaaagagaatggtccaatggcctctgacccactgtgccttacctactcatatctttctcatgtggacctggtaaaagacttgaattcaggcctcattggagccctactagtatgtagagaagggagtctggccaaggaaaagacacagaccttgcacaaatttatactactttttgctgtatttgatgaagggaaaagttggcactcagaaacaaagaactccttgatgcaggatagggatgctgcatctgctcgggcctggcctaaaatgcacacagtcaatggttatgtaaacaggtctctgccaggtctgattggatgccacaggaaatcagtctattggcatgtgattggaatgggcaccactcctgaagtgcactcaatattcctcgaaggtcacacatttcttgtgaggaaccatcgccaggctagcttggaaatctcgccaataactttccttactgctcaaacactcttgatggaccttggacagtttctactgttttgtcatatctcttcccaccaacatgatggcatggaagcttatgtcaaagtagacagctgtccagaggaaccccaactacgaatgaaaaataatgaagaagcggaagactatgatgatgatcttactgattctgaaatggatgtggtcaggtttgatgatgacaactctccttcctttatccaaattcgctcagttgccaagaagcatcctaaaacttgggtacattacattgctgctgaagaggaggactgggactatgctcccttagtcctcgcccccgatgacagaagttataaaagtcaatatttgaacaatggccctcagcggattggtaggaagtacaaaaaagtccgatttatggcatacacagatgaaacctttaagactcgtgaagctattcagcatgaatcaggaatcttgggacctttactttatggggaagttggagacacactgttgattatatttaagaatcaagcaagcagaccatataacatctaccctcacggaatcactgatgtccgtcctttgtattcaaggagattaccaaaaggtgtaaaacatttgaaggattttccaattctgccaggagaaatattcaaatataaatggacagtgactgtagaagatgggccaactaaatcagatcctcggtgcctgacccgctattactctagtttcgttaatatggagagagatctagcttcaggactcattggccctctcctcatctgctacaaagaatctgtagatcaaagaggaaaccagataatgtcagacaagaggaatgtcatcctgttttctgtatttgatgagaaccgaagctggtacctcacagagaatatacaacgctttctccccaatccagctggagtgcagcttgaggatccagagttccaagcctccaacatcatgcacagcatcaatggctatgtttttgatagtttgcagttgtcagtttgtttgcatgaggtggcatactggtacattctaagcattggagcacagactgacttcctttctgtcttcttctctggatataccttcaaacacaaaatggtctatgaagacacactcaccctattcccattctcaggagaaactgtcttcatgtcgatggaaaacccaggtctatggattctggggtgccacaactcagactttcggaacagaggcatgaccgccttactgaaggtttctagttgtgacaagaacactggtgattattacgaggacagttatgaagatatttcagcatacttgctgagtaaaaacaatgccattgaaccaagaagcttctctcaaaacccaccagtcttgaaacgccatcaacgggaaataactcgtactactcttcagtcagatcaagaggaaatcgattatgatgataccatatcagttgaaatgaagaaggaagattttgacatttatgatgaggatgaaaatcagagcccccgcagctttcaaaagaaaacacgacactattttattgctgcagtggagaggctctgggattatgggatgagtagctccccacatgttctaagaaacagggctcagagtggcagtgtccctcagttcaagaaagttgttttccaggaatttactgatggctcctttactcagcccttataccgtggagaactaaatgaacatttgggactcctggggccatatataagagcagaagttgaagataatatcatggtaactttcagaaatcaggcctctcgtccctattccttctattctagccttatttcttatgaggaagatcagaggcaaggagcagaacctagaaaaaactttgtcaagcctaatgaaaccaaaacttacttttggaaagtgcaacatcatatggcacccactaaagatgagtttgactgcaaagcctgggcttatttctctgatgttgacctggaaaaagatgtgcactcaggcctgattggaccccttctggtctgccacactaacacactgaaccctgctcatgggagacaagtgacagtacaggaatttgctctgtttttcaccatctttgatgagaccaaaagctggtacttcactgaaaatatggaaagaaactgcagggctccctgcaatatccagatggaagatcccacttttaaagagaattatcgcttccatgcaatcaatggctacataatggatacactacctggcttagtaatggctcaggatcaaaggattcgatggtatctgctcagcatgggcagcaatgaaaacatccattctattcatttcagtggacatgtgttcactgtacgaaaaaaagaggagtataaaatggcactgtacaatctctatccaggtgtttttgagacagtggaaatgttaccatccaaagctggaatttggcgggtggaatgccttattggcgagcatctacatgctgggatgagcacactttttctggtgtacagcaataagtgtcagactcccctgggaatggcttctggacacattagagattttcagattacagcttcaggacaatatggacagtgggccccaaagctggccagacttcattattccggatcaatcaatgcctggagcaccaaggagcccttttcttggatcaaggtggatctgttggcaccaatgattattcacggcatcaagacccagggtgcccgtcagaagttctccagcctctacatctctcagtttatcatcatgtatagtcttgatgggaagaagtggcagacttatcgaggaaattccactggaaccttaatggtcttctttggcaatgtggattcatctgggataaaacacaatatttttaaccctccaattattgctcgatacatccgtttgcacccaactcattatagcattcgcagcactcttcgcatggagttgatgggctgtgatttaaatagttgcagcatgccattgggaatggagagtaaagcaatatcagatgcacagattactgcttcatcctactttaccaatatgtttgccacctggtctccttcaaaagctcgacttcacctccaagggaggagtaatgcctggagacctcaggtgaataatccaaaagagtggctgcaagtggacttccagaagacaatgaaagtcacaggagtaactactcagggagtaaaatctctgcttaccagcatgtatgtgaaggagttcctcatctccagcagtcaagatggccatcagtggactctcttttttcagaatggcaaagtaaaggtttttcagggaaatcaagactccttcacacctgtggtgaactctctagacccaccgttactgactcgctaccttcgaattcacccccagagttgggtgcaccagattgccctgaggatggaggttctgggctgcgaggcacaggacctctacggcgccggatcacctggggccgaaacggccgaacaaaaactcatctcagaagaggatctgtcacctgcaaccggtcatcatcaccatcaccattga

SEQ ID NO: 777 - protein, 1619 aa, synthetic construct
  REGION 1..1619: note = Description of Artificial Sequence: Synthetic polypeptide
ATRRYYLGAVELSWDYMQGAPGSSPSASTGTGPGSSPSASTGTGPGASPGTSSTGSPGASPGTSSTGSPGSSTPSGATGSPGSSPSASTGTGPGASPGTSSTGSPGSSPSASTGTGPGTPGSGTASSSPGSSTPSGATGSPGSSTPSGATGSPGASPGTSSTGSPASSSDLGELPVDARFPPRVPKSFPFNTSVVYKKTLFVEFTDHLFNIAKPRPPWMGLLGPTIQAEVYDTVVITLKNMASHPVSLHAVGVSYWKASEGAEYDDQTSQREKEDDKVFPGGSHTYVWQVLKENGPMASDPLCLTYSYLSHVDLVKDLNSGLIGALLVCREGSLAKEKTQTLHKFILLFAVFDEGKSWHSETKNSLMQDRDAASARAWPKMHTVNGYVNRSLPGLIGCHRKSVYWHVIGMGTTPEVHSIFLEGHTFLVRNHRQASLEISPITFLTAQTLLMDLGQFLLFCHISSHQHDGMEAYVKVDSCPEEPQLRMKNNEEAEDYDDDLTDSEMDVVRFDDDNSPSFIQIRSVAKKHPKTWVHYIAAEEEDWDYAPLVLAPDDRSYKSQYLNNGPQRIGRKYKKVRFMAYTDETFKTREAIQHESGILGPLLYGEVGDTLLIIFKNQASRPYNIYPHGITDVRPLYSRRLPKGVKHLKDFPILPGEIFKYKWTVTVEDGPTKSDPRCLTRYYSSFVNMERDLASGLIGPLLICYKESVDQRGNQIMSDKRNVILFSVFDENRSWYLTENIQRFLPNPAGVQLEDPEFQASNIMHSINGYVFDSLQLSVCLHEVAYWYILSIGAQTDFLSVFFSGYTFKHKMVYEDTLTLFPFSGETVFMSMENPGLWILGCHNSDFRNRGMTALLKVSSCDKNTGDYYEDSYEDISAYLLSKNNAIEPRSFSQNPPVLKRHQREITRTTLQSDQEEIDYDDTISVEMKKEDFDIYDEDENQSPRSFQKKTRHYFIAAVERLWDYGMSSSPHVLRNRAQSGSVPQFKKVVFQEFTDGSFTQPLYRGELNEHLGLLGPYIRAEVEDNIMVTFRNQASRPYSFYSSLISYEEDQRQGAEPRKNFVKPNETKTYFWKVQHHMAPTKDEFDCKAWAYFSDVDLEKDVHSGLIGPLLVCHTNTLNPAHGRQVTVQEFALFFTIFDETKSWYFTENMERNCRAPCNIQMEDPTFKENYRFHAINGYIMDTLPGLVMAQDQRIRWYLLSMGSNENIHSIHFSGHVFTVRKKEEYKMALYNLYPGVFETVEMLPSKAGIWRVECLIGEHLHAGMSTLFLVYSNKCQTPLGMASGHIRDFQITASGQYGQWAPKLARLHYSGSINAWSTKEPFSWIKVDLLAPMIIHGIKTQGARQKFSSLYISQFIIMYSLDGKKWQTYRGNSTGTLMVFFGNVDSSGIKHNIFNPPIIARYIRLHPTHYSIRSTLRMELMGCDLNSCSMPLGMESKAISDAQITASSYFTNMFATWSPSKARLHLQGRSNAWRPQVNNPKEWLQVDFQKTMKVTGVTTQGVKSLLTSMYVKEFLISSSQDGHQWTLFFQNGKVKVFQGNQDSFTPVVNSLDPPLLTRYLRIHPQSWVHQIALRMEVLGCEAQDLYGAGSPGAETAEQKLISEEDLSPATGHHHHHH

SEQ ID NO: 778 - DNA, 4860 bp, synthetic construct
  misc_feature 1..4860: note = Description of Artificial Sequence: Synthetic polynucleotide
  source 1..4860: mol_type = other DNA
gccaccagaagatactacctgggtgcagtggaactgtcatgggactatatgcaaggcgcgccaggctccagcccctccgcgagcacgggaaccggaccaggttcgtcaccctcagcatcaacggggacgggaccgggggcgtcaccaggaacgtcctccaccggctcgccgggtgcatcacccggaacgtcatcgaccggatcgccagggagctcgacgccatcaggcgcaacaggatcacctggctcaagccctagcgcgtcaaccggcacgggtccgggtgcctcccctggcacgtccagcaccggatcacccggatcgagcccatccgcctcaaccggaaccggacccggtacaccagggtcgggaacagcctcctcgtcaccaggctcctcaaccccctcgggagccacgggttcgcccggttcgtcaacgccttccggagcaactggtagccccggagcatcgccaggaacttcgagcacggggtcgcccgcctcgagcagtgatctcggtgagctgcctgtggacgcaagatttcctcctagagtgccaaaatcttttccattcaacacctcagtcgtgtacaaaaagactctgtttgtagaattcacggatcaccttttcaacatcgctaagccaaggccaccctggatgggtctgctaggtcctaccatccaggctgaggtttatgatacagtggtcattacacttaagaacatggcttcccatcctgtcagtcttcatgctgttggtgtatcctactggaaagcttctgagggagctgaatatgatgatcagaccagtcaaagggagaaagaagatgataaagtcttccctggtggaagccatacatatgtctggcaggtcctgaaagagaatggtccaatggcctctgacccactgtgccttacctactcatatctttctcatgtggacctggtaaaagacttgaattcaggcctcattggagccctactagtatgtagagaagggagtctggccaaggaaaagacacagaccttgcacaaatttatactactttttgctgtatttgatgaagggaaaagttggcactcagaaacaaagaactccttgatgcaggatagggatgctgcatctgctcgggcctggcctaaaatgcacacagtcaatggttatgtaaacaggtctctgccaggtctgattggatgccacaggaaatcagtctattggcatgtgattggaatgggcaccactcctgaagtgcactcaatattcctcgaaggtcacacatttcttgtgaggaaccatcgccaggctagcttggaaatctcgccaataactttccttactgctcaaacactcttgatggaccttggacagtttctactgttttgtcatatctcttcccaccaacatgatggcatggaagcttatgtcaaagtagacagctgtccagaggaaccccaactacgaatgaaaaataatgaagaagcggaagactatgatgatgatcttactgattctgaaatggatgtggtcaggtttgatgatgacaactctccttcctttatccaaattcgctcagttgccaagaagcatcctaaaacttgggtacattacattgctgctgaagaggaggactgggactatgctcccttagtcctcgcccccgatgacagaagttataaaagtcaatatttgaacaatggccctcagcggattggtaggaagtacaaaaaagtccgatttatggcatacacagatgaaacctttaagactcgtgaagctattcagcatgaatcaggaatcttgggacctttactttatggggaagttggagacacactgttgattatatttaagaatcaagcaagcagaccatataacatctaccctcacggaatcactgatgtccgtcctttgtattcaaggagattaccaaaaggtgtaaaacatttgaaggattttccaattctgccaggagaaatattcaaatataaatggacagtgactgtagaagatgggccaactaaatcagatcctcggtgcctgacccgctattactctagtttcgttaatatggagagagatctagcttcaggactcattggccctctcctcatctgctacaaagaatctgtagatcaaagaggaaaccagataatgtcagacaagaggaatgtcatcctgttttctgtatttgatgagaaccgaagctggtacctcacagagaatatacaacgctttctccccaatccagctggagtgcagcttgaggatccagagttccaagcctccaacatcatgcacagcatcaatggctatgtttttgatagtttgcagttgtcagtttgtttgcatgaggtggcatactggtacattctaagcattggagcacagactgacttcctttctgtcttcttctctggatataccttcaaacacaaaatggtctatgaagacacactcaccctattcccattctcaggagaaactgtcttcatgtcgatggaaaacccaggtctatggattctggggtgccacaactcagactttcggaacagaggcatgaccgccttactgaaggtttctagttgtgacaagaacactggtgattattacgaggacagttatgaagatatttcagcatacttgctgagtaaaaacaatgccattgaaccaagaagcttctctcaaaacccaccagtcttgaaacgccatcaacgggaaataactcgtactactcttcagtcagatcaagaggaaatcgattatgatgataccatatcagttgaaatgaagaaggaagattttgacatttatgatgaggatgaaaatcagagcccccgcagctttcaaaagaaaacacgacactattttattgctgcagtggagaggctctgggattatgggatgagtagctccccacatgttctaagaaacagggctcagagtggcagtgtccctcagttcaagaaagttgttttccaggaatttactgatggctcctttactcagcccttataccgtggagaactaaatgaacatttgggactcctggggccatatataagagcagaagttgaagataatatcatggtaactttcagaaatcaggcctctcgtccctattccttctattctagccttatttcttatgaggaagatcagaggcaaggagcagaacctagaaaaaactttgtcaagcctaatgaaaccaaaacttacttttggaaagtgcaacatcatatggcacccactaaagatgagtttgactgcaaagcctgggcttatttctctgatgttgacctggaaaaagatgtgcactcaggcctgattggaccccttctggtctgccacactaacacactgaaccctgctcatgggagacaagtgacagtacaggaatttgctctgtttttcaccatctttgatgagaccaaaagctggtacttcactgaaaatatggaaagaaactgcagggctccctgcaatatccagatggaagatcccacttttaaagagaattatcgcttccatgcaatcaatggctacataatggatacactacctggcttagtaatggctcaggatcaaaggattcgatggtatctgctcagcatgggcagcaatgaaaacatccattctattcatttcagtggacatgtgttcactgtacgaaaaaaagaggagtataaaatggcactgtacaatctctatccaggtgtttttgagacagtggaaatgttaccatccaaagctggaatttggcgggtggaatgccttattggcgagcatctacatgctgggatgagcacactttttctggtgtacagcaataagtgtcagactcccctgggaatggcttctggacacattagagattttcagattacagcttcaggacaatatggacagtgggccccaaagctggccagacttcattattccggatcaatcaatgcctggagcaccaaggagcccttttcttggatcaaggtggatctgttggcaccaatgattattcacggcatcaagacccagggtgcccgtcagaagttctccagcctctacatctctcagtttatcatcatgtatagtcttgatgggaagaagtggcagacttatcgaggaaattccactggaaccttaatggtcttctttggcaatgtggattcatctgggataaaacacaatatttttaaccctccaattattgctcgatacatccgtttgcacccaactcattatagcattcgcagcactcttcgcatggagttgatgggctgtgatttaaatagttgcagcatgccattgggaatggagagtaaagcaatatcagatgcacagattactgcttcatcctactttaccaatatgtttgccacctggtctccttcaaaagctcgacttcacctccaagggaggagtaatgcctggagacctcaggtgaataatccaaaagagtggctgcaagtggacttccagaagacaatgaaagtcacaggagtaactactcagggagtaaaatctctgcttaccagcatgtatgtgaaggagttcctcatctccagcagtcaagatggccatcagtggactctcttttttcagaatggcaaagtaaaggtttttcagggaaatcaagactccttcacacctgtggtgaactctctagacccaccgttactgactcgctaccttcgaattcacccccagagttgggtgcaccagattgccctgaggatggaggttctgggctgcgaggcacaggacctctacggcgccggatcacctggggccgaaacggccgaacaaaaactcatctcagaagaggatctgtcacctgcaaccggtcatcatcaccatcaccattga

SEQ ID NO: 779 - protein, 1619 aa, synthetic construct
  REGION 1..1619: note = Description of Artificial Sequence: Synthetic polypeptide
ATRRYYLGAVELSWDYMQSDLGGAPTSESATPESGPGSEPATSGSETPGTSESATPESGPGSEPATSGSETPGTSESATPESGPGTSTEPSEGSAPGSPAGSPTSTEEGTSESATPESGPGSEPATSGSETPGTSESATPESGPGSPAGSPTSTEEGSPAGSPTSTEEGASSELPVDARFPPRVPKSFPFNTSVVYKKTLFVEFTDHLFNIAKPRPPWMGLLGPTIQAEVYDTVVITLKNMASHPVSLHAVGVSYWKASEGAEYDDQTSQREKEDDKVFPGGSHTYVWQVLKENGPMASDPLCLTYSYLSHVDLVKDLNSGLIGALLVCREGSLAKEKTQTLHKFILLFAVFDEGKSWHSETKNSLMQDRDAASARAWPKMHTVNGYVNRSLPGLIGCHRKSVYWHVIGMGTTPEVHSIFLEGHTFLVRNHRQASLEISPITFLTAQTLLMDLGQFLLFCHISSHQHDGMEAYVKVDSCPEEPQLRMKNNEEAEDYDDDLTDSEMDVVRFDDDNSPSFIQIRSVAKKHPKTWVHYIAAEEEDWDYAPLVLAPDDRSYKSQYLNNGPQRIGRKYKKVRFMAYTDETFKTREAIQHESGILGPLLYGEVGDTLLIIFKNQASRPYNIYPHGITDVRPLYSRRLPKGVKHLKDFPILPGEIFKYKWTVTVEDGPTKSDPRCLTRYYSSFVNMERDLASGLIGPLLICYKESVDQRGNQIMSDKRNVILFSVFDENRSWYLTENIQRFLPNPAGVQLEDPEFQASNIMHSINGYVFDSLQLSVCLHEVAYWYILSIGAQTDFLSVFFSGYTFKHKMVYEDTLTLFPFSGETVFMSMENPGLWILGCHNSDFRNRGMTALLKVSSCDKNTGDYYEDSYEDISAYLLSKNNAIEPRSFSQNPPVLKRHQREITRTTLQSDQEEIDYDDTISVEMKKEDFDIYDEDENQSPRSFQKKTRHYFIAAVERLWDYGMSSSPHVLRNRAQSGSVPQFKKVVFQEFTDGSFTQPLYRGELNEHLGLLGPYIRAEVEDNIMVTFRNQASRPYSFYSSLISYEEDQRQGAEPRKNFVKPNETKTYFWKVQHHMAPTKDEFDCKAWAYFSDVDLEKDVHSGLIGPLLVCHTNTLNPAHGRQVTVQEFALFFTIFDETKSWYFTENMERNCRAPCNIQMEDPTFKENYRFHAINGYIMDTLPGLVMAQDQRIRWYLLSMGSNENIHSIHFSGHVFTVRKKEEYKMALYNLYPGVFETVEMLPSKAGIWRVECLIGEHLHAGMSTLFLVYSNKCQTPLGMASGHIRDFQITASGQYGQWAPKLARLHYSGSINAWSTKEPFSWIKVDLLAPMIIHGIKTQGARQKFSSLYISQFIIMYSLDGKKWQTYRGNSTGTLMVFFGNVDSSGIKHNIFNPPIIARYIRLHPTHYSIRSTLRMELMGCDLNSCSMPLGMESKAISDAQITASSYFTNMFATWSPSKARLHLQGRSNAWRPQVNNPKEWLQVDFQKTMKVTGVTTQGVKSLLTSMYVKEFLISSSQDGHQWTLFFQNGKVKVFQGNQDSFTPVVNSLDPPLLTRYLRIHPQSWVHQIALRMEVLGCEAQDLYGAGSPGAETAEQKLISEEDLSPATGHHHHHH

SEQ ID NO: 780 - DNA, 4860 bp, synthetic construct
  misc_feature 1..4860: note = Description of Artificial Sequence: Synthetic polynucleotide
  source 1..4860: mol_type = other DNA
gccaccagaagatactacctgggtgcagtggaactgtcatgggactatatgcaaagtgatctcggtggcgcgccaacatcagagagcgccacccctgaaagtggtcccgggagcgagccagccacatctgggtcggaaacgccaggcacaagtgagtctgcaactcccgagtccggacctggctccgagcctgccactagcggctccgagactccgggaacttccgagagcgctacaccagaaagcggacccggaaccagtaccgaacctagcgagggctctgctccgggcagcccagccggctctcctacatccacggaggagggcacttccgaatccgccaccccggagtcagggccaggatctgaacccgctacctcaggcagtgagacgccaggaacgagcgagtccgctacaccggagagtgggccagggagccctgctggatctcctacgtccactgaggaagggtcaccagcgggctcgcccaccagcactgaagaaggtgcctcgagcgagctgcctgtggacgcaagatttcctcctagagtgccaaaatcttttccattcaacacctcagtcgtgtacaaaaagactctgtttgtagaattcacggatcaccttttcaacatcgctaagccaaggccaccctggatgggtctgctaggtcctaccatccaggctgaggtttatgatacagtggtcattacacttaagaacatggcttcccatcctgtcagtcttcatgctgttggtgtatcctactggaaagcttctgagggagctgaatatgatgatcagaccagtcaaagggagaaagaagatgataaagtcttccctggtggaagccatacatatgtctggcaggtcctgaaagagaatggtccaatggcctctgacccactgtgccttacctactcatatctttctcatgtggacctggtaaaagacttgaattcaggcctcattggagccctactagtatgtagagaagggagtctggccaaggaaaagacacagaccttgcacaaatttatactactttttgctgtatttgatgaagggaaaagttggcactcagaaacaaagaactccttgatgcaggatagggatgctgcatctgctcgggcctggcctaaaatgcacacagtcaatggttatgtaaacaggtctctgccaggtctgattggatgccacaggaaatcagtctattggcatgtgattggaatgggcaccactcctgaagtgcactcaatattcctcgaaggtcacacatttcttgtgaggaaccatcgccaggctagcttggaaatctcgccaataactttccttactgctcaaacactcttgatggaccttggacagtttctactgttttgtcatatctcttcccaccaacatgatggcatggaagcttatgtcaaagtagacagctgtccagaggaaccccaactacgaatgaaaaataatgaagaagcggaagactatgatgatgatcttactgattctgaaatggatgtggtcaggtttgatgatgacaactctccttcctttatccaaattcgctcagttgccaagaagcatcctaaaacttgggtacattacattgctgctgaagaggaggactgggactatgctcccttagtcctcgcccccgatgacagaagttataaaagtcaatatttgaacaatggccctcagcggattggtaggaagtacaaaaaagtccgatttatggcatacacagatgaaacctttaagactcgtgaagctattcagcatgaatcaggaatcttgggacctttactttatggggaagttggagacacactgttgattatatttaagaatcaagcaagcagaccatataacatctaccctcacggaatcactgatgtccgtcctttgtattcaaggagattaccaaaaggtgtaaaacatttgaaggattttccaattctgccaggagaaatattcaaatataaatggacagtgactgtagaagatgggccaactaaatcagatcctcggtgcctgacccgctattactctagtttcgttaatatggagagagatctagcttcaggactcattggccctctcctcatctgctacaaagaatctgtagatcaaagaggaaaccagataatgtcagacaagaggaatgtcatcctgttttctgtatttgatgagaaccgaagctggtacctcacagagaatatacaacgctttctccccaatccagctggagtgcagcttgaggatccagagttccaagcctccaacatcatgcacagcatcaatggctatgtttttgatagtttgcagttgtcagtttgtttgcatgaggtggcatactggtacattctaagcattggagcacagactgacttcctttctgtcttcttctctggatataccttcaaacacaaaatggtctatgaagacacactcaccctattcccattctcaggagaaactgtcttcatgtcgatggaaaacccaggtctatggattctggggtgccacaactcagactttcggaacagaggcatgaccgccttactgaaggtttctagttgtgacaagaacactggtgattattacgaggacagttatgaagatatttcagcatacttgctgagtaaaaacaatgccattgaaccaagaagcttctctcaaaacccaccagtcttgaaacgccatcaacgggaaataactcgtactactcttcagtcagatcaagaggaaatcgattatgatgataccatatcagttgaaatgaagaaggaagattttgacatttatgatgaggatgaaaatcagagcccccgcagctttcaaaagaaaacacgacactattttattgctgcagtggagaggctctgggattatgggatgagtagctccccacatgttctaagaaacagggctcagagtggcagtgtccctcagttcaagaaagttgttttccaggaatttactgatggctcctttactcagcccttataccgtggagaactaaatgaacatttgggactcctggggccatatataagagcagaagttgaagataatatcatggtaactttcagaaatcaggcctctcgtccctattccttctattctagccttatttcttatgaggaagatcagaggcaaggagcagaacctagaaaaaactttgtcaagcctaatgaaaccaaaacttacttttggaaagtgcaacatcatatggcacccactaaagatgagtttgactgcaaagcctgggcttatttctctgatgttgacctggaaaaagatgtgcactcaggcctgattggaccccttctggtctgccacactaacacactgaaccctgctcatgggagacaagtgacagtacaggaatttgctctgtttttcaccatctttgatgagaccaaaagctggtacttcactgaaaatatggaaagaaactgcagggctccctgcaatatccagatggaagatcccacttttaaagagaattatcgcttccatgcaatcaatggctacataatggatacactacctggcttagtaatggctcaggatcaaaggattcgatggtatctgctcagcatgggcagcaatgaaaacatccattctattcatttcagtggacatgtgttcactgtacgaaaaaaagaggagtataaaatggcactgtacaatctctatccaggtgtttttgagacagtggaaatgttaccatccaaagctggaatttggcgggtggaatgccttattggcgagcatctacatgctgggatgagcacactttttctggtgtacagcaataagtgtcagactcccctgggaatggcttctggacacattagagattttcagattacagcttcaggacaatatggacagtgggccccaaagctggccagacttcattattccggatcaatcaatgcctggagcaccaaggagcccttttcttggatcaaggtggatctgttggcaccaatgattattcacggcatcaagacccagggtgcccgtcagaagttctccagcctctacatctctcagtttatcatcatgtatagtcttgatgggaagaagtggcagacttatcgaggaaattccactggaaccttaatggtcttctttggcaatgtggattcatctgggataaaacacaatatttttaaccctccaattattgctcgatacatccgtttgcacccaactcattatagcattcgcagcactcttcgcatggagttgatgggctgtgatttaaatagttgcagcatgccattgggaatggagagtaaagcaatatcagatgcacagattactgcttcatcctactttaccaatatgtttgccacctggtctccttcaaaagctcgacttcacctccaagggaggagtaatgcctggagacctcaggtgaataatccaaaagagtggctgcaagtggacttccagaagacaatgaaagtcacaggagtaactactcagggagtaaaatctctgcttaccagcatgtatgtgaaggagttcctcatctccagcagtcaagatggccatcagtggactctcttttttcagaatggcaaagtaaaggtttttcagggaaatcaagactccttcacacctgtggtgaactctctagacccaccgttactgactcgctaccttcgaattcacccccagagttgggtgcaccagattgccctgaggatggaggttctgggctgcgaggcacaggacctctacggcgccggatcacctggggccgaaacggccgaacaaaaactcatctcagaagaggatctgtcacctgcaaccggtcatcatcaccatcaccattga

SEQ ID NO: 781 - protein, 1619 aa, synthetic construct
  REGION 1..1619: note = Description of Artificial Sequence: Synthetic polypeptide
ATRRYYLGAVELSWDYMQSDLGGAPGSSPSASTGTGPGSSPSASTGTGPGASPGTSSTGSPGASPGTSSTGSPGSSTPSGATGSPGSSPSASTGTGPGASPGTSSTGSPGSSPSASTGTGPGTPGSGTASSSPGSSTPSGATGSPGSSTPSGATGSPGASPGTSSTGSPASSELPVDARFPPRVPKSFPFNTSVVYKKTLFVEFTDHLFNIAKPRPPWMGLLGPTIQAEVYDTVVITLKNMASHPVSLHAVGVSYWKASEGAEYDDQTSQREKEDDKVFPGGSHTYVWQVLKENGPMASDPLCLTYSYLSHVDLVKDLNSGLIGALLVCREGSLAKEKTQTLHKFILLFAVFDEGKSWHSETKNSLMQDRDAASARAWPKMHTVNGYVNRSLPGLIGCHRKSVYWHVIGMGTTPEVHSIFLEGHTFLVRNHRQASLEISPITFLTAQTLLMDLGQFLLFCHISSHQHDGMEAYVKVDSCPEEPQLRMKNNEEAEDYDDDLTDSEMDVVRFDDDNSPSFIQIRSVAKKHPKTWVHYIAAEEEDWDYAPLVLAPDDRSYKSQYLNNGPQRIGRKYKKVRFMAYTDETFKTREAIQHESGILGPLLYGEVGDTLLIIFKNQASRPYNIYPHGITDVRPLYSRRLPKGVKHLKDFPILPGEIFKYKWTVTVEDGPTKSDPRCLTRYYSSFVNMERDLASGLIGPLLICYKESVDQRGNQIMSDKRNVILFSVFDENRSWYLTENIQRFLPNPAGVQLEDPEFQASNIMHSINGYVFDSLQLSVCLHEVAYWYILSIGAQTDFLSVFFSGYTFKHKMVYEDTLTLFPFSGETVFMSMENPGLWILGCHNSDFRNRGMTALLKVSSCDKNTGDYYEDSYEDISAYLLSKNNAIEPRSFSQNPPVLKRHQREITRTTLQSDQEEIDYDDTISVEMKKEDFDIYDEDENQSPRSFQKKTRHYFIAAVERLWDYGMSSSPHVLRNRAQSGSVPQFKKVVFQEFTDGSFTQPLYRGELNEHLGLLGPYIRAEVEDNIMVTFRNQASRPYSFYSSLISYEEDQRQGAEPRKNFVKPNETKTYFWKVQHHMAPTKDEFDCKAWAYFSDVDLEKDVHSGLIGPLLVCHTNTLNPAHGRQVTVQEFALFFTIFDETKSWYFTENMERNCRAPCNIQMEDPTFKENYRFHAINGYIMDTLPGLVMAQDQRIRWYLLSMGSNENIHSIHFSGHVFTVRKKEEYKMALYNLYPGVFETVEMLPSKAGIWRVECLIGEHLHAGMSTLFLVYSNKCQTPLGMASGHIRDFQITASGQYGQWAPKLARLHYSGSINAWSTKEPFSWIKVDLLAPMIIHGIKTQGARQKFSSLYISQFIIMYSLDGKKWQTYRGNSTGTLMVFFGNVDSSGIKHNIFNPPIIARYIRLHPTHYSIRSTLRMELMGCDLNSCSMPLGMESKAISDAQITASSYFTNMFATWSPSKARLHLQGRSNAWRPQVNNPKEWLQVDFQKTMKVTGVTTQGVKSLLTSMYVKEFLISSSQDGHQWTLFFQNGKVKVFQGNQDSFTPVVNSLDPPLLTRYLRIHPQSWVHQIALRMEVLGCEAQDLYGAGSPGAETAEQKLISEEDLSPATGHHHHHH

SEQ ID NO: 782 - DNA, 4860 bp, synthetic construct
  misc_feature 1..4860: note = Description of Artificial Sequence: Synthetic polynucleotide
  source 1..4860: mol_type = other DNA
gccaccagaagatactacctgggtgcagtggaactgtcatgggactatatgcaaagtgatctcggtggcgcgccaggctccagcccctccgcgagcacgggaaccggaccaggttcgtcaccctcagcatcaacggggacgggaccgggggcgtcaccaggaacgtcctccaccggctcgccgggtgcatcacccggaacgtcatcgaccggatcgccagggagctcgacgccatcaggcgcaacaggatcacctggctcaagccctagcgcgtcaaccggcacgggtccgggtgcctcccctggcacgtccagcaccggatcacccggatcgagcccatccgcctcaaccggaaccggacccggtacaccagggtcgggaacagcctcctcgtcaccaggctcctcaaccccctcgggagccacgggttcgcccggttcgtcaacgccttccggagcaactggtagccccggagcatcgccaggaacttcgagcacggggtcgcccgcctcgagcgagctgcctgtggacgcaagatttcctcctagagtgccaaaatcttttccattcaacacctcagtcgtgtacaaaaagactctgtttgtagaattcacggatcaccttttcaacatcgctaagccaaggccaccctggatgggtctgctaggtcctaccatccaggctgaggtttatgatacagtggtcattacacttaagaacatggcttcccatcctgtcagtcttcatgctgttggtgtatcctactggaaagcttctgagggagctgaatatgatgatcagaccagtcaaagggagaaagaagatgataaagtcttccctggtggaagccatacatatgtctggcaggtcctgaaagagaatggtccaatggcctctgacccactgtgccttacctactcatatctttctcatgtggacctggtaaaagacttgaattcaggcctcattggagccctactagtatgtagagaagggagtctggccaaggaaaagacacagaccttgcacaaatttatactactttttgctgtatttgatgaagggaaaagttggcactcagaaacaaagaactccttgatgcaggatagggatgctgcatctgctcgggcctggcctaaaatgcacacagtcaatggttatgtaaacaggtctctgccaggtctgattggatgccacaggaaatcagtctattggcatgtgattggaatgggcaccactcctgaagtgcactcaatattcctcgaaggtcacacatttcttgtgaggaaccatcgccaggctagcttggaaatctcgccaataactttccttactgctcaaacactcttgatggaccttggacagtttctactgttttgtcatatctcttcccaccaacatgatggcatggaagcttatgtcaaagtagacagctgtccagaggaaccccaactacgaatgaaaaataatgaagaagcggaagactatgatgatgatcttactgattctgaaatggatgtggtcaggtttgatgatgacaactctccttcctttatccaaattcgctcagttgccaagaagcatcctaaaacttgggtacattacattgctgctgaagaggaggactgggactatgctcccttagtcctcgcccccgatgacagaagttataaaagtcaatatttgaacaatggccctcagcggattggtaggaagtacaaaaaagtccgatttatggcatacacagatgaaacctttaagactcgtgaagctattcagcatgaatcaggaatcttgggacctttactttatggggaagttggagacacactgttgattatatttaagaatcaagcaagcagaccatataacatctaccctcacggaatcactgatgtccgtcctttgtattcaaggagattaccaaaaggtgtaaaacatttgaaggattttccaattctgccaggagaaatattcaaatataaatggacagtgactgtagaagatgggccaactaaatcagatcctcggtgcctgacccgctattactctagtttcgttaatatggagagagatctagcttcaggactcattggccctctcctcatctgctacaaagaatctgtagatcaaagaggaaaccagataatgtcagacaagaggaatgtcatcctgttttctgtatttgatgagaaccgaagctggtacctcacagagaatatacaacgctttctccccaatccagctggagtgcagcttgaggatccagagttccaagcctccaacatcatgcacagcatcaatggctatgtttttgatagtttgcagttgtcagtttgtttgcatgaggtggcatactggtacattctaagcattggagcacagactgacttcctttctgtcttcttctctggatataccttcaaacacaaaatggtctatgaagacacactcaccctattcccattctcaggagaaactgtcttcatgtcgatggaaaacccaggtctatggattctggggtgccacaactcagactttcggaacagaggcatgaccgccttactgaaggtttctagttgtgacaagaacactggtgattattacgaggacagttatgaagatatttcagcatacttgctgagtaaaaacaatgccattgaaccaagaagcttctctcaaaacccaccagtcttgaaacgccatcaacgggaaataactcgtactactcttcagtcagatcaagaggaaatcgattatgatgataccatatcagttgaaatgaagaaggaagattttgacatttatgatgaggatgaaaatcagagcccccgcagctttcaaaagaaaacacgacactattttattgctgcagtggagaggctctgggattatgggatgagtagctccccacatgttctaagaaacagggctcagagtggcagtgtccctcagttcaagaaagttgttttccaggaatttactgatggctcctttactcagcccttataccgtggagaactaaatgaacatttgggactcctggggccatatataagagcagaagttgaagataatatcatggtaactttcagaaatcaggcctctcgtccctattccttctattctagccttatttcttatgaggaagatcagaggcaaggagcagaacctagaaaaaactttgtcaagcctaatgaaaccaaaacttacttttggaaagtgcaacatcatatggcacccactaaagatgagtttgactgcaaagcctgggcttatttctctgatgttgacctggaaaaagatgtgcactcaggcctgattggaccccttctggtctgccacactaacacactgaaccctgctcatgggagacaagtgacagtacaggaatttgctctgtttttcaccatctttgatgagaccaaaagctggtacttcactgaaaatatggaaagaaactgcagggctccctgcaatatccagatggaagatcccacttttaaagagaattatcgcttccatgcaatcaatggctacataatggatacactacctggcttagtaatggctcaggatcaaaggattcgatggtatctgctcagcatgggcagcaatgaaaacatccattctattcatttcagtggacatgtgttcactgtacgaaaaaaagaggagtataaaatggcactgtacaatctctatccaggtgtttttgagacagtggaaatgttaccatccaaagctggaatttggcgggtggaatgccttattggcgagcatctacatgctgggatgagcacactttttctggtgtacagcaataagtgtcagactcccctgggaatggcttctggacacattagagattttcagattacagcttcaggacaatatggacagtgggccccaaagctggccagacttcattattccggatcaatcaatgcctggagcaccaaggagcccttttcttggatcaaggtggatctgttggcaccaatgattattcacggcatcaagacccagggtgcccgtcagaagttctccagcctctacatctctcagtttatcatcatgtatagtcttgatgggaagaagtggcagacttatcgaggaaattccactggaaccttaatggtcttctttggcaatgtggattcatctgggataaaacacaatatttttaaccctccaattattgctcgatacatccgtttgcacccaactcattatagcattcgcagcactcttcgcatggagttgatgggctgtgatttaaatagttgcagcatgccattgggaatggagagtaaagcaatatcagatgcacagattactgcttcatcctactttaccaatatgtttgccacctggtctccttcaaaagctcgacttcacctccaagggaggagtaatgcctggagacctcaggtgaataatccaaaagagtggctgcaagtggacttccagaagacaatgaaagtcacaggagtaactactcagggagtaaaatctctgcttaccagcatgtatgtgaaggagttcctcatctccagcagtcaagatggccatcagtggactctcttttttcagaatggcaaagtaaaggtttttcagggaaatcaagactccttcacacctgtggtgaactctctagacccaccgttactgactcgctaccttcgaattcacccccagagttgggtgcaccagattgccctgaggatggaggttctgggctgcgaggcacaggacctctacggcgccggatcacctggggccgaaacggccgaacaaaaactcatctcagaagaggatctgtcacctgcaaccggtcatcatcaccatcaccattga

SEQ ID NO: 783 - protein, 1619 aa, synthetic construct
  REGION 1..1619: note = Description of Artificial Sequence: Synthetic polypeptide
ATRRYYLGAVELSWDYMQSDLGELPVGAPTSESATPESGPGSEPATSGSETPGTSESATPESGPGSEPATSGSETPGTSESATPESGPGTSTEPSEGSAPGSPAGSPTSTEEGTSESATPESGPGSEPATSGSETPGTSESATPESGPGSPAGSPTSTEEGSPAGSPTSTEEGASSDARFPPRVPKSFPFNTSVVYKKTLFVEFTDHLFNIAKPRPPWMGLLGPTIQAEVYDTVVITLKNMASHPVSLHAVGVSYWKASEGAEYDDQTSQREKEDDKVFPGGSHTYVWQVLKENGPMASDPLCLTYSYLSHVDLVKDLNSGLIGALLVCREGSLAKEKTQTLHKFILLFAVFDEGKSWHSETKNSLMQDRDAASARAWPKMHTVNGYVNRSLPGLIGCHRKSVYWHVIGMGTTPEVHSIFLEGHTFLVRNHRQASLEISPITFLTAQTLLMDLGQFLLFCHISSHQHDGMEAYVKVDSCPEEPQLRMKNNEEAEDYDDDLTDSEMDVVRFDDDNSPSFIQIRSVAKKHPKTWVHYIAAEEEDWDYAPLVLAPDDRSYKSQYLNNGPQRIGRKYKKVRFMAYTDETFKTREAIQHESGILGPLLYGEVGDTLLIIFKNQASRPYNIYPHGITDVRPLYSRRLPKGVKHLKDFPILPGEIFKYKWTVTVEDGPTKSDPRCLTRYYSSFVNMERDLASGLIGPLLICYKESVDQRGNQIMSDKRNVILFSVFDENRSWYLTENIQRFLPNPAGVQLEDPEFQASNIMHSINGYVFDSLQLSVCLHEVAYWYILSIGAQTDFLSVFFSGYTFKHKMVYEDTLTLFPFSGETVFMSMENPGLWILGCHNSDFRNRGMTALLKVSSCDKNTGDYYEDSYEDISAYLLSKNNAIEPRSFSQNPPVLKRHQREITRTTLQSDQEEIDYDDTISVEMKKEDFDIYDEDENQSPRSFQKKTRHYFIAAVERLWDYGMSSSPHVLRNRAQSGSVPQFKKVVFQEFTDGSFTQPLYRGELNEHLGLLGPYIRAEVEDNIMVTFRNQASRPYSFYSSLISYEEDQRQGAEPRKNFVKPNETKTYFWKVQHHMAPTKDEFDCKAWAYFSDVDLEKDVHSGLIGPLLVCHTNTLNPAHGRQVTVQEFALFFTIFDETKSWYFTENMERNCRAPCNIQMEDPTFKENYRFHAINGYIMDTLPGLVMAQDQRIRWYLLSMGSNENIHSIHFSGHVFTVRKKEEYKMALYNLYPGVFETVEMLPSKAGIWRVECLIGEHLHAGMSTLFLVYSNKCQTPLGMASGHIRDFQITASGQYGQWAPKLARLHYSGSINAWSTKEPFSWIKVDLLAPMIIHGIKTQGARQKFSSLYISQFIIMYSLDGKKWQTYRGNSTGTLMVFFGNVDSSGIKHNIFNPPIIARYIRLHPTHYSIRSTLRMELMGCDLNSCSMPLGMESKAISDAQITASSYFTNMFATWSPSKARLHLQGRSNAWRPQVNNPKEWLQVDFQKTMKVTGVTTQGVKSLLTSMYVKEFLISSSQDGHQWTLFFQNGKVKVFQGNQDSFTPVVNSLDPPLLTRYLRIHPQSWVHQIALRMEVLGCEAQDLYGAGSPGAETAEQKLISEEDLSPATGHHHHHH

SEQ ID NO: 784 - DNA, 4860 bp, synthetic construct
  misc_feature 1..4860: note = Description of Artificial Sequence: Synthetic polynucleotide
  source 1..4860: mol_type = other DNA
gccaccagaagatactacctgggtgcagtggaactgtcatgggactatatgcaaagtgatctcggtgagctgcctgtgggcgcgccaacatcagagagcgccacccctgaaagtggtcccgggagcgagccagccacatctgggtcggaaacgccaggcacaagtgagtctgcaactcccgagtccggacctggctccgagcctgccactagcggctccgagactccgggaacttccgagagcgctacaccagaaagcggacccggaaccagtaccgaacctagcgagggctctgctccgggcagcccagccggctctcctacatccacggaggagggcacttccgaatccgccaccccggagtcagggccaggatctgaacccgctacctcaggcagtgagacgccaggaacgagcgagtccgctacaccggagagtgggccagggagccctgctggatctcctacgtccactgaggaagggtcaccagcgggctcgcccaccagcactgaagaaggtgcctcgagcgacgcaagatttcctcctagagtgccaaaatcttttccattcaacacctcagtcgtgtacaaaaagactctgtttgtagaattcacggatcaccttttcaacatcgctaagccaaggccaccctggatgggtctgctaggtcctaccatccaggctgaggtttatgatacagtggtcattacacttaagaacatggcttcccatcctgtcagtcttcatgctgttggtgtatcctactggaaagcttctgagggagctgaatatgatgatcagaccagtcaaagggagaaagaagatgataaagtcttccctggtggaagccatacatatgtctggcaggtcctgaaagagaatggtccaatggcctctgacccactgtgccttacctactcatatctttctcatgtggacctggtaaaagacttgaattcaggcctcattggagccctactagtatgtagagaagggagtctggccaaggaaaagacacagaccttgcacaaatttatactactttttgctgtatttgatgaagggaaaagttggcactcagaaacaaagaactccttgatgcaggatagggatgctgcatctgctcgggcctggcctaaaatgcacacagtcaatggttatgtaaacaggtctctgccaggtctgattggatgccacaggaaatcagtctattggcatgtgattggaatgggcaccactcctgaagtgcactcaatattcctcgaaggtcacacatttcttgtgaggaaccatcgccaggctagcttggaaatctcgccaataactttccttactgctcaaacactcttgatggaccttggacagtttctactgttttgtcatatctcttcccaccaacatgatggcatggaagcttatgtcaaagtagacagctgtccagaggaaccccaactacgaatgaaaaataatgaagaagcggaagactatgatgatgatcttactgattctgaaatggatgtggtcaggtttgatgatgacaactctccttcctttatccaaattcgctcagttgccaagaagcatcctaaaacttgggtacattacattgctgctgaagaggaggactgggactatgctcccttagtcctcgcccccgatgacagaagttataaaagtcaatatttgaacaatggccctcagcggattggtaggaagtacaaaaaagtccgatttatggcatacacagatgaaacctttaagactcgtgaagctattcagcatgaatcaggaatcttgggacctttactttatggggaagttggagacacactgttgattatatttaagaatcaagcaagcagaccatataacatctaccctcacggaatcactgatgtccgtcctttgtattcaaggagattaccaaaaggtgtaaaacatttgaaggattttccaattctgccaggagaaatattcaaatataaatggacagtgactgtagaagatgggccaactaaatcagatcctcggtgcctgacccgctattactctagtttcgttaatatggagagagatctagcttcaggactcattggccctctcctcatctgctacaaagaatctgtagatcaaagaggaaaccagataatgtcagacaagaggaatgtcatcctgttttctgtatttgatgagaaccgaagctggtacctcacagagaatatacaacgctttctccccaatccagctggagtgcagcttgaggatccagagttccaagcctccaacatcatgcacagcatcaatggctatgtttttgatagtttgcagttgtcagtttgtttgcatgaggtggcatactggtacattctaagcattggagcacagactgacttcctttctgtcttcttctctggatataccttcaaacacaaaatggtctatgaagacacactcaccctattcccattctcaggagaaactgtcttcatgtcgatggaaaacccaggtctatggattctggggtgccacaactcagactttcggaacagaggcatgaccgccttactgaaggtttctagttgtgacaagaacactggtgattattacgaggacagttatgaagatatttcagcatacttgctgagtaaaaacaatgccattgaaccaagaagcttctctcaaaacccaccagtcttgaaacgccatcaacgggaaataactcgtactactcttcagtcagatcaagaggaaatcgattatgatgataccatatcagttgaaatgaagaaggaagattttgacatttatgatgaggatgaaaatcagagcccccgcagctttcaaaagaaaacacgacactattttattgctgcagtggagaggctctgggattatgggatgagtagctccccacatgttctaagaaacagggctcagagtggcagtgtccctcagttcaagaaagttgttttccaggaatttactgatggctcctttactcagcccttataccgtggagaactaaatgaacatttgggactcctggggccatatataagagcagaagttgaagataatatcatggtaactttcagaaatcaggcctctcgtccctattccttctattctagccttatttcttatgaggaagatcagaggcaaggagcagaacctagaaaaaactttgtcaagcctaatgaaaccaaaacttacttttggaaagtgcaacatcatatggcacccactaaagatgagtttgactgcaaagcctgggcttatttctctgatgttgacctggaaaaagatgtgcactcaggcctgattggaccccttctggtctgccacactaacacactgaaccctgctcatgggagacaagtgacagtacaggaatttgctctgtttttcaccatctttgatgagaccaaaagctggtacttcactgaaaatatggaaagaaactgcagggctccctgcaatatccagatggaagatcccacttttaaagagaattatcgcttccatgcaatcaatggctacataatggatacactacctggcttagtaatggctcaggatcaaaggattcgatggtatctgctcagcatgggcagcaatgaaaacatccattctattcatttcagtggacatgtgttcactgtacgaaaaaaagaggagtataaaatggcactgtacaatctctatccaggtgtttttgagacagtggaaatgttaccatccaaagctggaatttggcgggtggaatgccttattggcgagcatctacatgctgggatgagcacactttttctggtgtacagcaataagtgtcagactcccctgggaatggcttctggacacattagagattttcagattacagcttcaggacaatatggacagtgggccccaaagctggccagacttcattattccggatcaatcaatgcctggagcaccaaggagcccttttcttggatcaaggtggatctgttggcaccaatgattattcacggcatcaagacccagggtgcccgtcagaagttctccagcctctacatctctcagtttatcatcatgtatagtcttgatgggaagaagtggcagacttatcgaggaaattccactggaaccttaatggtcttctttggcaatgtggattcatctgggataaaacacaatatttttaaccctccaattattgctcgatacatccgtttgcacccaactcattatagcattcgcagcactcttcgcatggagttgatgggctgtgatttaaatagttgcagcatgccattgggaatggagagtaaagcaatatcagatgcacagattactgcttcatcctactttaccaatatgtttgccacctggtctccttcaaaagctcgacttcacctccaagggaggagtaatgcctggagacctcaggtgaataatccaaaagagtggctgcaagtggacttccagaagacaatgaaagtcacaggagtaactactcagggagtaaaatctctgcttaccagcatgtatgtgaaggagttcctcatctccagcagtcaagatggccatcagtggactctcttttttcagaatggcaaagtaaaggtttttcagggaaatcaagactccttcacacctgtggtgaactctctagacccaccgttactgactcgctaccttcgaattcacccccagagttgggtgcaccagattgccctgaggatggaggttctgggctgcgaggcacaggacctctacggcgccggatcacctggggccgaaacggccgaacaaaaactcatctcagaagaggatctgtcacctgcaaccggtcatcatcaccatcaccattga

SEQ ID NO: 785 - protein, 1619 aa, synthetic construct
  REGION 1..1619: note = Description of Artificial Sequence: Synthetic polypeptide
ATRRYYLGAVELSWDYMQSDLGELPVGAPGSSPSASTGTGPGSSPSASTGTGPGASPGTSSTGSPGASPGTSSTGSPGSSTPSGATGSPGSSPSASTGTGPGASPGTSSTGSPGSSPSASTGTGPGTPGSGTASSSPGSSTPSGATGSPGSSTPSGATGSPGASPGTSSTGSPASSDARFPPRVPKSFPFNTSVVYKKTLFVEFTDHLFNIAKPRPPWMGLLGPTIQAEVYDTVVITLKNMASHPVSLHAVGVSYWKASEGAEYDDQTSQREKEDDKVFPGGSHTYVWQVLKENGPMASDPLCLTYSYLSHVDLVKDLNSGLIGALLVCREGSLAKEKTQTLHKFILLFAVFDEGKSWHSETKNSLMQDRDAASARAWPKMHTVNGYVNRSLPGLIGCHRKSVYWHVIGMGTTPEVHSIFLEGHTFLVRNHRQASLEISPITFLTAQTLLMDLGQFLLFCHISSHQHDGMEAYVKVDSCPEEPQLRMKNNEEAEDYDDDLTDSEMDVVRFDDDNSPSFIQIRSVAKKHPKTWVHYIAAEEEDWDYAPLVLAPDDRSYKSQYLNNGPQRIGRKYKKVRFMAYTDETFKTREAIQHESGILGPLLYGEVGDTLLIIFKNQASRPYNIYPHGITDVRPLYSRRLPKGVKHLKDFPILPGEIFKYKWTVTVEDGPTKSDPRCLTRYYSSFVNMERDLASGLIGPLLICYKESVDQRGNQIMSDKRNVILFSVFDENRSWYLTENIQRFLPNPAGVQLEDPEFQASNIMHSINGYVFDSLQLSVCLHEVAYWYILSIGAQTDFLSVFFSGYTFKHKMVYEDTLTLFPFSGETVFMSMENPGLWILGCHNSDFRNRGMTALLKVSSCDKNTGDYYEDSYEDISAYLLSKNNAIEPRSFSQNPPVLKRHQREITRTTLQSDQEEIDYDDTISVEMKKEDFDIYDEDENQSPRSFQKKTRHYFIAAVERLWDYGMSSSPHVLRNRAQSGSVPQFKKVVFQEFTDGSFTQPLYRGELNEHLGLLGPYIRAEVEDNIMVTFRNQASRPYSFYSSLISYEEDQRQGAEPRKNFVKPNETKTYFWKVQHHMAPTKDEFDCKAWAYFSDVDLEKDVHSGLIGPLLVCHTNTLNPAHGRQVTVQEFALFFTIFDETKSWYFTENMERNCRAPCNIQMEDPTFKENYRFHAINGYIMDTLPGLVMAQDQRIRWYLLSMGSNENIHSIHFSGHVFTVRKKEEYKMALYNLYPGVFETVEMLPSKAGIWRVECLIGEHLHAGMSTLFLVYSNKCQTPLGMASGHIRDFQITASGQYGQWAPKLARLHYSGSINAWSTKEPFSWIKVDLLAPMIIHGIKTQGARQKFSSLYISQFIIMYSLDGKKWQTYRGNSTGTLMVFFGNVDSSGIKHNIFNPPIIARYIRLHPTHYSIRSTLRMELMGCDLNSCSMPLGMESKAISDAQITASSYFTNMFATWSPSKARLHLQGRSNAWRPQVNNPKEWLQVDFQKTMKVTGVTTQGVKSLLTSMYVKEFLISSSQDGHQWTLFFQNGKVKVFQGNQDSFTPVVNSLDPPLLTRYLRIHPQSWVHQIALRMEVLGCEAQDLYGAGSPGAETAEQKLISEEDLSPATGHHHHHH

SEQ ID NO: 786 - DNA, 4860 bp, synthetic construct
  misc_feature 1..4860: note = Description of Artificial Sequence: Synthetic polynucleotide
  source 1..4860: mol_type = other DNA
gccaccagaagatactacctgggtgcagtggaactgtcatgggactatatgcaaagtgatctcggtgagctgcctgtgggcgcgccaggctccagcccctccgcgagcacgggaaccggaccaggttcgtcaccctcagcatcaacggggacgggaccgggggcgtcaccaggaacgtcctccaccggctcgccgggtgcatcacccggaacgtcatcgaccggatcgccagggagctcgacgccatcaggcgcaacaggatcacctggctcaagccctagcgcgtcaaccggcacgggtccgggtgcctcccctggcacgtccagcaccggatcacccggatcgagcccatccgcctcaaccggaaccggacccggtacaccagggtcgggaacagcctcctcgtcaccaggctcctcaaccccctcgggagccacgggttcgcccggttcgtcaacgccttccggagcaactggtagccccggagcatcgccaggaacttcgagcacggggtcgcccgcctcgagcgacgcaagatttcctcctagagtgccaaaatcttttccattcaacacctcagtcgtgtacaaaaagactctgtttgtagaattcacggatcaccttttcaacatcgctaagccaaggccaccctggatgggtctgctaggtcctaccatccaggctgaggtttatgatacagtggtcattacacttaagaacatggcttcccatcctgtcagtcttcatgctgttggtgtatcctactggaaagcttctgagggagctgaatatgatgatcagaccagtcaaagggagaaagaagatgataaagtcttccctggtggaagccatacatatgtctggcaggtcctgaaagagaatggtccaatggcctctgacccactgtgccttacctactcatatctttctcatgtggacctggtaaaagacttgaattcaggcctcattggagccctactagtatgtagagaagggagtctggccaaggaaaagacacagaccttgcacaaatttatactactttttgctgtatttgatgaagggaaaagttggcactcagaaacaaagaactccttgatgcaggatagggatgctgcatctgctcgggcctggcctaaaatgcacacagtcaatggttatgtaaacaggtctctgccaggtctgattggatgccacaggaaatcagtctattggcatgtgattggaatgggcaccactcctgaagtgcactcaatattcctcgaaggtcacacatttcttgtgaggaaccatcgccaggctagcttggaaatctcgccaataactttccttactgctcaaacactcttgatggaccttggacagtttctactgttttgtcatatctcttcccaccaacatgatggcatggaagcttatgtcaaagtagacagctgtccagaggaaccccaactacgaatgaaaaataatgaagaagcggaagactatgatgatgatcttactgattctgaaatggatgtggtcaggtttgatgatgacaactctccttcctttatccaaattcgctcagttgccaagaagcatcctaaaacttgggtacattacattgctgctgaagaggaggactgggactatgctcccttagtcctcgcccccgatgacagaagttataaaagtcaatatttgaacaatggccctcagcggattggtaggaagtacaaaaaagtccgatttatggcatacacagatgaaacctttaagactcgtgaagctattcagcatgaatcaggaatcttgggacctttactttatggggaagttggagacacactgttgattatatttaagaatcaagcaagcagaccatataacatctaccctcacggaatcactgatgtccgtcctttgtattcaaggagattaccaaaaggtgtaaaacatttgaaggattttccaattctgccaggagaaatattcaaatataaatggacagtgactgtagaagatgggccaactaaatcagatcctcggtgcctgacccgctattactctagtttcgttaatatggagagagatctagcttcaggactcattggccctctcctcatctgctacaaagaatctgtagatcaaagaggaaaccagataatgtcagacaagaggaatgtcatcctgttttctgtatttgatgagaaccgaagctggtacctcacagagaatatacaacgctttctccccaatccagctggagtgcagcttgaggatccagagttccaagcctccaacatcatgcacagcatcaatggctatgtttttgatagtttgcagttgtcagtttgtttgcatgaggtggcatactggtacattctaagcattggagcacagactgacttcctttctgtcttcttctctggatataccttcaaacacaaaatggtctatgaagacacactcaccctattcccattctcaggagaaactgtcttcatgtcgatggaaaacccaggtctatggattctggggtgccacaactcagactttcggaacagaggcatgaccgccttactgaaggtttctagttgtgacaagaacactggtgattattacgaggacagttatgaagatatttcagcatacttgctgagtaaaaacaatgccattgaaccaagaagcttctctcaaaacccaccagtcttgaaacgccatcaacgggaaataactcgtactactcttcagtcagatcaagaggaaatcgattatgatgataccatatcagttgaaatgaagaaggaagattttgacatttatgatgaggatgaaaatcagagcccccgcagctttcaaaagaaaacacgacactattttattgctgcagtggagaggctctgggattatgggatgagtagctccccacatgttctaagaaacagggctcagagtggcagtgtccctcagttcaagaaagttgttttccaggaatttactgatggctcctttactcagcccttataccgtggagaactaaatgaacatttgggactcctggggccatatataagagcagaagttgaagataatatcatggtaactttcagaaatcaggcctctcgtccctattccttctattctagccttatttcttatgaggaagatcagaggcaaggagcagaacctagaaaaaactttgtcaagcctaatgaaaccaaaacttacttttggaaagtgcaacatcatatggcacccactaaagatgagtttgactgcaaagcctgggcttatttctctgatgttgacctggaaaaagatgtgcactcaggcctgattggaccccttctggtctgccacactaacacactgaaccctgctcatgggagacaagtgacagtacaggaatttgctctgtttttcaccatctttgatgagaccaaaagctggtacttcactgaaaatatggaaagaaactgcagggctccctgcaatatccagatggaagatcccacttttaaagagaattatcgcttccatgcaatcaatggctacataatggatacactacctggcttagtaatggctcaggatcaaaggattcgatggtatctgctcagcatgggcagcaatgaaaacatccattctattcatttcagtggacatgtgttcactgtacgaaaaaaagaggagtataaaatggcactgtacaatctctatccaggtgtttttgagacagtggaaatgttaccatccaaagctggaatttggcgggtggaatgccttattggcgagcatctacatgctgggatgagcacactttttctggtgtacagcaataagtgtcagactcccctgggaatggcttctggacacattagagattttcagattacagcttcaggacaatatggacagtgggccccaaagctggccagacttcattattccggatcaatcaatgcctggagcaccaaggagcccttttcttggatcaaggtggatctgttggcaccaatgattattcacggcatcaagacccagggtgcccgtcagaagttctccagcctctacatctctcagtttatcatcatgtatagtcttgatgggaagaagtggcagacttatcgaggaaattccactggaaccttaatggtcttctttggcaatgtggattcatctgggataaaacacaatatttttaaccctccaattattgctcgatacatccgtttgcacccaactcattatagcattcgcagcactcttcgcatggagttgatgggctgtgatttaaatagttgcagcatgccattgggaatggagagtaaagcaatatcagatgcacagattactgcttcatcctactttaccaatatgtttgccacctggtctccttcaaaagctcgacttcacctccaagggaggagtaatgcctggagacctcaggtgaataatccaaaagagtggctgcaagtggacttccagaagacaatgaaagtcacaggagtaactactcagggagtaaaatctctgcttaccagcatgtatgtgaaggagttcctcatctccagcagtcaagatggccatcagtggactctcttttttcagaatggcaaagtaaaggtttttcagggaaatcaagactccttcacacctgtggtgaactctctagacccaccgttactgactcgctaccttcgaattcacccccagagttgggtgcaccagattgccctgaggatggaggttctgggctgcgaggcacaggacctctacggcgccggatcacctggggccgaaacggccgaacaaaaactcatctcagaagaggatctgtcacctgcaaccggtcatcatcaccatcaccattga

SEQ ID NO: 787 - protein, 1619 aa, synthetic construct
  REGION 1..1619: note = Description of Artificial Sequence: Synthetic polypeptide
ATRRYYLGAVELSWDYMQSDLGELPVDARFPPRVPKSFPFGAPTSESATPESGPGSEPATSGSETPGTSESATPESGPGSEPATSGSETPGTSESATPESGPGTSTEPSEGSAPGSPAGSPTSTEEGTSESATPESGPGSEPATSGSETPGTSESATPESGPGSPAGSPTSTEEGSPAGSPTSTEEGASSNTSVVYKKTLFVEFTDHLFNIAKPRPPWMGLLGPTIQAEVYDTVVITLKNMASHPVSLHAVGVSYWKASEGAEYDDQTSQREKEDDKVFPGGSHTYVWQVLKENGPMASDPLCLTYSYLSHVDLVKDLNSGLIGALLVCREGSLAKEKTQTLHKFILLFAVFDEGKSWHSETKNSLMQDRDAASARAWPKMHTVNGYVNRSLPGLIGCHRKSVYWHVIGMGTTPEVHSIFLEGHTFLVRNHRQASLEISPITFLTAQTLLMDLGQFLLFCHISSHQHDGMEAYVKVDSCPEEPQLRMKNNEEAEDYDDDLTDSEMDVVRFDDDNSPSFIQIRSVAKKHPKTWVHYIAAEEEDWDYAPLVLAPDDRSYKSQYLNNGPQRIGRKYKKVRFMAYTDETFKTREAIQHESGILGPLLYGEVGDTLLIIFKNQASRPYNIYPHGITDVRPLYSRRLPKGVKHLKDFPILPGEIFKYKWTVTVEDGPTKSDPRCLTRYYSSFVNMERDLASGLIGPLLICYKESVDQRGNQIMSDKRNVILFSVFDENRSWYLTENIQRFLPNPAGVQLEDPEFQASNIMHSINGYVFDSLQLSVCLHEVAYWYILSIGAQTDFLSVFFSGYTFKHKMVYEDTLTLFPFSGETVFMSMENPGLWILGCHNSDFRNRGMTALLKVSSCDKNTGDYYEDSYEDISAYLLSKNNAIEPRSFSQNPPVLKRHQREITRTTLQSDQEEIDYDDTISVEMKKEDFDIYDEDENQSPRSFQKKTRHYFIAAVERLWDYGMSSSPHVLRNRAQSGSVPQFKKVVFQEFTDGSFTQPLYRGELNEHLGLLGPYIRAEVEDNIMVTFRNQASRPYSFYSSLISYEEDQRQGAEPRKNFVKPNETKTYFWKVQHHMAPTKDEFDCKAWAYFSDVDLEKDVHSGLIGPLLVCHTNTLNPAHGRQVTVQEFALFFTIFDETKSWYFTENMERNCRAPCNIQMEDPTFKENYRFHAINGYIMDTLPGLVMAQDQRIRWYLLSMGSNENIHSIHFSGHVFTVRKKEEYKMALYNLYPGVFETVEMLPSKAGIWRVECLIGEHLHAGMSTLFLVYSNKCQTPLGMASGHIRDFQITASGQYGQWAPKLARLHYSGSINAWSTKEPFSWIKVDLLAPMIIHGIKTQGARQKFSSLYISQFIIMYSLDGKKWQTYRGNSTGTLMVFFGNVDSSGIKHNIFNPPIIARYIRLHPTHYSIRSTLRMELMGCDLNSCSMPLGMESKAISDAQITASSYFTNMFATWSPSKARLHLQGRSNAWRPQVNNPKEWLQVDFQKTMKVTGVTTQGVKSLLTSMYVKEFLISSSQDGHQWTLFFQNGKVKVFQGNQDSFTPVVNSLDPPLLTRYLRIHPQSWVHQIALRMEVLGCEAQDLYGAGSPGAETAEQKLISEEDLSPATGHHHHHH

SEQ ID NO: 788 - DNA, 4860 bp, synthetic construct
  misc_feature 1..4860: note = Description of Artificial Sequence: Synthetic polynucleotide
  source 1..4860: mol_type = other DNA
gccaccagaagatactacctgggtgcagtggaactgtcatgggactatatgcaaagtgatctcggtgagctgcctgtggacgcaagatttcctcctagagtgccaaaatcttttccattcggcgcgccaacatcagagagcgccacccctgaaagtggtcccgggagcgagccagccacatctgggtcggaaacgccaggcacaagtgagtctgcaactcccgagtccggacctggctccgagcctgccactagcggctccgagactccgggaacttccgagagcgctacaccagaaagcggacccggaaccagtaccgaacctagcgagggctctgctccgggcagcccagccggctctcctacatccacggaggagggcacttccgaatccgccaccccggagtcagggccaggatctgaacccgctacctcaggcagtgagacgccaggaacgagcgagtccgctacaccggagagtgggccagggagccctgctggatctcctacgtccactgaggaagggtcaccagcgggctcgcccaccagcactgaagaaggtgcctcgagcaacacctcagtcgtgtacaaaaagactctgtttgtagaattcacggatcaccttttcaacatcgctaagccaaggccaccctggatgggtctgctaggtcctaccatccaggctgaggtttatgatacagtggtcattacacttaagaacatggcttcccatcctgtcagtcttcatgctgttggtgtatcctactggaaagcttctgagggagctgaatatgatgatcagaccagtcaaagggagaaagaagatgataaagtcttccctggtggaagccatacatatgtctggcaggtcctgaaagagaatggtccaatggcctctgacccactgtgccttacctactcatatctttctcatgtggacctggtaaaagacttgaattcaggcctcattggagccctactagtatgtagagaagggagtctggccaaggaaaagacacagaccttgcacaaatttatactactttttgctgtatttgatgaagggaaaagttggcactcagaaacaaagaactccttgatgcaggatagggatgctgcatctgctcgggcctggcctaaaatgcacacagtcaatggttatgtaaacaggtctctgccaggtctgattggatgccacaggaaatcagtctattggcatgtgattggaatgggcaccactcctgaagtgcactcaatattcctcgaaggtcacacatttcttgtgaggaaccatcgccaggctagcttggaaatctcgccaataactttccttactgctcaaacactcttgatggaccttggacagtttctactgttttgtcatatctcttcccaccaacatgatggcatggaagcttatgtcaaagtagacagctgtccagaggaaccccaactacgaatgaaaaataatgaagaagcggaagactatgatgatgatcttactgattctgaaatggatgtggtcaggtttgatgatgacaactctccttcctttatccaaattcgctcagttgccaagaagcatcctaaaacttgggtacattacattgctgctgaagaggaggactgggactatgctcccttagtcctcgcccccgatgacagaagttataaaagtcaatatttgaacaatggccctcagcggattggtaggaagtacaaaaaagtccgatttatggcatacacagatgaaacctttaagactcgtgaagctattcagcatgaatcaggaatcttgggacctttactttatggggaagttggagacacactgttgattatatttaagaatcaagcaagcagaccatataacatctaccctcacggaatcactgatgtccgtcctttgtattcaaggagattaccaaaaggtgtaaaacatttgaaggattttccaattctgccaggagaaatattcaaatataaatggacagtgactgtagaagatgggccaactaaatcagatcctcggtgcctgacccgctattactctagtttcgttaatatggagagagatctagcttcaggactcattggccctctcctcatctgctacaaagaatctgtagatcaaagaggaaaccagataatgtcagacaagaggaatgtcatcctgttttctgtatttgatgagaaccgaagctggtacctcacagagaatatacaacgctttctccccaatccagctggagtgcagcttgaggatccagagttccaagcctccaacatcatgcacagcatcaatggctatgtttttgatagtttgcagttgtcagtttgtttgcatgaggtggcatactggtacattctaagcattggagcacagactgacttcctttctgtcttcttctctggatataccttcaaacacaaaatggtctatgaagacacactcaccctattcccattctcaggagaaactgtcttcatgtcgatggaaaacccaggtctatggattctggggtgccacaactcagactttcggaacagaggcatgaccgccttactgaaggtttctagttgtgacaagaacactggtgattattacgaggacagttatgaagatatttcagcatacttgctgagtaaaaacaatgccattgaaccaagaagcttctctcaaaacccaccagtcttgaaacgccatcaacgggaaataactcgtactactcttcagtcagatcaagaggaaatcgattatgatgataccatatcagttgaaatgaagaaggaagattttgacatttatgatgaggatgaaaatcagagcccccgcagctttcaaaagaaaacacgacactattttattgctgcagtggagaggctctgggattatgggatgagtagctccccacatgttctaagaaacagggctcagagtggcagtgtccctcagttcaagaaagttgttttccaggaatttactgatggctcctttactcagcccttataccgtggagaactaaatgaacatttgggactcctggggccatatataagagcagaagttgaagataatatcatggtaactttcagaaatcaggcctctcgtccctattccttctattctagccttatttcttatgaggaagatcagaggcaaggagcagaacctagaaaaaactttgtcaagcctaatgaaaccaaaacttacttttggaaagtgcaacatcatatggcacccactaaagatgagtttgactgcaaagcctgggcttatttctctgatgttgacctggaaaaagatgtgcactcaggcctgattggaccccttctggtctgccacactaacacactgaaccctgctcatgggagacaagtgacagtacaggaatttgctctgtttttcaccatctttgatgagaccaaaagctggtacttcactgaaaatatggaaagaaactgcagggctccctgcaatatccagatggaagatcccacttttaaagagaattatcgcttccatgcaatcaatggctacataatggatacactacctggcttagtaatggctcaggatcaaaggattcgatggtatctgctcagcatgggcagcaatgaaaacatccattctattcatttcagtggacatgtgttcactgtacgaaaaaaagaggagtataaaatggcactgtacaatctctatccaggtgtttttgagacagtggaaatgttaccatccaaagctggaatttggcgggtggaatgccttattggcgagcatctacatgctgggatgagcacactttttctggtgtacagcaataagtgtcagactcccctgggaatggcttctggacacattagagattttcagattacagcttcaggacaatatggacagtgggccccaaagctggccagacttcattattccggatcaatcaatgcctggagcaccaaggagcccttttcttggatcaaggtggatctgttggcaccaatgattattcacggcatcaagacccagggtgcccgtcagaagttctccagcctctacatctctcagtttatcatcatgtatagtcttgatgggaagaagtggcagacttatcgaggaaattccactggaaccttaatggtcttctttggcaatgtggattcatctgggataaaacacaatatttttaaccctccaattattgctcgatacatccgtttgcacccaactcattatagcattcgcagcactcttcgcatggagttgatgggctgtgatttaaatagttgcagcatgccattgggaatggagagtaaagcaatatcagatgcacagattactgcttcatcctactttaccaatatgtttgccacctggtctccttcaaaagctcgacttcacctccaagggaggagtaatgcctggagacctcaggtgaataatccaaaagagtggctgcaagtggacttccagaagacaatgaaagtcacaggagtaactactcagggagtaaaatctctgcttaccagcatgtatgtgaaggagttcctcatctccagcagtcaagatggccatcagtggactctcttttttcagaatggcaaagtaaaggtttttcagggaaatcaagactccttcacacctgtggtgaactctctagacccaccgttactgactcgctaccttcgaattcacccccagagttgggtgcaccagattgccctgaggatggaggttctgggctgcgaggcacaggacctctacggcgccggatcacctggggccgaaacggccgaacaaaaactcatctcagaagaggatctgtcacctgcaaccggtcatcatcaccatcaccattga

SEQ ID NO: 789 - protein, 1619 aa, synthetic construct
  REGION 1..1619: note = Description of Artificial Sequence: Synthetic polypeptide
ATRRYYLGAVELSWDYMQSDLGELPVDARFPPRVPKSFPFGAPGSSPSASTGTGPGSSPSASTGTGPGASPGTSSTGSPGASPGTSSTGSPGSSTPSGATGSPGSSPSASTGTGPGASPGTSSTGSPGSSPSASTGTGPGTPGSGTASSSPGSSTPSGATGSPGSSTPSGATGSPGASPGTSSTGSPASSNTSVVYKKTLFVEFTDHLFNIAKPRPPWMGLLGPTIQAEVYDTVVITLKNMASHPVSLHAVGVSYWKASEGAEYDDQTSQREKEDDKVFPGGSHTYVWQVLKENGPMASDPLCLTYSYLSHVDLVKDLNSGLIGALLVCREGSLAKEKTQTLHKFILLFAVFDEGKSWHSETKNSLMQDRDAASARAWPKMHTVNGYVNRSLPGLIGCHRKSVYWHVIGMGTTPEVHSIFLEGHTFLVRNHRQASLEISPITFLTAQTLLMDLGQFLLFCHISSHQHDGMEAYVKVDSCPEEPQLRMKNNEEAEDYDDDLTDSEMDVVRFDDDNSPSFIQIRSVAKKHPKTWVHYIAAEEEDWDYAPLVLAPDDRSYKSQYLNNGPQRIGRKYKKVRFMAYTDETFKTREAIQHESGILGPLLYGEVGDTLLIIFKNQASRPYNIYPHGITDVRPLYSRRLPKGVKHLKDFPILPGEIFKYKWTVTVEDGPTKSDPRCLTRYYSSFVNMERDLASGLIGPLLICYKESVDQRGNQIMSDKRNVILFSVFDENRSWYLTENIQRFLPNPAGVQLEDPEFQASNIMHSINGYVFDSLQLSVCLHEVAYWYILSIGAQTDFLSVFFSGYTFKHKMVYEDTLTLFPFSGETVFMSMENPGLWILGCHNSDFRNRGMTALLKVSSCDKNTGDYYEDSYEDISAYLLSKNNAIEPRSFSQNPPVLKRHQREITRTTLQSDQEEIDYDDTISVEMKKEDFDIYDEDENQSPRSFQKKTRHYFIAAVERLWDYGMSSSPHVLRNRAQSGSVPQFKKVVFQEFTDGSFTQPLYRGELNEHLGLLGPYIRAEVEDNIMVTFRNQASRPYSFYSSLISYEEDQRQGAEPRKNFVKPNETKTYFWKVQHHMAPTKDEFDCKAWAYFSDVDLEKDVHSGLIGPLLVCHTNTLNPAHGRQVTVQEFALFFTIFDETKSWYFTENMERNCRAPCNIQMEDPTFKENYRFHAINGYIMDTLPGLVMAQDQRIRWYLLSMGSNENIHSIHFSGHVFTVRKKEEYKMALYNLYPGVFETVEMLPSKAGIWRVECLIGEHLHAGMSTLFLVYSNKCQTPLGMASGHIRDFQITASGQYGQWAPKLARLHYSGSINAWSTKEPFSWIKVDLLAPMIIHGIKTQGARQKFSSLYISQFIIMYSLDGKKWQTYRGNSTGTLMVFFGNVDSSGIKHNIFNPPIIARYIRLHPTHYSIRSTLRMELMGCDLNSCSMPLGMESKAISDAQITASSYFTNMFATWSPSKARLHLQGRSNAWRPQVNNPKEWLQVDFQKTMKVTGVTTQGVKSLLTSMYVKEFLISSSQDGHQWTLFFQNGKVKVFQGNQDSFTPVVNSLDPPLLTRYLRIHPQSWVHQIALRMEVLGCEAQDLYGAGSPGAETAEQKLISEEDLSPATGHHHHHH

SEQ ID NO: 790 - DNA, 4860 bp, synthetic construct
  misc_feature 1..4860: note = Description of Artificial Sequence: Synthetic polynucleotide
  source 1..4860: mol_type = other DNA
gccaccagaagatactacctgggtgcagtggaactgtcatgggactatatgcaaagtgatctcggtgagctgcctgtggacgcaagatttcctcctagagtgccaaaatcttttccattcggcgcgccaggctccagcccctccgcgagcacgggaaccggaccaggttcgtcaccctcagcatcaacggggacgggaccgggggcgtcaccaggaacgtcctccaccggctcgccgggtgcatcacccggaacgtcatcgaccggatcgccagggagctcgacgccatcaggcgcaacaggatcacctggctcaagccctagcgcgtcaaccggcacgggtccgggtgcctcccctggcacgtccagcaccggatcacccggatcgagcccatccgcctcaaccggaaccggacccggtacaccagggtcgggaacagcctcctcgtcaccaggctcctcaaccccctcgggagccacgggttcgcccggttcgtcaacgccttccggagcaactggtagccccggagcatcgccaggaacttcgagcacggggtcgcccgcctcgagcaacacctcagtcgtgtacaaaaagactctgtttgtagaattcacggatcaccttttcaacatcgctaagccaaggccaccctggatgggtctgctaggtcctaccatccaggctgaggtttatgatacagtggtcattacacttaagaacatggcttcccatcctgtcagtcttcatgctgttggtgtatcctactggaaagcttctgagggagctgaatatgatgatcagaccagtcaaagggagaaagaagatgataaagtcttccctggtggaagccatacatatgtctggcaggtcctgaaagagaatggtccaatggcctctgacccactgtgccttacctactcatatctttctcatgtggacctggtaaaagacttgaattcaggcctcattggagccctactagtatgtagagaagggagtctggccaaggaaaagacacagaccttgcacaaatttatactactttttgctgtatttgatgaagggaaaagttggcactcagaaacaaagaactccttgatgcaggatagggatgctgcatctgctcgggcctggcctaaaatgcacacagtcaatggttatgtaaacaggtctctgccaggtctgattggatgccacaggaaatcagtctattggcatgtgattggaatgggcaccactcctgaagtgcactcaatattcctcgaaggtcacacatttcttgtgaggaaccatcgccaggctagcttggaaatctcgccaataactttccttactgctcaaacactcttgatggaccttggacagtttctactgttttgtcatatctcttcccaccaacatgatggcatggaagcttatgtcaaagtagacagctgtccagaggaaccccaactacgaatgaaaaataatgaagaagcggaagactatgatgatgatcttactgattctgaaatggatgtggtcaggtttgatgatgacaactctccttcctttatccaaattcgctcagttgccaagaagcatcctaaaacttgggtacattacattgctgctgaagaggaggactgggactatgctcccttagtcctcgcccccgatgacagaagttataaaagtcaatatttgaacaatggccctcagcggattggtaggaagtacaaaaaagtccgatttatggcatacacagatgaaacctttaagactcgtgaagctattcagcatgaatcaggaatcttgggacctttactttatggggaagttggagacacactgttgattatatttaagaatcaagcaagcagaccatataacatctaccctcacggaatcactgatgtccgtcctttgtattcaaggagattaccaaaaggtgtaaaacatttgaaggattttccaattctgccaggagaaatattcaaatataaatggacagtgactgtagaagatgggccaactaaatcagatcctcggtgcctgacccgctattactctagtttcgttaatatggagagagatctagcttcaggactcattggccctctcctcatctgctacaaagaatctgtagatcaaagaggaaaccagataatgtcagacaagaggaatgtcatcctgttttctgtatttgatgagaaccgaagctggtacctcacagagaatatacaacgctttctccccaatccagctggagtgcagcttgaggatccagagttccaagcctccaacatcatgcacagcatcaatggctatgtttttgatagtttgcagttgtcagtttgtttgcatgaggtggcatactggtacattctaagcattggagcacagactgacttcctttctgtcttcttctctggatataccttcaaacacaaaatggtctatgaagacacactcaccctattcccattctcaggagaaactgtcttcatgtcgatggaaaacccaggtctatggattctggggtgccacaactcagactttcggaacagaggcatgaccgccttactgaaggtttctagttgtgacaagaacactggtgattattacgaggacagttatgaagatatttcagcatacttgctgagtaaaaacaatgccattgaaccaagaagcttctctcaaaacccaccagtcttgaaacgccatcaacgggaaataactcgtactactcttcagtcagatcaagaggaaatcgattatgatgataccatatcagttgaaatgaagaaggaagattttgacatttatgatgaggatgaaaatcagagcccccgcagctttcaaaagaaaacacgacactattttattgctgcagtggagaggctctgggattatgggatgagtagctccccacatgttctaagaaacagggctcagagtggcagtgtccctcagttcaagaaagttgttttccaggaatttactgatggctcctttactcagcccttataccgtggagaactaaatgaacatttgggactcctggggccatatataagagcagaagttgaagataatatcatggtaactttcagaaatcaggcctctcgtccctattccttctattctagccttatttcttatgaggaagatcagaggcaaggagcagaacctagaaaaaactttgtcaagcctaatgaaaccaaaacttacttttggaaagtgcaacatcatatggcacccactaaagatgagtttgactgcaaagcctgggcttatttctctgatgttgacctggaaaaagatgtgcactcaggcctgattggaccccttctggtctgccacactaacacactgaaccctgctcatgggagacaagtgacagtacaggaatttgctctgtttttcaccatctttgatgagaccaaaagctggtacttcactgaaaatatggaaagaaactgcagggctccctgcaatatccagatggaagatcccacttttaaagagaattatcgcttccatgcaatcaatggctacataatggatacactacctggcttagtaatggctcaggatcaaaggattcgatggtatctgctcagcatgggcagcaatgaaaacatccattctattcatttcagtggacatgtgttcactgtacgaaaaaaagaggagtataaaatggcactgtacaatctctatccaggtgtttttgagacagtggaaatgttaccatccaaagctggaatttggcgggtggaatgccttattggcgagcatctacatgctgggatgagcacactttttctggtgtacagcaataagtgtcagactcccctgggaatggcttctggacacattagagattttcagattacagcttcaggacaatatggacagtgggccccaaagctggccagacttcattattccggatcaatcaatgcctggagcaccaaggagcccttttcttggatcaaggtggatctgttggcaccaatgattattcacggcatcaagacccagggtgcccgtcagaagttctccagcctctacatctctcagtttatcatcatgtatagtcttgatgggaagaagtggcagacttatcgaggaaattccactggaaccttaatggtcttctttggcaatgtggattcatctgggataaaacacaatatttttaaccctccaattattgctcgatacatccgtttgcacccaactcattatagcattcgcagcactcttcgcatggagttgatgggctgtgatttaaatagttgcagcatgccattgggaatggagagtaaagcaatatcagatgcacagattactgcttcatcctactttaccaatatgtttgccacctggtctccttcaaaagctcgacttcacctccaagggaggagtaatgcctggagacctcaggtgaataatccaaaagagtggctgcaagtggacttccagaagacaatgaaagtcacaggagtaactactcagggagtaaaatctctgcttaccagcatgtatgtgaaggagttcctcatctccagcagtcaagatggccatcagtggactctcttttttcagaatggcaaagtaaaggtttttcagggaaatcaagactccttcacacctgtggtgaactctctagacccaccgttactgactcgctaccttcgaattcacccccagagttgggtgcaccagattgccctgaggatggaggttctgggctgcgaggcacaggacctctacggcgccggatcacctggggccgaaacggccgaacaaaaactcatctcagaagaggatctgtcacctgcaaccggtcatcatcaccatcaccattga

SEQ ID NO: 791 - protein, 1619 aa, synthetic construct
  REGION 1..1619: note = Description of Artificial Sequence: Synthetic polypeptide
ATRRYYLGAVELSWDYMQSDLGELPVDARFPPRVPKSFPFNTSVVYKKTLFVEFTDHLFNIAKPRPPWMGLLGPTIQAEVYDTVVITLKNMASHPVSLHAVGVSYWKASEGAEYDDQTSQREKEDDKVFPGGSHTYVWQVLKENGPMASDPLCLTYSYLSHVDLVKDLNSGLIGALLVCREGSLAKEKTQTLHKFILLFAVFDEGKSWHSETKNSLGAPTSTEPSEGSAPGSPAGSPTSTEEGTSTEPSEGSAPGTSTEPSEGSAPGTSESATPESGPGTSTEPSEGSAPGTSESATPESGPGSEPATSGSETPGTSTEPSEGSAPGTSTEPSEGSAPGTSESATPESGPGTSESATPESGPGASSMQDRDAASARAWPKMHTVNGYVNRSLPGLIGCHRKSVYWHVIGMGTTPEVHSIFLEGHTFLVRNHRQASLEISPITFLTAQTLLMDLGQFLLFCHISSHQHDGMEAYVKVDSCPEEPQLRMKNNEEAEDYDDDLTDSEMDVVRFDDDNSPSFIQIRSVAKKHPKTWVHYIAAEEEDWDYAPLVLAPDDRSYKSQYLNNGPQRIGRKYKKVRFMAYTDETFKTREAIQHESGILGPLLYGEVGDTLLIIFKNQASRPYNIYPHGITDVRPLYSRRLPKGVKHLKDFPILPGEIFKYKWTVTVEDGPTKSDPRCLTRYYSSFVNMERDLASGLIGPLLICYKESVDQRGNQIMSDKRNVILFSVFDENRSWYLTENIQRFLPNPAGVQLEDPEFQASNIMHSINGYVFDSLQLSVCLHEVAYWYILSIGAQTDFLSVFFSGYTFKHKMVYEDTLTLFPFSGETVFMSMENPGLWILGCHNSDFRNRGMTALLKVSSCDKNTGDYYEDSYEDISAYLLSKNNAIEPRSFSQNPPVLKRHQREITRTTLQSDQEEIDYDDTISVEMKKEDFDIYDEDENQSPRSFQKKTRHYFIAAVERLWDYGMSSSPHVLRNRAQSGSVPQFKKVVFQEFTDGSFTQPLYRGELNEHLGLLGPYIRAEVEDNIMVTFRNQASRPYSFYSSLISYEEDQRQGAEPRKNFVKPNETKTYFWKVQHHMAPTKDEFDCKAWAYFSDVDLEKDVHSGLIGPLLVCHTNTLNPAHGRQVTVQEFALFFTIFDETKSWYFTENMERNCRAPCNIQMEDPTFKENYRFHAINGYIMDTLPGLVMAQDQRIRWYLLSMGSNENIHSIHFSGHVFTVRKKEEYKMALYNLYPGVFETVEMLPSKAGIWRVECLIGEHLHAGMSTLFLVYSNKCQTPLGMASGHIRDFQITASGQYGQWAPKLARLHYSGSINAWSTKEPFSWIKVDLLAPMIIHGIKTQGARQKFSSLYISQFIIMYSLDGKKWQTYRGNSTGTLMVFFGNVDSSGIKHNIFNPPIIARYIRLHPTHYSIRSTLRMELMGCDLNSCSMPLGMESKAISDAQITASSYFTNMFATWSPSKARLHLQGRSNAWRPQVNNPKEWLQVDFQKTMKVTGVTTQGVKSLLTSMYVKEFLISSSQDGHQWTLFFQNGKVKVFQGNQDSFTPVVNSLDPPLLTRYLRIHPQSWVHQIALRMEVLGCEAQDLYGAGSPGAETAEQKLISEEDLSPATGHHHHHH

SEQ ID NO: 792 - DNA, 4860 bp, synthetic construct
  misc_feature 1..4860: note = Description of Artificial Sequence: Synthetic polynucleotide
  source 1..4860: mol_type = other DNA
gccaccagaagatactacctgggtgcagtggaactgtcatgggactatatgcaaagtgatctcggtgagctgcctgtggacgcaagatttcctcctagagtgccaaaatcttttccattcaacacctcagtcgtgtacaaaaagactctgtttgtagaattcacggatcaccttttcaacatcgctaagccaaggccaccctggatgggtctgctaggtcctaccatccaggctgaggtttatgatacagtggtcattacacttaagaacatggcttcccatcctgtcagtcttcatgctgttggtgtatcctactggaaagcttctgagggagctgaatatgatgatcagaccagtcaaagggagaaagaagatgataaagtcttccctggtggaagccatacatatgtctggcaggtcctgaaagagaatggtccaatggcctctgacccactgtgccttacctactcatatctttctcatgtggacctggtaaaagacttgaattcaggcctcattggagccctactagtatgtagagaagggagtctggccaaggaaaagacacagaccttgcacaaatttatactactttttgctgtatttgatgaagggaaaagttggcactcagaaacaaagaactccttgggcgcgccaaccagtacggagccgtccgaggggagcgcaccaggaagcccggctgggagcccgacttctaccgaagagggtacatctaccgaaccaagtgaaggttcagcaccaggcacctcaacagaaccctctgagggctcggcgcctggtacaagtgagtccgccaccccagaatccgggcctgggacaagcacagaaccttcggaagggagtgcccctggaacatccgaatcggcaaccccagaatcagggccaggatctgagcccgcgacttcgggctccgagacgcctgggacatccaccgagccctccgaaggatcagccccaggcaccagcacggagccctctgagggaagcgcacctggtaccagcgaaagcgcaactcccgaatcaggtcccggtacgagcgagtcggcgaccccggagagcgggccaggtgcctcgagcatgcaggatagggatgctgcatctgctcgggcctggcctaaaatgcacacagtcaatggttatgtaaacaggtctctgccaggtctgattggatgccacaggaaatcagtctattggcatgtgattggaatgggcaccactcctgaagtgcactcaatattcctcgaaggtcacacatttcttgtgaggaaccatcgccaggctagcttggaaatctcgccaataactttccttactgctcaaacactcttgatggaccttggacagtttctactgttttgtcatatctcttcccaccaacatgatggcatggaagcttatgtcaaagtagacagctgtccagaggaaccccaactacgaatgaaaaataatgaagaagcggaagactatgatgatgatcttactgattctgaaatggatgtggtcaggtttgatgatgacaactctccttcctttatccaaattcgctcagttgccaagaagcatcctaaaacttgggtacattacattgctgctgaagaggaggactgggactatgctcccttagtcctcgcccccgatgacagaagttataaaagtcaatatttgaacaatggccctcagcggattggtaggaagtacaaaaaagtccgatttatggcatacacagatgaaacctttaagactcgtgaagctattcagcatgaatcaggaatcttgggacctttactttatggggaagttggagacacactgttgattatatttaagaatcaagcaagcagaccatataacatctaccctcacggaatcactgatgtccgtcctttgtattcaaggagattaccaaaaggtgtaaaacatttgaaggattttccaattctgccaggagaaatattcaaatataaatggacagtgactgtagaagatgggccaactaaatcagatcctcggtgcctgacccgctattactctagtttcgttaatatggagagagatctagcttcaggactcattggccctctcctcatctgctacaaagaatctgtagatcaaagaggaaaccagataatgtcagacaagaggaatgtcatcctgttttctgtatttgatgagaaccgaagctggtacctcacagagaatatacaacgctttctccccaatccagctggagtgcagcttgaggatccagagttccaagcctccaacatcatgcacagcatcaatggctatgtttttgatagtttgcagttgtcagtttgtttgcatgaggtggcatactggtacattctaagcattggagcacagactgacttcctttctgtcttcttctctggatataccttcaaacacaaaatggtctatgaagacacactcaccctattcccattctcaggagaaactgtcttcatgtcgatggaaaacccaggtctatggattctggggtgccacaactcagactttcggaacagaggcatgaccgccttactgaaggtttctagttgtgacaagaacactggtgattattacgaggacagttatgaagatatttcagcatacttgctgagtaaaaacaatgccattgaaccaagaagcttctctcaaaacccaccagtcttgaaacgccatcaacgggaaataactcgtactactcttcagtcagatcaagaggaaatcgattatgatgataccatatcagttgaaatgaagaaggaagattttgacatttatgatgaggatgaaaatcagagcccccgcagctttcaaaagaaaacacgacactattttattgctgcagtggagaggctctgggattatgggatgagtagctccccacatgttctaagaaacagggctcagagtggcagtgtccctcagttcaagaaagttgttttccaggaatttactgatggctcctttactcagcccttataccgtggagaactaaatgaacatttgggactcctggggccatatataagagcagaagttgaagataatatcatggtaactttcagaaatcaggcctctcgtccctattccttctattctagccttatttcttatgaggaagatcagaggcaaggagcagaacctagaaaaaactttgtcaagcctaatgaaaccaaaacttacttttggaaagtgcaacatcatatggcacccactaaagatgagtttgactgcaaagcctgggcttatttctctgatgttgacctggaaaaagatgtgcactcaggcctgattggaccccttctggtctgccacactaacacactgaaccctgctcatgggagacaagtgacagtacaggaatttgctctgtttttcaccatctttgatgagaccaaaagctggtacttcactgaaaatatggaaagaaactgcagggctccctgcaatatccagatggaagatcccacttttaaagagaattatcgcttccatgcaatcaatggctacataatggatacactacctggcttagtaatggctcaggatcaaaggattcgatggtatctgctcagcatgggcagcaatgaaaacatccattctattcatttcagtggacatgtgttcactgtacgaaaaaaagaggagtataaaatggcactgtacaatctctatccaggtgtttttgagacagtggaaatgttaccatccaaagctggaatttggcgggtggaatgccttattggcgagcatctacatgctgggatgagcacactttttctggtgtacagcaataagtgtcagactcccctgggaatggcttctggacacattagagattttcagattacagcttcaggacaatatggacagtgggccccaaagctggccagacttcattattccggatcaatcaatgcctggagcaccaaggagcccttttcttggatcaaggtggatctgttggcaccaatgattattcacggcatcaagacccagggtgcccgtcagaagttctccagcctctacatctctcagtttatcatcatgtatagtcttgatgggaagaagtggcagacttatcgaggaaattccactggaaccttaatggtcttctttggcaatgtggattcatctgggataaaacacaatatttttaaccctccaattattgctcgatacatccgtttgcacccaactcattatagcattcgcagcactcttcgcatggagttgatgggctgtgatttaaatagttgcagcatgccattgggaatggagagtaaagcaatatcagatgcacagattactgcttcatcctactttaccaatatgtttgccacctggtctccttcaaaagctcgacttcacctccaagggaggagtaatgcctggagacctcaggtgaataatccaaaagagtggctgcaagtggacttccagaagacaatgaaagtcacaggagtaactactcagggagtaaaatctctgcttaccagcatgtatgtgaaggagttcctcatctccagcagtcaagatggccatcagtggactctcttttttcagaatggcaaagtaaaggtttttcagggaaatcaagactccttcacacctgtggtgaactctctagacccaccgttactgactcgctaccttcgaattcacccccagagttgggtgcaccagattgccctgaggatggaggttctgggctgcgaggcacaggacctctacggcgccggatcacctggggccgaaacggccgaacaaaaactcatctcagaagaggatctgtcacctgcaaccggtcatcatcaccatcaccattga

SEQ ID NO: 793 - protein, 1619 aa, synthetic construct
  REGION 1..1619: note = Description of Artificial Sequence: Synthetic polypeptide
ATRRYYLGAVELSWDYMQSDLGELPVDARFPPRVPKSFPFNTSVVYKKTLFVEFTDHLFNIAKPRPPWMGLLGPTIQAEVYDTVVITLKNMASHPVSLHAVGVSYWKASEGAEYDDQTSQREKEDDKVFPGGSHTYVWQVLKENGPMASDPLCLTYSYLSHVDLVKDLNSGLIGALLVCREGSLAKEKTQTLHKFILLFAVFDEGKSWHSETKNSLGAPGASPGTSSTGSPGSSPSASTGTGPGSSPSASTGTGPGTPGSGTASSSPGSSTPSGATGSPGSSPSASTGTGPGASPGTSSTGSPGTPGSGTASSSPGSSTPSGATGSPGTPGSGTASSSPGASPGTSSTGSPGASPGTSSTGSPASSMQDRDAASARAWPKMHTVNGYVNRSLPGLIGCHRKSVYWHVIGMGTTPEVHSIFLEGHTFLVRNHRQASLEISPITFLTAQTLLMDLGQFLLFCHISSHQHDGMEAYVKVDSCPEEPQLRMKNNEEAEDYDDDLTDSEMDVVRFDDDNSPSFIQIRSVAKKHPKTWVHYIAAEEEDWDYAPLVLAPDDRSYKSQYLNNGPQRIGRKYKKVRFMAYTDETFKTREAIQHESGILGPLLYGEVGDTLLIIFKNQASRPYNIYPHGITDVRPLYSRRLPKGVKHLKDFPILPGEIFKYKWTVTVEDGPTKSDPRCLTRYYSSFVNMERDLASGLIGPLLICYKESVDQRGNQIMSDKRNVILFSVFDENRSWYLTENIQRFLPNPAGVQLEDPEFQASNIMHSINGYVFDSLQLSVCLHEVAYWYILSIGAQTDFLSVFFSGYTFKHKMVYEDTLTLFPFSGETVFMSMENPGLWILGCHNSDFRNRGMTALLKVSSCDKNTGDYYEDSYEDISAYLLSKNNAIEPRSFSQNPPVLKRHQREITRTTLQSDQEEIDYDDTISVEMKKEDFDIYDEDENQSPRSFQKKTRHYFIAAVERLWDYGMSSSPHVLRNRAQSGSVPQFKKVVFQEFTDGSFTQPLYRGELNEHLGLLGPYIRAEVEDNIMVTFRNQASRPYSFYSSLISYEEDQRQGAEPRKNFVKPNETKTYFWKVQHHMAPTKDEFDCKAWAYFSDVDLEKDVHSGLIGPLLVCHTNTLNPAHGRQVTVQEFALFFTIFDETKSWYFTENMERNCRAPCNIQMEDPTFKENYRFHAINGYIMDTLPGLVMAQDQRIRWYLLSMGSNENIHSIHFSGHVFTVRKKEEYKMALYNLYPGVFETVEMLPSKAGIWRVECLIGEHLHAGMSTLFLVYSNKCQTPLGMASGHIRDFQITASGQYGQWAPKLARLHYSGSINAWSTKEPFSWIKVDLLAPMIIHGIKTQGARQKFSSLYISQFIIMYSLDGKKWQTYRGNSTGTLMVFFGNVDSSGIKHNIFNPPIIARYIRLHPTHYSIRSTLRMELMGCDLNSCSMPLGMESKAISDAQITASSYFTNMFATWSPSKARLHLQGRSNAWRPQVNNPKEWLQVDFQKTMKVTGVTTQGVKSLLTSMYVKEFLISSSQDGHQWTLFFQNGKVKVFQGNQDSFTPVVNSLDPPLLTRYLRIHPQSWVHQIALRMEVLGCEAQDLYGAGSPGAETAEQKLISEEDLSPATGHHHHHH

SEQ ID NO: 794 - DNA, 4860 bp, synthetic construct
  misc_feature 1..4860: note = Description of Artificial Sequence: Synthetic polynucleotide
  source 1..4860: mol_type = other DNA
gccaccagaagatactacctgggtgcagtggaactgtcatgggactatatgcaaagtgatctcggtgagctgcctgtggacgcaagatttcctcctagagtgccaaaatcttttccattcaacacctcagtcgtgtacaaaaagactctgtttgtagaattcacggatcaccttttcaacatcgctaagccaaggccaccctggatgggtctgctaggtcctaccatccaggctgaggtttatgatacagtggtcattacacttaagaacatggcttcccatcctgtcagtcttcatgctgttggtgtatcctactggaaagcttctgagggagctgaatatgatgatcagaccagtcaaagggagaaagaagatgataaagtcttccctggtggaagccatacatatgtctggcaggtcctgaaagagaatggtccaatggcctctgacccactgtgccttacctactcatatctttctcatgtggacctggtaaaagacttgaattcaggcctcattggagccctactagtatgtagagaagggagtctggccaaggaaaagacacagaccttgcacaaatttatactactttttgctgtatttgatgaagggaaaagttggcactcagaaacaaagaactccttgggcgcgccaggtgcctcgccgggaacatcatcaactggttcacccgggtcatccccctcggcctcaaccgggacgggtcccggctcatcccccagcgccagcactggaacaggtcctggcactcctggttccggtacggcatcgtcatccccgggaagctcaacaccgtccggagcgacaggatcacctggctcgtcaccttcggcgtcaactggaacggggccaggggcctcacccggaacgtcctcgactgggtcgcctggtacgccgggatcaggaacggcctcatcctcgcctgggtcctcaacgccctcgggtgcgactggttcgccgggaactcctggctcggggacggcctcgtcgtcgcctggggcatcaccggggacgagctccacggggtcccctggagcgtcaccggggacctcctcgacaggtagcccggcctcgagcatgcaggatagggatgctgcatctgctcgggcctggcctaaaatgcacacagtcaatggttatgtaaacaggtctctgccaggtctgattggatgccacaggaaatcagtctattggcatgtgattggaatgggcaccactcctgaagtgcactcaatattcctcgaaggtcacacatttcttgtgaggaaccatcgccaggctagcttggaaatctcgccaataactttccttactgctcaaacactcttgatggaccttggacagtttctactgttttgtcatatctcttcccaccaacatgatggcatggaagcttatgtcaaagtagacagctgtccagaggaaccccaactacgaatgaaaaataatgaagaagcggaagactatgatgatgatcttactgattctgaaatggatgtggtcaggtttgatgatgacaactctccttcctttatccaaattcgctcagttgccaagaagcatcctaaaacttgggtacattacattgctgctgaagaggaggactgggactatgctcccttagtcctcgcccccgatgacagaagttataaaagtcaatatttgaacaatggccctcagcggattggtaggaagtacaaaaaagtccgatttatggcatacacagatgaaacctttaagactcgtgaagctattcagcatgaatcaggaatcttgggacctttactttatggggaagttggagacacactgttgattatatttaagaatcaagcaagcagaccatataacatctaccctcacggaatcactgatgtccgtcctttgtattcaaggagattaccaaaaggtgtaaaacatttgaaggattttccaattctgccaggagaaatattcaaatataaatggacagtgactgtagaagatgggccaactaaatcagatcctcggtgcctgacccgctattactctagtttcgttaatatggagagagatctagcttcaggactcattggccctctcctcatctgctacaaagaatctgtagatcaaagaggaaaccagataatgtcagacaagaggaatgtcatcctgttttctgtatttgatgagaaccgaagctggtacctcacagagaatatacaacgctttctccccaatccagctggagtgcagcttgaggatccagagttccaagcctccaacatcatgcacagcatcaatggctatgtttttgatagtttgcagttgtcagtttgtttgcatgaggtggcatactggtacattctaagcattggagcacagactgacttcctttctgtcttcttctctggatataccttcaaacacaaaatggtctatgaagacacactcaccctattcccattctcaggagaaactgtcttcatgtcgatggaaaacccaggtctatggattctggggtgccacaactcagactttcggaacagaggcatgaccgccttactgaaggtttctagttgtgacaagaacactggtgattattacgaggacagttatgaagatatttcagcatacttgctgagtaaaaacaatgccattgaaccaagaagcttctctcaaaacccaccagtcttgaaacgccatcaacgggaaataactcgtactactcttcagtcagatcaagaggaaatcgattatgatgataccatatcagttgaaatgaagaaggaagattttgacatttatgatgaggatgaaaatcagagcccccgcagctttcaaaagaaaacacgacactattttattgctgcagtggagaggctctgggattatgggatgagtagctccccacatgttctaagaaacagggctcagagtggcagtgtccctcagttcaagaaagttgttttccaggaatttactgatggctcctttactcagcccttataccgtggagaactaaatgaacatttgggactcctggggccatatataagagcagaagttgaagataatatcatggtaactttcagaaatcaggcctctcgtccctattccttctattctagccttatttcttatgaggaagatcagaggcaaggagcagaacctagaaaaaactttgtcaagcctaatgaaaccaaaacttacttttggaaagtgcaacatcatatggcacccactaaagatgagtttgactgcaaagcctgggcttatttctctgatgttgacctggaaaaagatgtgcactcaggcctgattggaccccttctggtctgccacactaacacactgaaccctgctcatgggagacaagtgacagtacaggaatttgctctgtttttcaccatctttgatgagaccaaaagctggtacttcactgaaaatatggaaagaaactgcagggctccctgcaatatccagatggaagatcccacttttaaagagaattatcgcttccatgcaatcaatggctacataatggatacactacctggcttagtaatggctcaggatcaaaggattcgatggtatctgctcagcatgggcagcaatgaaaacatccattctattcatttcagtggacatgtgttcactgtacgaaaaaaagaggagtataaaatggcactgtacaatctctatccaggtgtttttgagacagtggaaatgttaccatccaaagctggaatttggcgggtggaatgccttattggcgagcatctacatgctgggatgagcacactttttctggtgtacagcaataagtgtcagactcccctgggaatggcttctggacacattagagattttcagattacagcttcaggacaatatggacagtgggccccaaagctggccagacttcattattccggatcaatcaatgcctggagcaccaaggagcccttttcttggatcaaggtggatctgttggcaccaatgattattcacggcatcaagacccagggtgcccgtcagaagttctccagcctctacatctctcagtttatcatcatgtatagtcttgatgggaagaagtggcagacttatcgaggaaattccactggaaccttaatggtcttctttggcaatgtggattcatctgggataaaacacaatatttttaaccctccaattattgctcgatacatccgtttgcacccaactcattatagcattcgcagcactcttcgcatggagttgatgggctgtgatttaaatagttgcagcatgccattgggaatggagagtaaagcaatatcagatgcacagattactgcttcatcctactttaccaatatgtttgccacctggtctccttcaaaagctcgacttcacctccaagggaggagtaatgcctggagacctcaggtgaataatccaaaagagtggctgcaagtggacttccagaagacaatgaaagtcacaggagtaactactcagggagtaaaatctctgcttaccagcatgtatgtgaaggagttcctcatctccagcagtcaagatggccatcagtggactctcttttttcagaatggcaaagtaaaggtttttcagggaaatcaagactccttcacacctgtggtgaactctctagacccaccgttactgactcgctaccttcgaattcacccccagagttgggtgcaccagattgccctgaggatggaggttctgggctgcgaggcacaggacctctacggcgccggatcacctggggccgaaacggccgaacaaaaactcatctcagaagaggatctgtcacctgcaaccggtcatcatcaccatcaccattga

SEQ ID NO: 795 - protein, 1622 aa, synthetic construct
  REGION 1..1622: note = Description of Artificial Sequence: Synthetic polypeptide
ATRRYYLGAVELSWDYMQSDLGELPVDARFPPRVPKSFPFNTSVVYKKTLFVEFTDHLFNIAKPRPPWMGLLGPTIQAEVYDTVVITLKNMASHPVSLHAVGVSYWKASEGAEYDDQTSQREKEDDKVFPGGSHTYVWQVLKENGPMASDPLCLTYSYLSHVDLVKDLNSGLIGALLVCREGSLAKEKTQTLHKFILLFAVFDEGKSWHSETKNSLMQDRDAASARAWPKMHTVNGYVNRSLPGLIGCHRKSVYWHVIGMGTTPEVHSIFLEGHTFLVRNHRQASLEISPITFLTAQTLLMDLGQFLLFCHISSHQHDGMEAYVKVDSCPEEPQLRMKNNEEAEDYDDDLTDSEMDVVRFDDDNSPSFIQIRSVASVAGAPGASPGTSSTGSPGSSPSASTGTGPGSSPSASTGTGPGTPGSGTASSSPGSSTPSGATGSPGSSPSASTGTGPGASPGTSSTGSPGTPGSGTASSSPGSSTPSGATGSPGTPGSGTASSSPGASPGTSSTGSPGASPGTSSTGSPASSKKHPKTWVHYIAAEEEDWDYAPLVLAPDDRSYKSQYLNNGPQRIGRKYKKVRFMAYTDETFKTREAIQHESGILGPLLYGEVGDTLLIIFKNQASRPYNIYPHGITDVRPLYSRRLPKGVKHLKDFPILPGEIFKYKWTVTVEDGPTKSDPRCLTRYYSSFVNMERDLASGLIGPLLICYKESVDQRGNQIMSDKRNVILFSVFDENRSWYLTENIQRFLPNPAGVQLEDPEFQASNIMHSINGYVFDSLQLSVCLHEVAYWYILSIGAQTDFLSVFFSGYTFKHKMVYEDTLTLFPFSGETVFMSMENPGLWILGCHNSDFRNRGMTALLKVSSCDKNTGDYYEDSYEDISAYLLSKNNAIEPRSFSQNPPVLKRHQREITRTTLQSDQEEIDYDDTISVEMKKEDFDIYDEDENQSPRSFQKKTRHYFIAAVERLWDYGMSSSPHVLRNRAQSGSVPQFKKVVFQEFTDGSFTQPLYRGELNEHLGLLGPYIRAEVEDNIMVTFRNQASRPYSFYSSLISYEEDQRQGAEPRKNFVKPNETKTYFWKVQHHMAPTKDEFDCKAWAYFSDVDLEKDVHSGLIGPLLVCHTNTLNPAHGRQVTVQEFALFFTIFDETKSWYFTENMERNCRAPCNIQMEDPTFKENYRFHAINGYIMDTLPGLVMAQDQRIRWYLLSMGSNENIHSIHFSGHVFTVRKKEEYKMALYNLYPGVFETVEMLPSKAGIWRVECLIGEHLHAGMSTLFLVYSNKCQTPLGMASGHIRDFQITASGQYGQWAPKLARLHYSGSINAWSTKEPFSWIKVDLLAPMIIHGIKTQGARQKFSSLYISQFIIMYSLDGKKWQTYRGNSTGTLMVFFGNVDSSGIKHNIFNPPIIARYIRLHPTHYSIRSTLRMELMGCDLNSCSMPLGMESKAISDAQITASSYFTNMFATWSPSKARLHLQGRSNAWRPQVNNPKEWLQVDFQKTMKVTGVTTQGVKSLLTSMYVKEFLISSSQDGHQWTLFFQNGKVKVFQGNQDSFTPVVNSLDPPLLTRYLRIHPQSWVHQIALRMEVLGCEAQDLYGAGSPGAETAEQKLISEEDLSPATGHHHHHH

SEQ ID NO: 796 - DNA, 4869 bp, synthetic construct
  misc_feature 1..4869: note = Description of Artificial Sequence: Synthetic polynucleotide
  source 1..4869: mol_type = other DNA
gccaccagaagatactacctgggtgcagtggaactgtcatgggactatatgcaaagtgatctcggtgagctgcctgtggacgcaagatttcctcctagagtgccaaaatcttttccattcaacacctcagtcgtgtacaaaaagactctgtttgtagaattcacggatcaccttttcaacatcgctaagccaaggccaccctggatgggtctgctaggtcctaccatccaggctgaggtttatgatacagtggtcattacacttaagaacatggcttcccatcctgtcagtcttcatgctgttggtgtatcctactggaaagcttctgagggagctgaatatgatgatcagaccagtcaaagggagaaagaagatgataaagtcttccctggtggaagccatacatatgtctggcaggtcctgaaagagaatggtccaatggcctctgacccactgtgccttacctactcatatctttctcatgtggacctggtaaaagacttgaattcaggcctcattggagccctactagtatgtagagaagggagtctggccaaggaaaagacacagaccttgcacaaatttatactactttttgctgtatttgatgaagggaaaagttggcactcagaaacaaagaactccttgatgcaggatagggatgctgcatctgctcgggcctggcctaaaatgcacacagtcaatggttatgtaaacaggtctctgccaggtctgattggatgccacaggaaatcagtctattggcatgtgattggaatgggcaccactcctgaagtgcactcaatattcctcgaaggtcacacatttcttgtgaggaaccatcgccaggctagcttggaaatctcgccaataactttccttactgctcaaacactcttgatggaccttggacagtttctactgttttgtcatatctcttcccaccaacatgatggcatggaagcttatgtcaaagtagacagctgtccagaggaaccccaactacgaatgaaaaataatgaagaagcggaagactatgatgatgatcttactgattctgaaatggatgtggtcaggtttgatgatgacaactctccttcctttatccaaattcgctcagttgcctctgtagcaggcgcgccaggtgcctcgccgggaacatcatcaactggttcacccgggtcatccccctcggcctcaaccgggacgggtcccggctcatcccccagcgccagcactggaacaggtcctggcactcctggttccggtacggcatcgtcatccccgggaagctcaacaccgtccggagcgacaggatcacctggctcgtcaccttcggcgtcaactggaacggggccaggggcctcacccggaacgtcctcgactgggtcgcctggtacgccgggatcaggaacggcctcatcctcgcctgggtcctcaacgccctcgggtgcgactggttcgccgggaactcctggctcggggacggcctcgtcgtcgcctggggcatcaccggggacgagctccacggggtcccctggagcgtcaccggggacctcctcgacaggtagcccggcctcgagcaagaagcatcctaaaacttgggtacattacattgctgctgaagaggaggactgggactatgctcccttagtcctcgcccccgatgacagaagttataaaagtcaatatttgaacaatggccctcagcggattggtaggaagtacaaaaaagtccgatttatggcatacacagatgaaacctttaagactcgtgaagctattcagcatgaatcaggaatcttgggacctttactttatggggaagttggagacacactgttgattatatttaagaatcaagcaagcagaccatataacatctaccctcacggaatcactgatgtccgtcctttgtattcaaggagattaccaaaaggtgtaaaacatttgaaggattttccaattctgccaggagaaatattcaaatataaatggacagtgactgtagaagatgggccaactaaatcagatcctcggtgcctgacccgctattactctagtttcgttaatatggagagagatctagcttcaggactcattggccctctcctcatctgctacaaagaatctgtagatcaaagaggaaaccagataatgtcagacaagaggaatgtcatcctgttttctgtatttgatgagaaccgaagctggtacctcacagagaatatacaacgctttctccccaatccagctggagtgcagcttgaggatccagagttccaagcctccaacatcatgcacagcatcaatggctatgtttttgatagtttgcagttgtcagtttgtttgcatgaggtggcatactggtacattctaagcattggagcacagactgacttcctttctgtcttcttctctggatataccttcaaacacaaaatggtctatgaagacacactcaccctattcccattctcaggagaaactgtcttcatgtcgatggaaaacccaggtctatggattctggggtgccacaactcagactttcggaacagaggcatgaccgccttactgaaggtttctagttgtgacaagaacactggtgattattacgaggacagttatgaagatatttcagcatacttgctgagtaaaaacaatgccattgaaccaagaagcttctctcaaaacccaccagtcttgaaacgccatcaacgggaaataactcgtactactcttcagtcagatcaagaggaaatcgattatgatgataccatatcagttgaaatgaagaaggaagattttgacatttatgatgaggatgaaaatcagagcccccgcagctttcaaaagaaaacacgacactattttattgctgcagtggagaggctctgggattatgggatgagtagctccccacatgttctaagaaacagggctcagagtggcagtgtccctcagttcaagaaagttgttttccaggaatttactgatggctcctttactcagcccttataccgtggagaactaaatgaacatttgggactcctggggccatatataagagcagaagttgaagataatatcatggtaactttcagaaatcaggcctctcgtccctattccttctattctagccttatttcttatgaggaagatcagaggcaaggagcagaacctagaaaaaactttgtcaagcctaatgaaaccaaaacttacttttggaaagtgcaacatcatatggcacccactaaagatgagtttgactgcaaagcctgggcttatttctctgatgttgacctggaaaaagatgtgcactcaggcctgattggaccccttctggtctgccacactaacacactgaaccctgctcatgggagacaagtgacagtacaggaatttgctctgtttttcaccatctttgatgagaccaaaagctggtacttcactgaaaatatggaaagaaactgcagggctccctgcaatatccagatggaagatcccacttttaaagagaattatcgcttccatgcaatcaatggctacataatggatacactacctggcttagtaatggctcaggatcaaaggattcgatggtatctgctcagcatgggcagcaatgaaaacatccattctattcatttcagtggacatgtgttcactgtacgaaaaaaagaggagtataaaatggcactgtacaatctctatccaggtgtttttgagacagtggaaatgttaccatccaaagctggaatttggcgggtggaatgccttattggcgagcatctacatgctgggatgagcacactttttctggtgtacagcaataagtgtcagactcccctgggaatggcttctggacacattagagattttcagattacagcttcaggacaatatggacagtgggccccaaagctggccagacttcattattccggatcaatcaatgcctggagcaccaaggagcccttttcttggatcaaggtggatctgttggcaccaatgattattcacggcatcaagacccagggtgcccgtcagaagttctccagcctctacatctctcagtttatcatcatgtatagtcttgatgggaagaagtggcagacttatcgaggaaattccactggaaccttaatggtcttctttggcaatgtggattcatctgggataaaacacaatatttttaaccctccaattattgctcgatacatccgtttgcacccaactcattatagcattcgcagcactcttcgcatggagttgatgggctgtgatttaaatagttgcagcatgccattgggaatggagagtaaagcaatatcagatgcacagattactgcttcatcctactttaccaatatgtttgccacctggtctccttcaaaagctcgacttcacctccaagggaggagtaatgcctggagacctcaggtgaataatccaaaagagtggctgcaagtggacttccagaagacaatgaaagtcacaggagtaactactcagggagtaaaatctctgcttaccagcatgtatgtgaaggagttcctcatctccagcagtcaagatggccatcagtggactctcttttttcagaatggcaaagtaaaggtttttcagggaaatcaagactccttcacacctgtggtgaactctctagacccaccgttactgactcgctaccttcgaattcacccccagagttgggtgcaccagattgccctgaggatggaggttctgggctgcgaggcacaggacctctacggcgccggatcacctggggccgaaacggccgaacaaaaactcatctcagaagaggatctgtcacctgcaaccggtcatcatcaccatcaccattga

SEQ ID NO: 797 - protein, 1619 aa, synthetic construct
  REGION 1..1619: note = Description of Artificial Sequence: Synthetic polypeptide
ATRRYYLGAVELSWDYMQSDLGELPVDARFPPRVPKSFPFNTSVVYKKTLFVEFTDHLFNIAKPRPPWMGLLGPTIQAEVYDTVVITLKNMASHPVSLHAVGVSYWKASEGAEYDDQTSQREKEDDKVFPGGSHTYVWQVLKENGPMASDPLCLTYSYLSHVDLVKDLNSGLIGALLVCREGSLAKEKTQTLHKFILLFAVFDEGKSWHSETKNSLMQDRDAASARAWPKMHTVNGYVNRSLPGLIGCHRKSVYWHVIGMGTTPEVHSIFLEGHTFLVRNHRQASLEISPITFLTAQTLLMDLGQFLLFCHISSHQHDGMEAYVKVDSCPEEPQLRMKNNEEAEDYDDDLTDSEMDVVRFDDDNSPSFIQIRSVAKKHPKTWVHYIAAEEEDWDYAPLVLAPDDRSYKSQYLNNGPQRIGRKYKKVRFMAYTDETFKTREAIGAPTSTEPSEGSAPGSPAGSPTSTEEGTSTEPSEGSAPGTSTEPSEGSAPGTSESATPESGPGTSTEPSEGSAPGTSESATPESGPGSEPATSGSETPGTSTEPSEGSAPGTSTEPSEGSAPGTSESATPESGPGTSESATPESGPGASSQHESGILGPLLYGEVGDTLLIIFKNQASRPYNIYPHGITDVRPLYSRRLPKGVKHLKDFPILPGEIFKYKWTVTVEDGPTKSDPRCLTRYYSSFVNMERDLASGLIGPLLICYKESVDQRGNQIMSDKRNVILFSVFDENRSWYLTENIQRFLPNPAGVQLEDPEFQASNIMHSINGYVFDSLQLSVCLHEVAYWYILSIGAQTDFLSVFFSGYTFKHKMVYEDTLTLFPFSGETVFMSMENPGLWILGCHNSDFRNRGMTALLKVSSCDKNTGDYYEDSYEDISAYLLSKNNAIEPRSFSQNPPVLKRHQREITRTTLQSDQEEIDYDDTISVEMKKEDFDIYDEDENQSPRSFQKKTRHYFIAAVERLWDYGMSSSPHVLRNRAQSGSVPQFKKVVFQEFTDGSFTQPLYRGELNEHLGLLGPYIRAEVEDNIMVTFRNQASRPYSFYSSLISYEEDQRQGAEPRKNFVKPNETKTYFWKVQHHMAPTKDEFDCKAWAYFSDVDLEKDVHSGLIGPLLVCHTNTLNPAHGRQVTVQEFALFFTIFDETKSWYFTENMERNCRAPCNIQMEDPTFKENYRFHAINGYIMDTLPGLVMAQDQRIRWYLLSMGSNENIHSIHFSGHVFTVRKKEEYKMALYNLYPGVFETVEMLPSKAGIWRVECLIGEHLHAGMSTLFLVYSNKCQTPLGMASGHIRDFQITASGQYGQWAPKLARLHYSGSINAWSTKEPFSWIKVDLLAPMIIHGIKTQGARQKFSSLYISQFIIMYSLDGKKWQTYRGNSTGTLMVFFGNVDSSGIKHNIFNPPIIARYIRLHPTHYSIRSTLRMELMGCDLNSCSMPLGMESKAISDAQITASSYFTNMFATWSPSKARLHLQGRSNAWRPQVNNPKEWLQVDFQKTMKVTGVTTQGVKSLLTSMYVKEFLISSSQDGHQWTLFFQNGKVKVFQGNQDSFTPVVNSLDPPLLTRYLRIHPQSWVHQIALRMEVLGCEAQDLYGAGSPGAETAEQKLISEEDLSPATGHHHHHH

SEQ ID NO: 798 - DNA, 4860 bp, synthetic construct
  misc_feature 1..4860: note = Description of Artificial Sequence: Synthetic polynucleotide
  source 1..4860: mol_type = other DNA
gccaccagaagatactacctgggtgcagtggaactgtcatgggactatatgcaaagtgatctcggtgagctgcctgtggacgcaagatttcctcctagagtgccaaaatcttttccattcaacacctcagtcgtgtacaaaaagactctgtttgtagaattcacggatcaccttttcaacatcgctaagccaaggccaccctggatgggtctgctaggtcctaccatccaggctgaggtttatgatacagtggtcattacacttaagaacatggcttcccatcctgtcagtcttcatgctgttggtgtatcctactggaaagcttctgagggagctgaatatgatgatcagaccagtcaaagggagaaagaagatgataaagtcttccctggtggaagccatacatatgtctggcaggtcctgaaagagaatggtccaatggcctctgacccactgtgccttacctactcatatctttctcatgtggacctggtaaaagacttgaattcaggcctcattggagccctactagtatgtagagaagggagtctggccaaggaaaagacacagaccttgcacaaatttatactactttttgctgtatttgatgaagggaaaagttggcactcagaaacaaagaactccttgatgcaggatagggatgctgcatctgctcgggcctggcctaaaatgcacacagtcaatggttatgtaaacaggtctctgccaggtctgattggatgccacaggaaatcagtctattggcatgtgattggaatgggcaccactcctgaagtgcactcaatattcctcgaaggtcacacatttcttgtgaggaaccatcgccaggctagcttggaaatctcgccaataactttccttactgctcaaacactcttgatggaccttggacagtttctactgttttgtcatatctcttcccaccaacatgatggcatggaagcttatgtcaaagtagacagctgtccagaggaaccccaactacgaatgaaaaataatgaagaagcggaagactatgatgatgatcttactgattctgaaatggatgtggtcaggtttgatgatgacaactctccttcctttatccaaattcgctcagttgccaagaagcatcctaaaacttgggtacattacattgctgctgaagaggaggactgggactatgctcccttagtcctcgcccccgatgacagaagttataaaagtcaatatttgaacaatggccctcagcggattggtaggaagtacaaaaaagtccgatttatggcatacacagatgaaacctttaagactcgtgaagctattggcgcgccaaccagtacggagccgtccgaggggagcgcaccaggaagcccggctgggagcccgacttctaccgaagagggtacatctaccgaaccaagtgaaggttcagcaccaggcacctcaacagaaccctctgagggctcggcgcctggtacaagtgagtccgccaccccagaatccgggcctgggacaagcacagaaccttcggaagggagtgcccctggaacatccgaatcggcaaccccagaatcagggccaggatctgagcccgcgacttcgggctccgagacgcctgggacatccaccgagccctccgaaggatcagccccaggcaccagcacggagccctctgagggaagcgcacctggtaccagcgaaagcgcaactcccgaatcaggtcccggtacgagcgagtcggcgaccccggagagcgggccaggtgcctcgagccagcatgaatcaggaatcttgggacctttactttatggggaagttggagacacactgttgattatatttaagaatcaagcaagcagaccatataacatctaccctcacggaatcactgatgtccgtcctttgtattcaaggagattaccaaaaggtgtaaaacatttgaaggattttccaattctgccaggagaaatattcaaatataaatggacagtgactgtagaagatgggccaactaaatcagatcctcggtgcctgacccgctattactctagtttcgttaatatggagagagatctagcttcaggactcattggccctctcctcatctgctacaaagaatctgtagatcaaagaggaaaccagataatgtcagacaagaggaatgtcatcctgttttctgtatttgatgagaaccgaagctggtacctcacagagaatatacaacgctttctccccaatccagctggagtgcagcttgaggatccagagttccaagcctccaacatcatgcacagcatcaatggctatgtttttgatagtttgcagttgtcagtttgtttgcatgaggtggcatactggtacattctaagcattggagcacagactgacttcctttctgtcttcttctctggatataccttcaaacacaaaatggtctatgaagacacactcaccctattcccattctcaggagaaactgtcttcatgtcgatggaaaacccaggtctatggattctggggtgccacaactcagactttcggaacagaggcatgaccgccttactgaaggtttctagttgtgacaagaacactggtgattattacgaggacagttatgaagatatttcagcatacttgctgagtaaaaacaatgccattgaaccaagaagcttctctcaaaacccaccagtcttgaaacgccatcaacgggaaataactcgtactactcttcagtcagatcaagaggaaatcgattatgatgataccatatcagttgaaatgaagaaggaagattttgacatttatgatgaggatgaaaatcagagcccccgcagctttcaaaagaaaacacgacactattttattgctgcagtggagaggctctgggattatgggatgagtagctccccacatgttctaagaaacagggctcagagtggcagtgtccctcagttcaagaaagttgttttccaggaatttactgatggctcctttactcagcccttataccgtggagaactaaatgaacatttgggactcctggggccatatataagagcagaagttgaagataatatcatggtaactttcagaaatcaggcctctcgtccctattccttctattctagccttatttcttatgaggaagatcagaggcaaggagcagaacctagaaaaaactttgtcaagcctaatgaaaccaaaacttacttttggaaagtgcaacatcatatggcacccactaaagatgagtttgactgcaaagcctgggcttatttctctgatgttgacctggaaaaagatgtgcactcaggcctgattggaccccttctggtctgccacactaacacactgaaccctgctcatgggagacaagtgacagtacaggaatttgctctgtttttcaccatctttgatgagaccaaaagctggtacttcactgaaaatatggaaagaaactgcagggctccctgcaatatccagatggaagatcccacttttaaagagaattatcgcttccatgcaatcaatggctacataatggatacactacctggcttagtaatggctcaggatcaaaggattcgatggtatctgctcagcatgggcagcaatgaaaacatccattctattcatttcagtggacatgtgttcactgtacgaaaaaaagaggagtataaaatggcactgtacaatctctatccaggtgtttttgagacagtggaaatgttaccatccaaagctggaatttggcgggtggaatgccttattggcgagcatctacatgctgggatgagcacactttttctggtgtacagcaataagtgtcagactcccctgggaatggcttctggacacattagagattttcagattacagcttcaggacaatatggacagtgggccccaaagctggccagacttcattattccggatcaatcaatgcctggagcaccaaggagcccttttcttggatcaaggtggatctgttggcaccaatgattattcacggcatcaagacccagggtgcccgtcagaagttctccagcctctacatctctcagtttatcatcatgtatagtcttgatgggaagaagtggcagacttatcgaggaaattccactggaaccttaatggtcttctttggcaatgtggattcatctgggataaaacacaatatttttaaccctccaattattgctcgatacatccgtttgcacccaactcattatagcattcgcagcactcttcgcatggagttgatgggctgtgatttaaatagttgcagcatgccattgggaatggagagtaaagcaatatcagatgcacagattactgcttcatcctactttaccaatatgtttgccacctggtctccttcaaaagctcgacttcacctccaagggaggagtaatgcctggagacctcaggtgaataatccaaaagagtggctgcaagtggacttccagaagacaatgaaagtcacaggagtaactactcagggagtaaaatctctgcttaccagcatgtatgtgaaggagttcctcatctccagcagtcaagatggccatcagtggactctcttttttcagaatggcaaagtaaaggtttttcagggaaatcaagactccttcacacctgtggtgaactctctagacccaccgttactgactcgctaccttcgaattcacccccagagttgggtgcaccagattgccctgaggatggaggttctgggctgcgaggcacaggacctctacggcgccggatcacctggggccgaaacggccgaacaaaaactcatctcagaagaggatctgtcacctgcaaccggtcatcatcaccatcaccattga

SEQ ID NO: 799 - protein, 1619 aa, synthetic construct
  REGION 1..1619: note = Description of Artificial Sequence: Synthetic polypeptide
ATRRYYLGAVELSWDYMQSDLGELPVDARFPPRVPKSFPFNTSVVYKKTLFVEFTDHLFNIAKPRPPWMGLLGPTIQAEVYDTVVITLKNMASHPVSLHAVGVSYWKASEGAEYDDQTSQREKEDDKVFPGGSHTYVWQVLKENGPMASDPLCLTYSYLSHVDLVKDLNSGLIGALLVCREGSLAKEKTQTLHKFILLFAVFDEGKSWHSETKNSLMQDRDAASARAWPKMHTVNGYVNRSLPGLIGCHRKSVYWHVIGMGTTPEVHSIFLEGHTFLVRNHRQASLEISPITFLTAQTLLMDLGQFLLFCHISSHQHDGMEAYVKVDSCPEEPQLRMKNNEEAEDYDDDLTDSEMDVVRFDDDNSPSFIQIRSVAKKHPKTWVHYIAAEEEDWDYAPLVLAPDDRSYKSQYLNNGPQRIGRKYKKVRFMAYTDETFKTREAIGAPGASPGTSSTGSPGSSPSASTGTGPGSSPSASTGTGPGTPGSGTASSSPGSSTPSGATGSPGSSPSASTGTGPGASPGTSSTGSPGTPGSGTASSSPGSSTPSGATGSPGTPGSGTASSSPGASPGTSSTGSPGASPGTSSTGSPASSQHESGILGPLLYGEVGDTLLIIFKNQASRPYNIYPHGITDVRPLYSRRLPKGVKHLKDFPILPGEIFKYKWTVTVEDGPTKSDPRCLTRYYSSFVNMERDLASGLIGPLLICYKESVDQRGNQIMSDKRNVILFSVFDENRSWYLTENIQRFLPNPAGVQLEDPEFQASNIMHSINGYVFDSLQLSVCLHEVAYWYILSIGAQTDFLSVFFSGYTFKHKMVYEDTLTLFPFSGETVFMSMENPGLWILGCHNSDFRNRGMTALLKVSSCDKNTGDYYEDSYEDISAYLLSKNNAIEPRSFSQNPPVLKRHQREITRTTLQSDQEEIDYDDTISVEMKKEDFDIYDEDENQSPRSFQKKTRHYFIAAVERLWDYGMSSSPHVLRNRAQSGSVPQFKKVVFQEFTDGSFTQPLYRGELNEHLGLLGPYIRAEVEDNIMVTFRNQASRPYSFYSSLISYEEDQRQGAEPRKNFVKPNETKTYFWKVQHHMAPTKDEFDCKAWAYFSDVDLEKDVHSGLIGPLLVCHTNTLNPAHGRQVTVQEFALFFTIFDETKSWYFTENMERNCRAPCNIQMEDPTFKENYRFHAINGYIMDTLPGLVMAQDQRIRWYLLSMGSNENIHSIHFSGHVFTVRKKEEYKMALYNLYPGVFETVEMLPSKAGIWRVECLIGEHLHAGMSTLFLVYSNKCQTPLGMASGHIRDFQITASGQYGQWAPKLARLHYSGSINAWSTKEPFSWIKVDLLAPMIIHGIKTQGARQKFSSLYISQFIIMYSLDGKKWQTYRGNSTGTLMVFFGNVDSSGIKHNIFNPPIIARYIRLHPTHYSIRSTLRMELMGCDLNSCSMPLGMESKAISDAQITASSYFTNMFATWSPSKARLHLQGRSNAWRPQVNNPKEWLQVDFQKTMKVTGVTTQGVKSLLTSMYVKEFLISSSQDGHQWTLFFQNGKVKVFQGNQDSFTPVVNSLDPPLLTRYLRIHPQSWVHQIALRMEVLGCEAQDLYGAGSPGAETAEQKLISEEDLSPATGHHHHHH

SEQ ID NO: 800 - DNA, 4860 bp, synthetic construct
  misc_feature 1..4860: note = Description of Artificial Sequence: Synthetic polynucleotide
  source 1..4860: mol_type = other DNA
gccaccagaagatactacctgggtgcagtggaactgtcatgggactatatgcaaagtgatctcggtgagctgcctgtggacgcaagatttcctcctagagtgccaaaatcttttccattcaacacctcagtcgtgtacaaaaagactctgtttgtagaattcacggatcaccttttcaacatcgctaagccaaggccaccctggatgggtctgctaggtcctaccatccaggctgaggtttatgatacagtggtcattacacttaagaacatggcttcccatcctgtcagtcttcatgctgttggtgtatcctactggaaagcttctgagggagctgaatatgatgatcagaccagtcaaagggagaaagaagatgataaagtcttccctggtggaagccatacatatgtctggcaggtcctgaaagagaatggtccaatggcctctgacccactgtgccttacctactcatatctttctcatgtggacctggtaaaagacttgaattcaggcctcattggagccctactagtatgtagagaagggagtctggccaaggaaaagacacagaccttgcacaaatttatactactttttgctgtatttgatgaagggaaaagttggcactcagaaacaaagaactccttgatgcaggatagggatgctgcatctgctcgggcctggcctaaaatgcacacagtcaatggttatgtaaacaggtctctgccaggtctgattggatgccacaggaaatcagtctattggcatgtgattggaatgggcaccactcctgaagtgcactcaatattcctcgaaggtcacacatttcttgtgaggaaccatcgccaggctagcttggaaatctcgccaataactttccttactgctcaaacactcttgatggaccttggacagtttctactgttttgtcatatctcttcccaccaacatgatggcatggaagcttatgtcaaagtagacagctgtccagaggaaccccaactacgaatgaaaaataatgaagaagcggaagactatgatgatgatcttactgattctgaaatggatgtggtcaggtttgatgatgacaactctccttcctttatccaaattcgctcagttgccaagaagcatcctaaaacttgggtacattacattgctgctgaagaggaggactgggactatgctcccttagtcctcgcccccgatgacagaagttataaaagtcaatatttgaacaatggccctcagcggattggtaggaagtacaaaaaagtccgatttatggcatacacagatgaaacctttaagactcgtgaagctattggcgcgccaggtgcctcgccgggaacatcatcaactggttcacccgggtcatccccctcggcctcaaccgggacgggtcccggctcatcccccagcgccagcactggaacaggtcctggcactcctggttccggtacggcatcgtcatccccgggaagctcaacaccgtccggagcgacaggatcacctggctcgtcaccttcggcgtcaactggaacggggccaggggcctcacccggaacgtcctcgactgggtcgcctggtacgccgggatcaggaacggcctcatcctcgcctgggtcctcaacgccctcgggtgcgactggttcgccgggaactcctggctcggggacggcctcgtcgtcgcctggggcatcaccggggacgagctccacggggtcccctggagcgtcaccggggacctcctcgacaggtagcccggcctcgagccagcatgaatcaggaatcttgggacctttactttatggggaagttggagacacactgttgattatatttaagaatcaagcaagcagaccatataacatctaccctcacggaatcactgatgtccgtcctttgtattcaaggagattaccaaaaggtgtaaaacatttgaaggattttccaattctgccaggagaaatattcaaatataaatggacagtgactgtagaagatgggccaactaaatcagatcctcggtgcctgacccgctattactctagtttcgttaatatggagagagatctagcttcaggactcattggccctctcctcatctgctacaaagaatctgtagatcaaagaggaaaccagataatgtcagacaagaggaatgtcatcctgttttctgtatttgatgagaaccgaagctggtacctcacagagaatatacaacgctttctccccaatccagctggagtgcagcttgaggatccagagttccaagcctccaacatcatgcacagcatcaatggctatgtttttgatagtttgcagttgtcagtttgtttgcatgaggtggcatactggtacattctaagcattggagcacagactgacttcctttctgtcttcttctctggatataccttcaaacacaaaatggtctatgaagacacactcaccctattcccattctcaggagaaactgtcttcatgtcgatggaaaacccaggtctatggattctggggtgccacaactcagactttcggaacagaggcatgaccgccttactgaaggtttctagttgtgacaagaacactggtgattattacgaggacagttatgaagatatttcagcatacttgctgagtaaaaacaatgccattgaaccaagaagcttctctcaaaacccaccagtcttgaaacgccatcaacgggaaataactcgtactactcttcagtcagatcaagaggaaatcgattatgatgataccatatcagttgaaatgaagaaggaagattttgacatttatgatgaggatgaaaatcagagcccccgcagctttcaaaagaaaacacgacactattttattgctgcagtggagaggctctgggattatgggatgagtagctccccacatgttctaagaaacagggctcagagtggcagtgtccctcagttcaagaaagttgttttccaggaatttactgatggctcctttactcagcccttataccgtggagaactaaatgaacatttgggactcctggggccatatataagagcagaagttgaagataatatcatggtaactttcagaaatcaggcctctcgtccctattccttctattctagccttatttcttatgaggaagatcagaggcaaggagcagaacctagaaaaaactttgtcaagcctaatgaaaccaaaacttacttttggaaagtgcaacatcatatggcacccactaaagatgagtttgactgcaaagcctgggcttatttctctgatgttgacctggaaaaagatgtgcactcaggcctgattggaccccttctggtctgccacactaacacactgaaccctgctcatgggagacaagtgacagtacaggaatttgctctgtttttcaccatctttgatgagaccaaaagctggtacttcactgaaaatatggaaagaaactgcagggctccctgcaatatccagatggaagatcccacttttaaagagaattatcgcttccatgcaatcaatggctacataatggatacactacctggcttagtaatggctcaggatcaaaggattcgatggtatctgctcagcatgggcagcaatgaaaacatccattctattcatttcagtggacatgtgttcactgtacgaaaaaaagaggagtataaaatggcactgtacaatctctatccaggtgtttttgagacagtggaaatgttaccatccaaagctggaatttggcgggtggaatgccttattggcgagcatctacatgctgggatgagcacactttttctggtgtacagcaataagtgtcagactcccctgggaatggcttctggacacattagagattttcagattacagcttcaggacaatatggacagtgggccccaaagctggccagacttcattattccggatcaatcaatgcctggagcaccaaggagcccttttcttggatcaaggtggatctgttggcaccaatgattattcacggcatcaagacccagggtgcccgtcagaagttctccagcctctacatctctcagtttatcatcatgtatagtcttgatgggaagaagtggcagacttatcgaggaaattccactggaaccttaatggtcttctttggcaatgtggattcatctgggataaaacacaatatttttaaccctccaattattgctcgatacatccgtttgcacccaactcattatagcattcgcagcactcttcgcatggagttgatgggctgtgatttaaatagttgcagcatgccattgggaatggagagtaaagcaatatcagatgcacagattactgcttcatcctactttaccaatatgtttgccacctggtctccttcaaaagctcgacttcacctccaagggaggagtaatgcctggagacctcaggtgaataatccaaaagagtggctgcaagtggacttccagaagacaatgaaagtcacaggagtaactactcagggagtaaaatctctgcttaccagcatgtatgtgaaggagttcctcatctccagcagtcaagatggccatcagtggactctcttttttcagaatggcaaagtaaaggtttttcagggaaatcaagactccttcacacctgtggtgaactctctagacccaccgttactgactcgctaccttcgaattcacccccagagttgggtgcaccagattgccctgaggatggaggttctgggctgcgaggcacaggacctctacggcgccggatcacctggggccgaaacggccgaacaaaaactcatctcagaagaggatctgtcacctgcaaccggtcatcatcaccatcaccattga

SEQ ID NO: 801 - protein, 1619 aa, synthetic construct
  REGION 1..1619: note = Description of Artificial Sequence: Synthetic polypeptide
ATRRYYLGAVELSWDYMQSDLGELPVDARFPPRVPKSFPFNTSVVYKKTLFVEFTDHLFNIAKPRPPWMGLLGPTIQAEVYDTVVITLKNMASHPVSLHAVGVSYWKASEGAEYDDQTSQREKEDDKVFPGGSHTYVWQVLKENGPMASDPLCLTYSYLSHVDLVKDLNSGLIGALLVCREGSLAKEKTQTLHKFILLFAVFDEGKSWHSETKNSLMQDRDAASARAWPKMHTVNGYVNRSLPGLIGCHRKSVYWHVIGMGTTPEVHSIFLEGHTFLVRNHRQASLEISPITFLTAQTLLMDLGQFLLFCHISSHQHDGMEAYVKVDSCPEEPQLRMKNNEEAEDYDDDLTDSEMDVVRFDDDNSPSFIQIRSVAKKHPKTWVHYIAAEEEDWDYAPLVLAPDDRSYKSQYLNNGPQRIGRKYKKVRFMAYTDETFKTREAIQHESGILGPLLYGEVGDTLLIIFKNQASRPYNIYPHGITDVRPLYSRRLPKGVKHLKDFPILPGEIFKYKWTVTVEDGPTKSDPRCLTRYYSSFVNMERDLASGLIGPLLICYKESVDQRGNQIMSDKRNVILFSVFDENRSWYLTENIQRFLPNPAGVQLEDPEFQASNIMHSINGYVFDSLQLSVCLHEVAYWYILSIGAQTDFLSVFFSGYTFKHKMVYEDTLTLFPFSGETVFMSMENPGLWILGCHNSDFRNRGMTALLKVSSCDKNTGDYYEDSYEDISAYLLSKNNAIEPRSFSQNPPVLKRHQREITRTTLQSDQEEIDYDDTISVEMKKEDFDIYDEDENQSPRSFQKKTRHYFIAAVERLWDYGMSSSPHVLRNRAQSGSVPQFKKVVFQEFTDGSFTQPLYRGELNEHLGLLGPYIRAEVEDNIMVTFRNQASRPYSFYSSLISYEEDQGAPTSESATPESGPGSEPATSGSETPGTSESATPESGPGSEPATSGSETPGTSESATPESGPGTSTEPSEGSAPGTSESATPESGPGSPAGSPTSTEEGSPAGSPTSTEEGSPAGSPTSTEEGTSESATPESGPGTSTEPSEGSAPGASSRQGAEPRKNFVKPNETKTYFWKVQHHMAPTKDEFDCKAWAYFSDVDLEKDVHSGLIGPLLVCHTNTLNPAHGRQVTVQEFALFFTIFDETKSWYFTENMERNCRAPCNIQMEDPTFKENYRFHAINGYIMDTLPGLVMAQDQRIRWYLLSMGSNENIHSIHFSGHVFTVRKKEEYKMALYNLYPGVFETVEMLPSKAGIWRVECLIGEHLHAGMSTLFLVYSNKCQTPLGMASGHIRDFQITASGQYGQWAPKLARLHYSGSINAWSTKEPFSWIKVDLLAPMIIHGIKTQGARQKFSSLYISQFIIMYSLDGKKWQTYRGNSTGTLMVFFGNVDSSGIKHNIFNPPIIARYIRLHPTHYSIRSTLRMELMGCDLNSCSMPLGMESKAISDAQITASSYFTNMFATWSPSKARLHLQGRSNAWRPQVNNPKEWLQVDFQKTMKVTGVTTQGVKSLLTSMYVKEFLISSSQDGHQWTLFFQNGKVKVFQGNQDSFTPVVNSLDPPLLTRYLRIHPQSWVHQIALRMEVLGCEAQDLYGAGSPGAETAEQKLISEEDLSPATGHHHHHH

SEQ ID NO: 802 - DNA, 4860 bp, synthetic construct
  misc_feature 1..4860: note = Description of Artificial Sequence: Synthetic polynucleotide
  source 1..4860: mol_type = other DNA
gccaccagaagatactacctgggtgcagtggaactgtcatgggactatatgcaaagtgatctcggtgagctgcctgtggacgcaagatttcctcctagagtgccaaaatcttttccattcaacacctcagtcgtgtacaaaaagactctgtttgtagaattcacggatcaccttttcaacatcgctaagccaaggccaccctggatgggtctgctaggtcctaccatccaggctgaggtttatgatacagtggtcattacacttaagaacatggcttcccatcctgtcagtcttcatgctgttggtgtatcctactggaaagcttctgagggagctgaatatgatgatcagaccagtcaaagggagaaagaagatgataaagtcttccctggtggaagccatacatatgtctggcaggtcctgaaagagaatggtccaatggcctctgacccactgtgccttacctactcatatctttctcatgtggacctggtaaaagacttgaattcaggcctcattggagccctactagtatgtagagaagggagtctggccaaggaaaagacacagaccttgcacaaatttatactactttttgctgtatttgatgaagggaaaagttggcactcagaaacaaagaactccttgatgcaggatagggatgctgcatctgctcgggcctggcctaaaatgcacacagtcaatggttatgtaaacaggtctctgccaggtctgattggatgccacaggaaatcagtctattggcatgtgattggaatgggcaccactcctgaagtgcactcaatattcctcgaaggtcacacatttcttgtgaggaaccatcgccaggctagcttggaaatctcgccaataactttccttactgctcaaacactcttgatggaccttggacagtttctactgttttgtcatatctcttcccaccaacatgatggcatggaagcttatgtcaaagtagacagctgtccagaggaaccccaactacgaatgaaaaataatgaagaagcggaagactatgatgatgatcttactgattctgaaatggatgtggtcaggtttgatgatgacaactctccttcctttatccaaattcgctcagttgccaagaagcatcctaaaacttgggtacattacattgctgctgaagaggaggactgggactatgctcccttagtcctcgcccccgatgacagaagttataaaagtcaatatttgaacaatggccctcagcggattggtaggaagtacaaaaaagtccgatttatggcatacacagatgaaacctttaagactcgtgaagctattcagcatgaatcaggaatcttgggacctttactttatggggaagttggagacacactgttgattatatttaagaatcaagcaagcagaccatataacatctaccctcacggaatcactgatgtccgtcctttgtattcaaggagattaccaaaaggtgtaaaacatttgaaggattttccaattctgccaggagaaatattcaaatataaatggacagtgactgtagaagatgggccaactaaatcagatcctcggtgcctgacccgctattactctagtttcgttaatatggagagagatctagcttcaggactcattggccctctcctcatctgctacaaagaatctgtagatcaaagaggaaaccagataatgtcagacaagaggaatgtcatcctgttttctgtatttgatgagaaccgaagctggtacctcacagagaatatacaacgctttctccccaatccagctggagtgcagcttgaggatccagagttccaagcctccaacatcatgcacagcatcaatggctatgtttttgatagtttgcagttgtcagtttgtttgcatgaggtggcatactggtacattctaagcattggagcacagactgacttcctttctgtcttcttctctggatataccttcaaacacaaaatggtctatgaagacacactcaccctattcccattctcaggagaaactgtcttcatgtcgatggaaaacccaggtctatggattctggggtgccacaactcagactttcggaacagaggcatgaccgccttactgaaggtttctagttgtgacaagaacactggtgattattacgaggacagttatgaagatatttcagcatacttgctgagtaaaaacaatgccattgaaccaagaagcttctctcaaaacccaccagtcttgaaacgccatcaacgggaaataactcgtactactcttcagtcagatcaagaggaaatcgattatgatgataccatatcagttgaaatgaagaaggaagattttgacatttatgatgaggatgaaaatcagagcccccgcagctttcaaaagaaaacacgacactattttattgctgcagtggagaggctctgggattatgggatgagtagctccccacatgttctaagaaacagggctcagagtggcagtgtccctcagttcaagaaagttgttttccaggaatttactgatggctcctttactcagcccttataccgtggagaactaaatgaacatttgggactcctggggccatatataagagcagaagttgaagataatatcatggtaactttcagaaatcaggcctctcgtccctattccttctattctagccttatttcttatgaggaagatcagggcgcgccaacgtccgaaagtgctacccctgagtcaggccctggtagtgagcctgccacaagcggaagcgaaactccggggacctcagagtctgccactcccgaatcggggccaggctctgaaccggccacttcagggagcgaaacaccaggaacatcggagagcgctaccccggagagcgggccaggaactagtactgagcctagcgagggaagtgcacctggtacaagcgagtccgccacacccgagtctggccctggctctccagcgggctcacccacgagcactgaagagggctctcccgctggcagcccaacgtcgacagaagaaggatcaccagcaggctcccccacatcaacagaggagggtacatcagaatctgctactcccgagagtggacccggtacctccactgagcccagcgaggggagtgcaccaggtgcctcgagcaggcaaggagcagaacctagaaaaaactttgtcaagcctaatgaaaccaaaacttacttttggaaagtgcaacatcatatggcacccactaaagatgagtttgactgcaaagcctgggcttatttctctgatgttgacctggaaaaagatgtgcactcaggcctgattggaccccttctggtctgccacactaacacactgaaccctgctcatgggagacaagtgacagtacaggaatttgctctgtttttcaccatctttgatgagaccaaaagctggtacttcactgaaaatatggaaagaaactgcagggctccctgcaatatccagatggaagatcccacttttaaagagaattatcgcttccatgcaatcaatggctacataatggatacactacctggcttagtaatggctcaggatcaaaggattcgatggtatctgctcagcatgggcagcaatgaaaacatccattctattcatttcagtggacatgtgttcactgtacgaaaaaaagaggagtataaaatggcactgtacaatctctatccaggtgtttttgagacagtggaaatgttaccatccaaagctggaatttggcgggtggaatgccttattggcgagcatctacatgctgggatgagcacactttttctggtgtacagcaataagtgtcagactcccctgggaatggcttctggacacattagagattttcagattacagcttcaggacaatatggacagtgggccccaaagctggccagacttcattattccggatcaatcaatgcctggagcaccaaggagcccttttcttggatcaaggtggatctgttggcaccaatgattattcacggcatcaagacccagggtgcccgtcagaagttctccagcctctacatctctcagtttatcatcatgtatagtcttgatgggaagaagtggcagacttatcgaggaaattccactggaaccttaatggtcttctttggcaatgtggattcatctgggataaaacacaatatttttaaccctccaattattgctcgatacatccgtttgcacccaactcattatagcattcgcagcactcttcgcatggagttgatgggctgtgatttaaatagttgcagcatgccattgggaatggagagtaaagcaatatcagatgcacagattactgcttcatcctactttaccaatatgtttgccacctggtctccttcaaaagctcgacttcacctccaagggaggagtaatgcctggagacctcaggtgaataatccaaaagagtggctgcaagtggacttccagaagacaatgaaagtcacaggagtaactactcagggagtaaaatctctgcttaccagcatgtatgtgaaggagttcctcatctccagcagtcaagatggccatcagtggactctcttttttcagaatggcaaagtaaaggtttttcagggaaatcaagactccttcacacctgtggtgaactctctagacccaccgttactgactcgctaccttcgaattcacccccagagttgggtgcaccagattgccctgaggatggaggttctgggctgcgaggcacaggacctctacggcgccggatcacctggggccgaaacggccgaacaaaaactcatctcagaagaggatctgtcacctgcaaccggtcatcatcaccatcaccattga

SEQ ID NO: 803 - protein, 1619 aa, synthetic construct
  REGION 1..1619: note = Description of Artificial Sequence: Synthetic polypeptide
ATRRYYLGAVELSWDYMQSDLGELPVDARFPPRVPKSFPFNTSVVYKKTLFVEFTDHLFNIAKPRPPWMGLLGPTIQAEVYDTVVITLKNMASHPVSLHAVGVSYWKASEGAEYDDQTSQREKEDDKVFPGGSHTYVWQVLKENGPMASDPLCLTYSYLSHVDLVKDLNSGLIGALLVCREGSLAKEKTQTLHKFILLFAVFDEGKSWHSETKNSLMQDRDAASARAWPKMHTVNGYVNRSLPGLIGCHRKSVYWHVIGMGTTPEVHSIFLEGHTFLVRNHRQASLEISPITFLTAQTLLMDLGQFLLFCHISSHQHDGMEAYVKVDSCPEEPQLRMKNNEEAEDYDDDLTDSEMDVVRFDDDNSPSFIQIRSVAKKHPKTWVHYIAAEEEDWDYAPLVLAPDDRSYKSQYLNNGPQRIGRKYKKVRFMAYTDETFKTREAIQHESGILGPLLYGEVGDTLLIIFKNQASRPYNIYPHGITDVRPLYSRRLPKGVKHLKDFPILPGEIFKYKWTVTVEDGPTKSDPRCLTRYYSSFVNMERDLASGLIGPLLICYKESVDQRGNQIMSDKRNVILFSVFDENRSWYLTENIQRFLPNPAGVQLEDPEFQASNIMHSINGYVFDSLQLSVCLHEVAYWYILSIGAQTDFLSVFFSGYTFKHKMVYEDTLTLFPFSGETVFMSMENPGLWILGCHNSDFRNRGMTALLKVSSCDKNTGDYYEDSYEDISAYLLSKNNAIEPRSFSQNPPVLKRHQREITRTTLQSDQEEIDYDDTISVEMKKEDFDIYDEDENQSPRSFQKKTRHYFIAAVERLWDYGMSSSPHVLRNRAQSGSVPQFKKVVFQEFTDGSFTQPLYRGELNEHLGLLGPYIRAEVEDNIMVTFRNQASRPYSFYSSLISYEEDQGAPGTPGSGTASSSPGASPGTSSTGSPGASPGTSSTGSPGASPGTSSTGSPGSSPSASTGTGPGTPGSGTASSSPGASPGTSSTGSPGASPGTSSTGSPGASPGTSSTGSPGSSTPSGATGSPGSSTPSGATGSPGASPGTSSTGSPASSRQGAEPRKNFVKPNETKTYFWKVQHHMAPTKDEFDCKAWAYFSDVDLEKDVHSGLIGPLLVCHTNTLNPAHGRQVTVQEFALFFTIFDETKSWYFTENMERNCRAPCNIQMEDPTFKENYRFHAINGYIMDTLPGLVMAQDQRIRWYLLSMGSNENIHSIHFSGHVFTVRKKEEYKMALYNLYPGVFETVEMLPSKAGIWRVECLIGEHLHAGMSTLFLVYSNKCQTPLGMASGHIRDFQITASGQYGQWAPKLARLHYSGSINAWSTKEPFSWIKVDLLAPMIIHGIKTQGARQKFSSLYISQFIIMYSLDGKKWQTYRGNSTGTLMVFFGNVDSSGIKHNIFNPPIIARYIRLHPTHYSIRSTLRMELMGCDLNSCSMPLGMESKAISDAQITASSYFTNMFATWSPSKARLHLQGRSNAWRPQVNNPKEWLQVDFQKTMKVTGVTTQGVKSLLTSMYVKEFLISSSQDGHQWTLFFQNGKVKVFQGNQDSFTPVVNSLDPPLLTRYLRIHPQSWVHQIALRMEVLGCEAQDLYGAGSPGAETAEQKLISEEDLSPATGHHHHHH

SEQ ID NO: 804 - DNA, 4860 bp, synthetic construct
  misc_feature 1..4860: note = Description of Artificial Sequence: Synthetic polynucleotide
  source 1..4860: mol_type = other DNA
gccaccagaagatactacctgggtgcagtggaactgtcatgggactatatgcaaagtgatctcggtgagctgcctgtggacgcaagatttcctcctagagtgccaaaatcttttccattcaacacctcagtcgtgtacaaaaagactctgtttgtagaattcacggatcaccttttcaacatcgctaagccaaggccaccctggatgggtctgctaggtcctaccatccaggctgaggtttatgatacagtggtcattacacttaagaacatggcttcccatcctgtcagtcttcatgctgttggtgtatcctactggaaagcttctgagggagctgaatatgatgatcagaccagtcaaagggagaaagaagatgataaagtcttccctggtggaagccatacatatgtctggcaggtcctgaaagagaatggtccaatggcctctgacccactgtgccttacctactcatatctttctcatgtggacctggtaaaagacttgaattcaggcctcattggagccctactagtatgtagagaagggagtctggccaaggaaaagacacagaccttgcacaaatttatactactttttgctgtatttgatgaagggaaaagttggcactcagaaacaaagaactccttgatgcaggatagggatgctgcatctgctcgggcctggcctaaaatgcacacagtcaatggttatgtaaacaggtctctgccaggtctgattggatgccacaggaaatcagtctattggcatgtgattggaatgggcaccactcctgaagtgcactcaatattcctcgaaggtcacacatttcttgtgaggaaccatcgccaggctagcttggaaatctcgccaataactttccttactgctcaaacactcttgatggaccttggacagtttctactgttttgtcatatctcttcccaccaacatgatggcatggaagcttatgtcaaagtagacagctgtccagaggaaccccaactacgaatgaaaaataatgaagaagcggaagactatgatgatgatcttactgattctgaaatggatgtggtcaggtttgatgatgacaactctccttcctttatccaaattcgctcagttgccaagaagcatcctaaaacttgggtacattacattgctgctgaagaggaggactgggactatgctcccttagtcctcgcccccgatgacagaagttataaaagtcaatatttgaacaatggccctcagcggattggtaggaagtacaaaaaagtccgatttatggcatacacagatgaaacctttaagactcgtgaagctattcagcatgaatcaggaatcttgggacctttactttatggggaagttggagacacactgttgattatatttaagaatcaagcaagcagaccatataacatctaccctcacggaatcactgatgtccgtcctttgtattcaaggagattaccaaaaggtgtaaaacatttgaaggattttccaattctgccaggagaaatattcaaatataaatggacagtgactgtagaagatgggccaactaaatcagatcctcggtgcctgacccgctattactctagtttcgttaatatggagagagatctagcttcaggactcattggccctctcctcatctgctacaaagaatctgtagatcaaagaggaaaccagataatgtcagacaagaggaatgtcatcctgttttctgtatttgatgagaaccgaagctggtacctcacagagaatatacaacgctttctccccaatccagctggagtgcagcttgaggatccagagttccaagcctccaacatcatgcacagcatcaatggctatgtttttgatagtttgcagttgtcagtttgtttgcatgaggtggcatactggtacattctaagcattggagcacagactgacttcctttctgtcttcttctctggatataccttcaaacacaaaatggtctatgaagacacactcaccctattcccattctcaggagaaactgtcttcatgtcgatggaaaacccaggtctatggattctggggtgccacaactcagactttcggaacagaggcatgaccgccttactgaaggtttctagttgtgacaagaacactggtgattattacgaggacagttatgaagatatttcagcatacttgctgagtaaaaacaatgccattgaaccaagaagcttctctcaaaacccaccagtcttgaaacgccatcaacgggaaataactcgtactactcttcagtcagatcaagaggaaatcgattatgatgataccatatcagttgaaatgaagaaggaagattttgacatttatgatgaggatgaaaatcagagcccccgcagctttcaaaagaaaacacgacactattttattgctgcagtggagaggctctgggattatgggatgagtagctccccacatgttctaagaaacagggctcagagtggcagtgtccctcagttcaagaaagttgttttccaggaatttactgatggctcctttactcagcccttataccgtggagaactaaatgaacatttgggactcctggggccatatataagagcagaagttgaagataatatcatggtaactttcagaaatcaggcctctcgtccctattccttctattctagccttatttcttatgaggaagatcagggcgcgccaggtacacccggatcgggtacagcgtcatcgagccccggtgcgtcacctggtacgtcgagcacggggtcgccaggggcgtcccctgggacgtcctcaacaggctcgcccggtgcgtcacccggcacgtcgtccacgggttcacctggtagctccccttccgcgtccactggcaccgggcctggaactccggggagcggcacagcgagctcgtcgccgggagcatcgcctgggacatcgagcaccgggtcgccaggagcatcgcccggaacatccagcacaggaagccccggcgcgtcgcccgggacatcaagcacaggttccccgggatcgagcacgccgtccggagccactggatcaccagggagctcgacaccttccggcgcaacgggatcgcccggagccagcccgggtacgtcaagcactggctcccctgcctcgagcaggcaaggagcagaacctagaaaaaactttgtcaagcctaatgaaaccaaaacttacttttggaaagtgcaacatcatatggcacccactaaagatgagtttgactgcaaagcctgggcttatttctctgatgttgacctggaaaaagatgtgcactcaggcctgattggaccccttctggtctgccacactaacacactgaaccctgctcatgggagacaagtgacagtacaggaatttgctctgtttttcaccatctttgatgagaccaaaagctggtacttcactgaaaatatggaaagaaactgcagggctccctgcaatatccagatggaagatcccacttttaaagagaattatcgcttccatgcaatcaatggctacataatggatacactacctggcttagtaatggctcaggatcaaaggattcgatggtatctgctcagcatgggcagcaatgaaaacatccattctattcatttcagtggacatgtgttcactgtacgaaaaaaagaggagtataaaatggcactgtacaatctctatccaggtgtttttgagacagtggaaatgttaccatccaaagctggaatttggcgggtggaatgccttattggcgagcatctacatgctgggatgagcacactttttctggtgtacagcaataagtgtcagactcccctgggaatggcttctggacacattagagattttcagattacagcttcaggacaatatggacagtgggccccaaagctggccagacttcattattccggatcaatcaatgcctggagcaccaaggagcccttttcttggatcaaggtggatctgttggcaccaatgattattcacggcatcaagacccagggtgcccgtcagaagttctccagcctctacatctctcagtttatcatcatgtatagtcttgatgggaagaagtggcagacttatcgaggaaattccactggaaccttaatggtcttctttggcaatgtggattcatctgggataaaacacaatatttttaaccctccaattattgctcgatacatccgtttgcacccaactcattatagcattcgcagcactcttcgcatggagttgatgggctgtgatttaaatagttgcagcatgccattgggaatggagagtaaagcaatatcagatgcacagattactgcttcatcctactttaccaatatgtttgccacctggtctccttcaaaagctcgacttcacctccaagggaggagtaatgcctggagacctcaggtgaataatccaaaagagtggctgcaagtggacttccagaagacaatgaaagtcacaggagtaactactcagggagtaaaatctctgcttaccagcatgtatgtgaaggagttcctcatctccagcagtcaagatggccatcagtggactctcttttttcagaatggcaaagtaaaggtttttcagggaaatcaagactccttcacacctgtggtgaactctctagacccaccgttactgactcgctaccttcgaattcacccccagagttgggtgcaccagattgccctgaggatggaggttctgggctgcgaggcacaggacctctacggcgccggatcacctggggccgaaacggccgaacaaaaactcatctcagaagaggatctgtcacctgcaaccggtcatcatcaccatcaccattga

SEQ ID NO: 805 - protein, 1619 aa, synthetic construct
  REGION 1..1619: note = Description of Artificial Sequence: Synthetic polypeptide
ATRRYYLGAVELSWDYMQSDLGELPVDARFPPRVPKSFPFNTSVVYKKTLFVEFTDHLFNIAKPRPPWMGLLGPTIQAEVYDTVVITLKNMASHPVSLHAVGVSYWKASEGAEYDDQTSQREKEDDKVFPGGSHTYVWQVLKENGPMASDPLCLTYSYLSHVDLVKDLNSGLIGALLVCREGSLAKEKTQTLHKFILLFAVFDEGKSWHSETKNSLMQDRDAASARAWPKMHTVNGYVNRSLPGLIGCHRKSVYWHVIGMGTTPEVHSIFLEGHTFLVRNHRQASLEISPITFLTAQTLLMDLGQFLLFCHISSHQHDGMEAYVKVDSCPEEPQLRMKNNEEAEDYDDDLTDSEMDVVRFDDDNSPSFIQIRSVAKKHPKTWVHYIAAEEEDWDYAPLVLAPDDRSYKSQYLNNGPQRIGRKYKKVRFMAYTDETFKTREAIQHESGILGPLLYGEVGDTLLIIFKNQASRPYNIYPHGITDVRPLYSRRLPKGVKHLKDFPILPGEIFKYKWTVTVEDGPTKSDPRCLTRYYSSFVNMERDLASGLIGPLLICYKESVDQRGNQIMSDKRNVILFSVFDENRSWYLTENIQRFLPNPAGVQLEDPEFQASNIMHSINGYVFDSLQLSVCLHEVAYWYILSIGAQTDFLSVFFSGYTFKHKMVYEDTLTLFPFSGETVFMSMENPGLWILGCHNSDFRNRGMTALLKVSSCDKNTGDYYEDSYEDISAYLLSKNNAIEPRSFSQNPPVLKRHQREITRTTLQSDQEEIDYDDTISVEMKKEDFDIYDEDENQSPRSFQKKTRHYFIAAVERLWDYGMSSSPHVLRNRAQSGSVPQFKKVVFQEFTDGSFTQPLYRGELNEHLGLLGPYIRAEVEDNIMVTFRNQASRPYSFYSSLISYEEDQRQGAEPGAPTSESATPESGPGSEPATSGSETPGTSESATPESGPGSEPATSGSETPGTSESATPESGPGTSTEPSEGSAPGTSESATPESGPGSPAGSPTSTEEGSPAGSPTSTEEGSPAGSPTSTEEGTSESATPESGPGTSTEPSEGSAPGASSRKNFVKPNETKTYFWKVQHHMAPTKDEFDCKAWAYFSDVDLEKDVHSGLIGPLLVCHTNTLNPAHGRQVTVQEFALFFTIFDETKSWYFTENMERNCRAPCNIQMEDPTFKENYRFHAINGYIMDTLPGLVMAQDQRIRWYLLSMGSNENIHSIHFSGHVFTVRKKEEYKMALYNLYPGVFETVEMLPSKAGIWRVECLIGEHLHAGMSTLFLVYSNKCQTPLGMASGHIRDFQITASGQYGQWAPKLARLHYSGSINAWSTKEPFSWIKVDLLAPMIIHGIKTQGARQKFSSLYISQFIIMYSLDGKKWQTYRGNSTGTLMVFFGNVDSSGIKHNIFNPPIIARYIRLHPTHYSIRSTLRMELMGCDLNSCSMPLGMESKAISDAQITASSYFTNMFATWSPSKARLHLQGRSNAWRPQVNNPKEWLQVDFQKTMKVTGVTTQGVKSLLTSMYVKEFLISSSQDGHQWTLFFQNGKVKVFQGNQDSFTPVVNSLDPPLLTRYLRIHPQSWVHQIALRMEVLGCEAQDLYGAGSPGAETAEQKLISEEDLSPATGHHHHHH

SEQ ID NO: 806 - DNA, 4860 bp, synthetic construct
  misc_feature 1..4860: note = Description of Artificial Sequence: Synthetic polynucleotide
  source 1..4860: mol_type = other DNA
gccaccagaagatactacctgggtgcagtggaactgtcatgggactatatgcaaagtgatctcggtgagctgcctgtggacgcaagatttcctcctagagtgccaaaatcttttccattcaacacctcagtcgtgtacaaaaagactctgtttgtagaattcacggatcaccttttcaacatcgctaagccaaggccaccctggatgggtctgctaggtcctaccatccaggctgaggtttatgatacagtggtcattacacttaagaacatggcttcccatcctgtcagtcttcatgctgttggtgtatcctactggaaagcttctgagggagctgaatatgatgatcagaccagtcaaagggagaaagaagatgataaagtcttccctggtggaagccatacatatgtctggcaggtcctgaaagagaatggtccaatggcctctgacccactgtgccttacctactcatatctttctcatgtggacctggtaaaagacttgaattcaggcctcattggagccctactagtatgtagagaagggagtctggccaaggaaaagacacagaccttgcacaaatttatactactttttgctgtatttgatgaagggaaaagttggcactcagaaacaaagaactccttgatgcaggatagggatgctgcatctgctcgggcctggcctaaaatgcacacagtcaatggttatgtaaacaggtctctgccaggtctgattggatgccacaggaaatcagtctattggcatgtgattggaatgggcaccactcctgaagtgcactcaatattcctcgaaggtcacacatttcttgtgaggaaccatcgccaggctagcttggaaatctcgccaataactttccttactgctcaaacactcttgatggaccttggacagtttctactgttttgtcatatctcttcccaccaacatgatggcatggaagcttatgtcaaagtagacagctgtccagaggaaccccaactacgaatgaaaaataatgaagaagcggaagactatgatgatgatcttactgattctgaaatggatgtggtcaggtttgatgatgacaactctccttcctttatccaaattcgctcagttgccaagaagcatcctaaaacttgggtacattacattgctgctgaagaggaggactgggactatgctcccttagtcctcgcccccgatgacagaagttataaaagtcaatatttgaacaatggccctcagcggattggtaggaagtacaaaaaagtccgatttatggcatacacagatgaaacctttaagactcgtgaagctattcagcatgaatcaggaatcttgggacctttactttatggggaagttggagacacactgttgattatatttaagaatcaagcaagcagaccatataacatctaccctcacggaatcactgatgtccgtcctttgtattcaaggagattaccaaaaggtgtaaaacatttgaaggattttccaattctgccaggagaaatattcaaatataaatggacagtgactgtagaagatgggccaactaaatcagatcctcggtgcctgacccgctattactctagtttcgttaatatggagagagatctagcttcaggactcattggccctctcctcatctgctacaaagaatctgtagatcaaagaggaaaccagataatgtcagacaagaggaatgtcatcctgttttctgtatttgatgagaaccgaagctggtacctcacagagaatatacaacgctttctccccaatccagctggagtgcagcttgaggatccagagttccaagcctccaacatcatgcacagcatcaatggctatgtttttgatagtttgcagttgtcagtttgtttgcatgaggtggcatactggtacattctaagcattggagcacagactgacttcctttctgtcttcttctctggatataccttcaaacacaaaatggtctatgaagacacactcaccctattcccattctcaggagaaactgtcttcatgtcgatggaaaacccaggtctatggattctggggtgccacaactcagactttcggaacagaggcatgaccgccttactgaaggtttctagttgtgacaagaacactggtgattattacgaggacagttatgaagatatttcagcatacttgctgagtaaaaacaatgccattgaaccaagaagcttctctcaaaacccaccagtcttgaaacgccatcaacgggaaataactcgtactactcttcagtcagatcaagaggaaatcgattatgatgataccatatcagttgaaatgaagaaggaagattttgacatttatgatgaggatgaaaatcagagcccccgcagctttcaaaagaaaacacgacactattttattgctgcagtggagaggctctgggattatgggatgagtagctccccacatgttctaagaaacagggctcagagtggcagtgtccctcagttcaagaaagttgttttccaggaatttactgatggctcctttactcagcccttataccgtggagaactaaatgaacatttgggactcctggggccatatataagagcagaagttgaagataatatcatggtaactttcagaaatcaggcctctcgtccctattccttctattctagccttatttcttatgaggaagatcagaggcaaggagcagaacctggcgcgccaacgtccgaaagtgctacccctgagtcaggccctggtagtgagcctgccacaagcggaagcgaaactccggggacctcagagtctgccactcccgaatcggggccaggctctgaaccggccacttcagggagcgaaacaccaggaacatcggagagcgctaccccggagagcgggccaggaactagtactgagcctagcgagggaagtgcacctggtacaagcgagtccgccacacccgagtctggccctggctctccagcgggctcacccacgagcactgaagagggctctcccgctggcagcccaacgtcgacagaagaaggatcaccagcaggctcccccacatcaacagaggagggtacatcagaatctgctactcccgagagtggacccggtacctccactgagcccagcgaggggagtgcaccaggtgcctcgagcagaaaaaactttgtcaagcctaatgaaaccaaaacttacttttggaaagtgcaacatcatatggcacccactaaagatgagtttgactgcaaagcctgggcttatttctctgatgttgacctggaaaaagatgtgcactcaggcctgattggaccccttctggtctgccacactaacacactgaaccctgctcatgggagacaagtgacagtacaggaatttgctctgtttttcaccatctttgatgagaccaaaagctggtacttcactgaaaatatggaaagaaactgcagggctccctgcaatatccagatggaagatcccacttttaaagagaattatcgcttccatgcaatcaatggctacataatggatacactacctggcttagtaatggctcaggatcaaaggattcgatggtatctgctcagcatgggcagcaatgaaaacatccattctattcatttcagtggacatgtgttcactgtacgaaaaaaagaggagtataaaatggcactgtacaatctctatccaggtgtttttgagacagtggaaatgttaccatccaaagctggaatttggcgggtggaatgccttattggcgagcatctacatgctgggatgagcacactttttctggtgtacagcaataagtgtcagactcccctgggaatggcttctggacacattagagattttcagattacagcttcaggacaatatggacagtgggccccaaagctggccagacttcattattccggatcaatcaatgcctggagcaccaaggagcccttttcttggatcaaggtggatctgttggcaccaatgattattcacggcatcaagacccagggtgcccgtcagaagttctccagcctctacatctctcagtttatcatcatgtatagtcttgatgggaagaagtggcagacttatcgaggaaattccactggaaccttaatggtcttctttggcaatgtggattcatctgggataaaacacaatatttttaaccctccaattattgctcgatacatccgtttgcacccaactcattatagcattcgcagcactcttcgcatggagttgatgggctgtgatttaaatagttgcagcatgccattgggaatggagagtaaagcaatatcagatgcacagattactgcttcatcctactttaccaatatgtttgccacctggtctccttcaaaagctcgacttcacctccaagggaggagtaatgcctggagacctcaggtgaataatccaaaagagtggctgcaagtggacttccagaagacaatgaaagtcacaggagtaactactcagggagtaaaatctctgcttaccagcatgtatgtgaaggagttcctcatctccagcagtcaagatggccatcagtggactctcttttttcagaatggcaaagtaaaggtttttcagggaaatcaagactccttcacacctgtggtgaactctctagacccaccgttactgactcgctaccttcgaattcacccccagagttgggtgcaccagattgccctgaggatggaggttctgggctgcgaggcacaggacctctacggcgccggatcacctggggccgaaacggccgaacaaaaactcatctcagaagaggatctgtcacctgcaaccggtcatcatcaccatcaccattga

SEQ ID NO: 807 - protein, 1619 aa, synthetic construct
  REGION 1..1619: note = Description of Artificial Sequence: Synthetic polypeptide
ATRRYYLGAVELSWDYMQSDLGELPVDARFPPRVPKSFPFNTSVVYKKTLFVEFTDHLFNIAKPRPPWMGLLGPTIQAEVYDTVVITLKNMASHPVSLHAVGVSYWKASEGAEYDDQTSQREKEDDKVFPGGSHTYVWQVLKENGPMASDPLCLTYSYLSHVDLVKDLNSGLIGALLVCREGSLAKEKTQTLHKFILLFAVFDEGKSWHSETKNSLMQDRDAASARAWPKMHTVNGYVNRSLPGLIGCHRKSVYWHVIGMGTTPEVHSIFLEGHTFLVRNHRQASLEISPITFLTAQTLLMDLGQFLLFCHISSHQHDGMEAYVKVDSCPEEPQLRMKNNEEAEDYDDDLTDSEMDVVRFDDDNSPSFIQIRSVAKKHPKTWVHYIAAEEEDWDYAPLVLAPDDRSYKSQYLNNGPQRIGRKYKKVRFMAYTDETFKTREAIQHESGILGPLLYGEVGDTLLIIFKNQASRPYNIYPHGITDVRPLYSRRLPKGVKHLKDFPILPGEIFKYKWTVTVEDGPTKSDPRCLTRYYSSFVNMERDLASGLIGPLLICYKESVDQRGNQIMSDKRNVILFSVFDENRSWYLTENIQRFLPNPAGVQLEDPEFQASNIMHSINGYVFDSLQLSVCLHEVAYWYILSIGAQTDFLSVFFSGYTFKHKMVYEDTLTLFPFSGETVFMSMENPGLWILGCHNSDFRNRGMTALLKVSSCDKNTGDYYEDSYEDISAYLLSKNNAIEPRSFSQNPPVLKRHQREITRTTLQSDQEEIDYDDTISVEMKKEDFDIYDEDENQSPRSFQKKTRHYFIAAVERLWDYGMSSSPHVLRNRAQSGSVPQFKKVVFQEFTDGSFTQPLYRGELNEHLGLLGPYIRAEVEDNIMVTFRNQASRPYSFYSSLISYEEDQRQGAEPGAPGTPGSGTASSSPGASPGTSSTGSPGASPGTSSTGSPGASPGTSSTGSPGSSPSASTGTGPGTPGSGTASSSPGASPGTSSTGSPGASPGTSSTGSPGASPGTSSTGSPGSSTPSGATGSPGSSTPSGATGSPGASPGTSSTGSPASSRKNFVKPNETKTYFWKVQHHMAPTKDEFDCKAWAYFSDVDLEKDVHSGLIGPLLVCHTNTLNPAHGRQVTVQEFALFFTIFDETKSWYFTENMERNCRAPCNIQMEDPTFKENYRFHAINGYIMDTLPGLVMAQDQRIRWYLLSMGSNENIHSIHFSGHVFTVRKKEEYKMALYNLYPGVFETVEMLPSKAGIWRVECLIGEHLHAGMSTLFLVYSNKCQTPLGMASGHIRDFQITASGQYGQWAPKLARLHYSGSINAWSTKEPFSWIKVDLLAPMIIHGIKTQGARQKFSSLYISQFIIMYSLDGKKWQTYRGNSTGTLMVFFGNVDSSGIKHNIFNPPIIARYIRLHPTHYSIRSTLRMELMGCDLNSCSMPLGMESKAISDAQITASSYFTNMFATWSPSKARLHLQGRSNAWRPQVNNPKEWLQVDFQKTMKVTGVTTQGVKSLLTSMYVKEFLISSSQDGHQWTLFFQNGKVKVFQGNQDSFTPVVNSLDPPLLTRYLRIHPQSWVHQIALRMEVLGCEAQDLYGAGSPGAETAEQKLISEEDLSPATGHHHHHH

SEQ ID NO: 808 - DNA, 4860 bp, synthetic construct
  misc_feature 1..4860: note = Description of Artificial Sequence: Synthetic polynucleotide
  source 1..4860: mol_type = other DNA
gccaccagaagatactacctgggtgcagtggaactgtcatgggactatatgcaaagtgatctcggtgagctgcctgtggacgcaagatttcctcctagagtgccaaaatcttttccattcaacacctcagtcgtgtacaaaaagactctgtttgtagaattcacggatcaccttttcaacatcgctaagccaaggccaccctggatgggtctgctaggtcctaccatccaggctgaggtttatgatacagtggtcattacacttaagaacatggcttcccatcctgtcagtcttcatgctgttggtgtatcctactggaaagcttctgagggagctgaatatgatgatcagaccagtcaaagggagaaagaagatgataaagtcttccctggtggaagccatacatatgtctggcaggtcctgaaagagaatggtccaatggcctctgacccactgtgccttacctactcatatctttctcatgtggacctggtaaaagacttgaattcaggcctcattggagccctactagtatgtagagaagggagtctggccaaggaaaagacacagaccttgcacaaatttatactactttttgctgtatttgatgaagggaaaagttggcactcagaaacaaagaactccttgatgcaggatagggatgctgcatctgctcgggcctggcctaaaatgcacacagtcaatggttatgtaaacaggtctctgccaggtctgattggatgccacaggaaatcagtctattggcatgtgattggaatgggcaccactcctgaagtgcactcaatattcctcgaaggtcacacatttcttgtgaggaaccatcgccaggctagcttggaaatctcgccaataactttccttactgctcaaacactcttgatggaccttggacagtttctactgttttgtcatatctcttcccaccaacatgatggcatggaagcttatgtcaaagtagacagctgtccagaggaaccccaactacgaatgaaaaataatgaagaagcggaagactatgatgatgatcttactgattctgaaatggatgtggtcaggtttgatgatgacaactctccttcctttatccaaattcgctcagttgccaagaagcatcctaaaacttgggtacattacattgctgctgaagaggaggactgggactatgctcccttagtcctcgcccccgatgacagaagttataaaagtcaatatttgaacaatggccctcagcggattggtaggaagtacaaaaaagtccgatttatggcatacacagatgaaacctttaagactcgtgaagctattcagcatgaatcaggaatcttgggacctttactttatggggaagttggagacacactgttgattatatttaagaatcaagcaagcagaccatataacatctaccctcacggaatcactgatgtccgtcctttgtattcaaggagattaccaaaaggtgtaaaacatttgaaggattttccaattctgccaggagaaatattcaaatataaatggacagtgactgtagaagatgggccaactaaatcagatcctcggtgcctgacccgctattactctagtttcgttaatatggagagagatctagcttcaggactcattggccctctcctcatctgctacaaagaatctgtagatcaaagaggaaaccagataatgtcagacaagaggaatgtcatcctgttttctgtatttgatgagaaccgaagctggtacctcacagagaatatacaacgctttctccccaatccagctggagtgcagcttgaggatccagagttccaagcctccaacatcatgcacagcatcaatggctatgtttttgatagtttgcagttgtcagtttgtttgcatgaggtggcatactggtacattctaagcattggagcacagactgacttcctttctgtcttcttctctggatataccttcaaacacaaaatggtctatgaagacacactcaccctattcccattctcaggagaaactgtcttcatgtcgatggaaaacccaggtctatggattctggggtgccacaactcagactttcggaacagaggcatgaccgccttactgaaggtttctagttgtgacaagaacactggtgattattacgaggacagttatgaagatatttcagcatacttgctgagtaaaaacaatgccattgaaccaagaagcttctctcaaaacccaccagtcttgaaacgccatcaacgggaaataactcgtactactcttcagtcagatcaagaggaaatcgattatgatgataccatatcagttgaaatgaagaaggaagattttgacatttatgatgaggatgaaaatcagagcccccgcagctttcaaaagaaaacacgacactattttattgctgcagtggagaggctctgggattatgggatgagtagctccccacatgttctaagaaacagggctcagagtggcagtgtccctcagttcaagaaagttgttttccaggaatttactgatggctcctttactcagcccttataccgtggagaactaaatgaacatttgggactcctggggccatatataagagcagaagttgaagataatatcatggtaactttcagaaatcaggcctctcgtccctattccttctattctagccttatttcttatgaggaagatcagaggcaaggagcagaacctggcgcgccaggtacacccggatcgggtacagcgtcatcgagccccggtgcgtcacctggtacgtcgagcacggggtcgccaggggcgtcccctgggacgtcctcaacaggctcgcccggtgcgtcacccggcacgtcgtccacgggttcacctggtagctccccttccgcgtccactggcaccgggcctggaactccggggagcggcacagcgagctcgtcgccgggagcatcgcctgggacatcgagcaccgggtcgccaggagcatcgcccggaacatccagcacaggaagccccggcgcgtcgcccgggacatcaagcacaggttccccgggatcgagcacgccgtccggagccactggatcaccagggagctcgacaccttccggcgcaacgggatcgcccggagccagcccgggtacgtcaagcactggctcccctgcctcgagcagaaaaaactttgtcaagcctaatgaaaccaaaacttacttttggaaagtgcaacatcatatggcacccactaaagatgagtttgactgcaaagcctgggcttatttctctgatgttgacctggaaaaagatgtgcactcaggcctgattggaccccttctggtctgccacactaacacactgaaccctgctcatgggagacaagtgacagtacaggaatttgctctgtttttcaccatctttgatgagaccaaaagctggtacttcactgaaaatatggaaagaaactgcagggctccctgcaatatccagatggaagatcccacttttaaagagaattatcgcttccatgcaatcaatggctacataatggatacactacctggcttagtaatggctcaggatcaaaggattcgatggtatctgctcagcatgggcagcaatgaaaacatccattctattcatttcagtggacatgtgttcactgtacgaaaaaaagaggagtataaaatggcactgtacaatctctatccaggtgtttttgagacagtggaaatgttaccatccaaagctggaatttggcgggtggaatgccttattggcgagcatctacatgctgggatgagcacactttttctggtgtacagcaataagtgtcagactcccctgggaatggcttctggacacattagagattttcagattacagcttcaggacaatatggacagtgggccccaaagctggccagacttcattattccggatcaatcaatgcctggagcaccaaggagcccttttcttggatcaaggtggatctgttggcaccaatgattattcacggcatcaagacccagggtgcccgtcagaagttctccagcctctacatctctcagtttatcatcatgtatagtcttgatgggaagaagtggcagacttatcgaggaaattccactggaaccttaatggtcttctttggcaatgtggattcatctgggataaaacacaatatttttaaccctccaattattgctcgatacatccgtttgcacccaactcattatagcattcgcagcactcttcgcatggagttgatgggctgtgatttaaatagttgcagcatgccattgggaatggagagtaaagcaatatcagatgcacagattactgcttcatcctactttaccaatatgtttgccacctggtctccttcaaaagctcgacttcacctccaagggaggagtaatgcctggagacctcaggtgaataatccaaaagagtggctgcaagtggacttccagaagacaatgaaagtcacaggagtaactactcagggagtaaaatctctgcttaccagcatgtatgtgaaggagttcctcatctccagcagtcaagatggccatcagtggactctcttttttcagaatggcaaagtaaaggtttttcagggaaatcaagactccttcacacctgtggtgaactctctagacccaccgttactgactcgctaccttcgaattcacccccagagttgggtgcaccagattgccctgaggatggaggttctgggctgcgaggcacaggacctctacggcgccggatcacctggggccgaaacggccgaacaaaaactcatctcagaagaggatctgtcacctgcaaccggtcatcatcaccatcaccattga

SEQ ID NO: 809 - protein, 1903 aa, synthetic construct
  REGION 1..1903: note = Description of Artificial Sequence: Synthetic polypeptide
ATRRYYLGAVELSWDYMQSDLGELPVDARFPPRVPKSFPFNTSVVYKKTLFVEFTDHLFNIAKPRPPWMGLLGPTIQAEVYDTVVITLKNMASHPVSLHAVGVSYWKASEGAEYDDQTSQREKEDDKVFPGGSHTYVWQVLKENGPMASDPLCLTYSYLSHVDLVKDLNSGLIGALLVCREGSLAKEKTQTLHKFILLFAVFDEGKSWHSETKNSLMQDRDAASARAWPKMHTVNGYVNRSLPGLIGCHRKSVYWHVIGMGTTPEVHSIFLEGHTFLVRNHRQASLEISPITFLTAQTLLMDLGQFLLFCHISSHQHDGMEAYVKVDSCPEEPQLRMKNNEEAEDYDDDLTDSEMDVVRFDDDNSPSFIQIRSVAKKHPKTWVHYIAAEEEDWDYAPLVLAPDDRSYKSQYLNNGPQRIGRKYKKVRFMAYTDETFKTREAIQHESGILGPLLYGEVGDTLLIIFKNQASRPYNIYPHGITDVRPLYSRRLPKGVKHLKDFPILPGEIFKYKWTVTVEDGPTKSDPRCLTRYYSSFVNMERDLASGLIGPLLICYKESVDQRGNQIMSDKRNVILFSVFDENRSWYLTENIQRFLPNPAGVQLEDPEFQASNIMHSINGYVFDSLQLSVCLHEVAYWYILSIGAQTDFLSVFFSGYTFKHKMVYEDTLTLFPFSGETVFMSMENPGLWILGCHNSDFRNRGMTALLKVSSCDKNTGDYYEDSYEDISAYLLSKNNAIEPRSFSQNGAPGTSESATPESGPGSEPATSGSETPGTSESATPESGPGSEPATSGSETPGTSESATPESGPGTSTEPSEGSAPGSPAGSPTSTEEGTSESATPESGPGSEPATSGSETPGTSESATPESGPGSPAGSPTSTEEGSPAGSPTSTEEGTSTEPSEGSAPGTSESATPESGPGTSESATPESGPGTSESATPESGPGSEPATSGSETPGSEPATSGSETPGSPAGSPTSTEEGTSTEPSEGSAPGTSTEPSEGSAPGSEPATSGSETPGTSESATPESGPGTSTEPSEGSAPASSPPVLKRHQREITRTTLQSDQEEIDYDDTISVEMKKEDFDIYDEDENQSPRSFQKKTRHYFIAAVERLWDYGMSSSPHVLRNRAQSGSVPQFKKVVFQEFTDGSFTQPLYRGELNEHLGLLGPYIRAEVEDNIMVTFRNQASRPYSFYSSLISYEEDQRQGAEPRKNFVKPNETKTYFWKVQHHMAPTKDEFDCKAWAYFSDVDLEKDVHSGLIGPLLVCHTNTLNPAHGRQVTVQEFALFFTIFDETKSWYFTENMERNCRAPCNIQMEDPTFKENYRFHAINGYIMDTLPGLVMAQDQRIRWYLLSMGSNENIHSIHFSGHVFTVRKKEEYKMALYNLYPGVFETVEMLPSKAGIWRVECLIGEHLHAGMSTLFLVYSNKCQTPLGMASGHIRDFQITASGQYGQWAPKLARLHYSGSINAWSTKEPFSWIKVDLLAPMIIHGIKTQGARQKFSSLYISQFIIMYSLDGKKWQTYRGNSTGTLMVFFGNVDSSGIKHNIFNPPIIARYIRLHPTHYSIRSTLRMELMGCDLNSCSMPLGMESKAISDAQITASSYFTNMFATWSPSKARLHLQGRSNAWRPQVNNPKEWLQVDFQKTMKVTGVTTQGVKSLLTSMYVKEFLISSSQDGHQWTLFFQNGKVKVFQGNQDSFTPVVNSLDPPLLTRYLRIHPQSWVHQIALRMEVLGCEAQDLYGAPTSTEPSEGSAPGTSESATPESGPGTSESATPESGPGTSESATPESGPGSEPATSGSETPGSEPATSGSETPGSPAGSPTSTEEGTSTEPSEGSAPGTSTEPSEGSAPGSEPATSGSETPGTSESATPESGPGTSTEPSEGSAPGASSEQKLISEEDLSPATGHHHHHH

SEQ ID NO: 810 - DNA, 5712 bp, synthetic construct
  misc_feature 1..5712: note = Description of Artificial Sequence: Synthetic polynucleotide
  source 1..5712: mol_type = other DNA
gccaccagaagatactacctgggtgcagtggaactgtcatgggactatatgcaaagtgatctcggtgagctgcctgtggacgcaagatttcctcctagagtgccaaaatcttttccattcaacacctcagtcgtgtacaaaaagactctgtttgtagaattcacggatcaccttttcaacatcgctaagccaaggccaccctggatgggtctgctaggtcctaccatccaggctgaggtttatgatacagtggtcattacacttaagaacatggcttcccatcctgtcagtcttcatgctgttggtgtatcctactggaaagcttctgagggagctgaatatgatgatcagaccagtcaaagggagaaagaagatgataaagtcttccctggtggaagccatacatatgtctggcaggtcctgaaagagaatggtccaatggcctctgacccactgtgccttacctactcatatctttctcatgtggacctggtaaaagacttgaattcaggcctcattggagccctactagtatgtagagaagggagtctggccaaggaaaagacacagaccttgcacaaatttatactactttttgctgtatttgatgaagggaaaagttggcactcagaaacaaagaactccttgatgcaggatagggatgctgcatctgctcgggcctggcctaaaatgcacacagtcaatggttatgtaaacaggtctctgccaggtctgattggatgccacaggaaatcagtctattggcatgtgattggaatgggcaccactcctgaagtgcactcaatattcctcgaaggtcacacatttcttgtgaggaaccatcgccaggctagcttggaaatctcgccaataactttccttactgctcaaacactcttgatggaccttggacagtttctactgttttgtcatatctcttcccaccaacatgatggcatggaagcttatgtcaaagtagacagctgtccagaggaaccccaactacgaatgaaaaataatgaagaagcggaagactatgatgatgatcttactgattctgaaatggatgtggtcaggtttgatgatgacaactctccttcctttatccaaattcgctcagttgccaagaagcatcctaaaacttgggtacattacattgctgctgaagaggaggactgggactatgctcccttagtcctcgcccccgatgacagaagttataaaagtcaatatttgaacaatggccctcagcggattggtaggaagtacaaaaaagtccgatttatggcatacacagatgaaacctttaagactcgtgaagctattcagcatgaatcaggaatcttgggacctttactttatggggaagttggagacacactgttgattatatttaagaatcaagcaagcagaccatataacatctaccctcacggaatcactgatgtccgtcctttgtattcaaggagattaccaaaaggtgtaaaacatttgaaggattttccaattctgccaggagaaatattcaaatataaatggacagtgactgtagaagatgggccaactaaatcagatcctcggtgcctgacccgctattactctagtttcgttaatatggagagagatctagcttcaggactcattggccctctcctcatctgctacaaagaatctgtagatcaaagaggaaaccagataatgtcagacaagaggaatgtcatcctgttttctgtatttgatgagaaccgaagctggtacctcacagagaatatacaacgctttctccccaatccagctggagtgcagcttgaggatccagagttccaagcctccaacatcatgcacagcatcaatggctatgtttttgatagtttgcagttgtcagtttgtttgcatgaggtggcatactggtacattctaagcattggagcacagactgacttcctttctgtcttcttctctggatataccttcaaacacaaaatggtctatgaagacacactcaccctattcccattctcaggagaaactgtcttcatgtcgatggaaaacccaggtctatggattctggggtgccacaactcagactttcggaacagaggcatgaccgccttactgaaggtttctagttgtgacaagaacactggtgattattacgaggacagttatgaagatatttcagcatacttgctgagtaaaaacaatgccattgaaccaagaagcttctctcaaaacggcgcgccaggtacctcagagtctgctacccccgagtcagggccaggatcagagccagccacctccgggtctgagacacccgggacttccgagagtgccacccctgagtccggacccgggtccgagcccgccacttccggctccgaaactcccggcacaagcgagagcgctaccccagagtcaggaccaggaacatctacagagccctctgaaggctccgctccagggtccccagccggcagtcccactagcaccgaggagggaacctctgaaagcgccacacccgaatcagggccagggtctgagcctgctaccagcggcagcgagacaccaggcacctctgagtccgccacaccagagtccggacccggatctcccgctgggagccccacctccactgaggagggatctcctgctggctctccaacatctactgaggaaggtacctcaaccgagccatccgagggatcagctcccggcacctcagagtcggcaaccccggagtctggacccggaacttccgaaagtgccacaccagagtccggtcccgggacttcagaatcagcaacacccgagtccggccctgggtctgaacccgccacaagtggtagtgagacaccaggatcagaacctgctacctcagggtcagagacacccggatctccggcaggctcaccaacctccactgaggagggcaccagcacagaaccaagcgagggctccgcacccggaacaagcactgaacccagtgagggttcagcacccggctctgagccggccacaagtggcagtgagacacccggcacttcagagagtgccacccccgagagtggcccaggcactagtaccgagccctctgaaggcagtgcgccagcctcgagcccaccagtcttgaaacgccatcaacgggaaataactcgtactactcttcagtcagatcaagaggaaatcgattatgatgataccatatcagttgaaatgaagaaggaagattttgacatttatgatgaggatgaaaatcagagcccccgcagctttcaaaagaaaacacgacactattttattgctgcagtggagaggctctgggattatgggatgagtagctccccacatgttctaagaaacagggctcagagtggcagtgtccctcagttcaagaaagttgttttccaggaatttactgatggctcctttactcagcccttataccgtggagaactaaatgaacatttgggactcctggggccatatataagagcagaagttgaagataatatcatggtaactttcagaaatcaggcctctcgtccctattccttctattctagccttatttcttatgaggaagatcagaggcaaggagcagaacctagaaaaaactttgtcaagcctaatgaaaccaaaacttacttttggaaagtgcaacatcatatggcacccactaaagatgagtttgactgcaaagcctgggcttatttctctgatgttgacctggaaaaagatgtgcactcaggcctgattggaccccttctggtctgccacactaacacactgaaccctgctcatgggagacaagtgacagtacaggaatttgctctgtttttcaccatctttgatgagaccaaaagctggtacttcactgaaaatatggaaagaaactgcagggctccctgcaatatccagatggaagatcccacttttaaagagaattatcgcttccatgcaatcaatggctacataatggatacactacctggcttagtaatggctcaggatcaaaggattcgatggtatctgctcagcatgggcagcaatgaaaacatccattctattcatttcagtggacatgtgttcactgtacgaaaaaaagaggagtataaaatggcactgtacaatctctatccaggtgtttttgagacagtggaaatgttaccatccaaagctggaatttggcgggtggaatgccttattggcgagcatctacatgctgggatgagcacactttttctggtgtacagcaataagtgtcagactcccctgggaatggcttctggacacattagagattttcagattacagcttcaggacaatatggacagtgggccccaaagctggccagacttcattattccggatcaatcaatgcctggagcaccaaggagcccttttcttggatcaaggtggatctgttggcaccaatgattattcacggcatcaagacccagggtgcccgtcagaagttctccagcctctacatctctcagtttatcatcatgtatagtcttgatgggaagaagtggcagacttatcgaggaaattccactggaaccttaatggtcttctttggcaatgtggattcatctgggataaaacacaatatttttaaccctccaattattgctcgatacatccgtttgcacccaactcattatagcattcgcagcactcttcgcatggagttgatgggctgtgatttaaatagttgcagcatgccattgggaatggagagtaaagcaatatcagatgcacagattactgcttcatcctactttaccaatatgtttgccacctggtctccttcaaaagctcgacttcacctccaagggaggagtaatgcctggagacctcaggtgaataatccaaaagagtggctgcaagtggacttccagaagacaatgaaagtcacaggagtaactactcagggagtaaaatctctgcttaccagcatgtatgtgaaggagttcctcatctccagcagtcaagatggccatcagtggactctcttttttcagaatggcaaagtaaaggtttttcagggaaatcaagactccttcacacctgtggtgaactctctagacccaccgttactgactcgctaccttcgaattcacccccagagttgggtgcaccagattgccctgaggatggaggttctgggctgcgaggcacaggacctctacggcgcgccaacatctaccgagccttccgaaggctctgcccctgggacctcagaatctgcaacccctgaaagcggccctggaacctccgaaagtgccactcccgagagcggcccagggacaagcgagtcagcaacccctgagtctggacccggcagcgagcctgcaacctctggctcagagactcccggctcagaacccgctacctcaggctccgagacacccggctctcctgctgggagtcccacttccaccgaggaaggaacatccactgagcctagtgagggctctgcccctggaaccagcacagagccaagtgagggcagtgcaccaggatccgagccagcaaccagcgggtccgagactcccgggacctctgagtctgccaccccagagagcggacccggcacttcaaccgagccctccgaaggatcagcaccaggtgcctcgagcgaacaaaaactcatctcagaagaggatctgtcacctgcaaccggtcatcatcaccatcaccattga

SEQ ID NO: 811 - protein, 1759 aa, synthetic construct
  REGION 1..1759: note = Description of Artificial Sequence: Synthetic polypeptide
ATRRYYLGAVELSWDYMQSDLGELPVDARFPPRVPKSFPFNTSVVYKKTLFVEFTDHLFNIAKPRPPWMGLLGPTIQAEVYDTVVITLKNMASHPVSLHAVGVSYWKASEGAEYDDQTSQREKEDDKVFPGGSHTYVWQVLKENGPMASDPLCLTYSYLSHVDLVKDLNSGLIGALLVCREGSLAKEKTQTLHKFILLFAVFDEGKSWHSETKNSLMQDRDAASARAWPKMHTVNGYVNRSLPGLIGCHRKSVYWHVIGMGTTPEVHSIFLEGHTFLVRNHRQASLEISPITFLTAQTLLMDLGQFLLFCHISSHQHDGMEAYVKVDSCPEEPQLRMKNNEEAEDYDDDLTDSEMDVVRFDDDNSPSFIQIRSVAKKHPKTWVHYIAAEEEDWDYAPLVLAPDDRSYKSQYLNNGPQRIGRKYKKVRFMAYTDETFKTREAIQHESGILGPLLYGEVGDTLLIIFKNQASRPYNIYPHGITDVRPLYSRRLPKGVKHLKDFPILPGEIFKYKWTVTVEDGPTKSDPRCLTRYYSSFVNMERDLASGLIGPLLICYKESVDQRGNQIMSDKRNVILFSVFDENRSWYLTENIQRFLPNPAGVQLEDPEFQASNIMHSINGYVFDSLQLSVCLHEVAYWYILSIGAQTDFLSVFFSGYTFKHKMVYEDTLTLFPFSGETVFMSMENPGLWILGCHNSDFRNRGMTALLKVSSCDKNTGDYYEDSYEDISAYLLSKNNAIEPRSFSQNGAPSPAGSPTSTEEGTSESATPESGPGSEPATSGSETPGTSESATPESGPGTSTEPSEGSAPGTSTEPSEGSAPGTSTEPSEGSAPGTSTEPSEGSAPGTSTEPSEGSAPGTSTEPSEGSAPGSPAGSPTSTEEGTSTEPSEGSAPGASSPPVLKRHQREITRTTLQSDQEEIDYDDTISVEMKKEDFDIYDEDENQSPRSFQKKTRHYFIAAVERLWDYGMSSSPHVLRNRAQSGSVPQFKKVVFQEFTDGSFTQPLYRGELNEHLGLLGPYIRAEVEDNIMVTFRNQASRPYSFYSSLISYEEDQRQGAEPRKNFVKPNETKTYFWKVQHHMAPTKDEFDCKAWAYFSDVDLEKDVHSGLIGPLLVCHTNTLNPAHGRQVTVQEFALFFTIFDETKSWYFTENMERNCRAPCNIQMEDPTFKENYRFHAINGYIMDTLPGLVMAQDQRIRWYLLSMGSNENIHSIHFSGHVFTVRKKEEYKMALYNLYPGVFETVEMLPSKAGIWRVECLIGEHLHAGMSTLFLVYSNKCQTPLGMASGHIRDFQITASGQYGQWAPKLARLHYSGSINAWSTKEPFSWIKVDLLAPMIIHGIKTQGARQKFSSLYISQFIIMYSLDGKKWQTYRGNSTGTLMVFFGNVDSSGIKHNIFNPPIIARYIRLHPTHYSIRSTLRMELMGCDLNSCSMPLGMESKAISDAQITASSYFTNMFATWSPSKARLHLQGRSNAWRPQVNNPKEWLQVDFQKTMKVTGVTTQGVKSLLTSMYVKEFLISSSQDGHQWTLFFQNGKVKVFQGNQDSFTPVVNSLDPPLLTRYLRIHPQSWVHQIALRMEVLGCEAQDLYGAPTSTEPSEGSAPGTSESATPESGPGTSESATPESGPGTSESATPESGPGSEPATSGSETPGSEPATSGSETPGSPAGSPTSTEEGTSTEPSEGSAPGTSTEPSEGSAPGSEPATSGSETPGTSESATPESGPGTSTEPSEGSAPGASSEQKLISEEDLSPATGHHHHHH

SEQ ID NO: 812 - DNA, 5280 bp, synthetic construct
  misc_feature 1..5280: note = Description of Artificial Sequence: Synthetic polynucleotide
  source 1..5280: mol_type = other DNA
gccaccagaagatactacctgggtgcagtggaactgtcatgggactatatgcaaagtgatctcggtgagctgcctgtggacgcaagatttcctcctagagtgccaaaatcttttccattcaacacctcagtcgtgtacaaaaagactctgtttgtagaattcacggatcaccttttcaacatcgctaagccaaggccaccctggatgggtctgctaggtcctaccatccaggctgaggtttatgatacagtggtcattacacttaagaacatggcttcccatcctgtcagtcttcatgctgttggtgtatcctactggaaagcttctgagggagctgaatatgatgatcagaccagtcaaagggagaaagaagatgataaagtcttccctggtggaagccatacatatgtctggcaggtcctgaaagagaatggtccaatggcctctgacccactgtgccttacctactcatatctttctcatgtggacctggtaaaagacttgaattcaggcctcattggagccctactagtatgtagagaagggagtctggccaaggaaaagacacagaccttgcacaaatttatactactttttgctgtatttgatgaagggaaaagttggcactcagaaacaaagaactccttgatgcaggatagggatgctgcatctgctcgggcctggcctaaaatgcacacagtcaatggttatgtaaacaggtctctgccaggtctgattggatgccacaggaaatcagtctattggcatgtgattggaatgggcaccactcctgaagtgcactcaatattcctcgaaggtcacacatttcttgtgaggaaccatcgccaggctagcttggaaatctcgccaataactttccttactgctcaaacactcttgatggaccttggacagtttctactgttttgtcatatctcttcccaccaacatgatggcatggaagcttatgtcaaagtagacagctgtccagaggaaccccaactacgaatgaaaaataatgaagaagcggaagactatgatgatgatcttactgattctgaaatggatgtggtcaggtttgatgatgacaactctccttcctttatccaaattcgctcagttgccaagaagcatcctaaaacttgggtacattacattgctgctgaagaggaggactgggactatgctcccttagtcctcgcccccgatgacagaagttataaaagtcaatatttgaacaatggccctcagcggattggtaggaagtacaaaaaagtccgatttatggcatacacagatgaaacctttaagactcgtgaagctattcagcatgaatcaggaatcttgggacctttactttatggggaagttggagacacactgttgattatatttaagaatcaagcaagcagaccatataacatctaccctcacggaatcactgatgtccgtcctttgtattcaaggagattaccaaaaggtgtaaaacatttgaaggattttccaattctgccaggagaaatattcaaatataaatggacagtgactgtagaagatgggccaactaaatcagatcctcggtgcctgacccgctattactctagtttcgttaatatggagagagatctagcttcaggactcattggccctctcctcatctgctacaaagaatctgtagatcaaagaggaaaccagataatgtcagacaagaggaatgtcatcctgttttctgtatttgatgagaaccgaagctggtacctcacagagaatatacaacgctttctccccaatccagctggagtgcagcttgaggatccagagttccaagcctccaacatcatgcacagcatcaatggctatgtttttgatagtttgcagttgtcagtttgtttgcatgaggtggcatactggtacattctaagcattggagcacagactgacttcctttctgtcttcttctctggatataccttcaaacacaaaatggtctatgaagacacactcaccctattcccattctcaggagaaactgtcttcatgtcgatggaaaacccaggtctatggattctggggtgccacaactcagactttcggaacagaggcatgaccgccttactgaaggtttctagttgtgacaagaacactggtgattattacgaggacagttatgaagatatttcagcatacttgctgagtaaaaacaatgccattgaaccaagaagcttctctcaaaacggcgcgccaagtcccgctggaagcccaactagcaccgaagaggggacctcagagtccgccacccccgagtccggccctggctctgagcctgccactagcggctccgagactcctggcacatccgaaagcgctacacccgagagtggacccggcacctctaccgagcccagtgagggctccgcccctggaacaagcaccgagcccagcgaaggcagcgccccagggacctccacagagcccagtgaaggcagtgctcctggcaccagcaccgaaccaagcgagggctctgcacccgggacctccaccgagccaagcgaaggctctgcccctggcacttccaccgagcccagcgaaggcagcgcccctgggagccccgctggctctcccaccagcactgaggagggcacatctaccgaaccaagtgaaggctctgcaccaggtgcctcgagcccaccagtcttgaaacgccatcaacgggaaataactcgtactactcttcagtcagatcaagaggaaatcgattatgatgataccatatcagttgaaatgaagaaggaagattttgacatttatgatgaggatgaaaatcagagcccccgcagctttcaaaagaaaacacgacactattttattgctgcagtggagaggctctgggattatgggatgagtagctccccacatgttctaagaaacagggctcagagtggcagtgtccctcagttcaagaaagttgttttccaggaatttactgatggctcctttactcagcccttataccgtggagaactaaatgaacatttgggactcctggggccatatataagagcagaagttgaagataatatcatggtaactttcagaaatcaggcctctcgtccctattccttctattctagccttatttcttatgaggaagatcagaggcaaggagcagaacctagaaaaaactttgtcaagcctaatgaaaccaaaacttacttttggaaagtgcaacatcatatggcacccactaaagatgagtttgactgcaaagcctgggcttatttctctgatgttgacctggaaaaagatgtgcactcaggcctgattggaccccttctggtctgccacactaacacactgaaccctgctcatgggagacaagtgacagtacaggaatttgctctgtttttcaccatctttgatgagaccaaaagctggtacttcactgaaaatatggaaagaaactgcagggctccctgcaatatccagatggaagatcccacttttaaagagaattatcgcttccatgcaatcaatggctacataatggatacactacctggcttagtaatggctcaggatcaaaggattcgatggtatctgctcagcatgggcagcaatgaaaacatccattctattcatttcagtggacatgtgttcactgtacgaaaaaaagaggagtataaaatggcactgtacaatctctatccaggtgtttttgagacagtggaaatgttaccatccaaagctggaatttggcgggtggaatgccttattggcgagcatctacatgctgggatgagcacactttttctggtgtacagcaataagtgtcagactcccctgggaatggcttctggacacattagagattttcagattacagcttcaggacaatatggacagtgggccccaaagctggccagacttcattattccggatcaatcaatgcctggagcaccaaggagcccttttcttggatcaaggtggatctgttggcaccaatgattattcacggcatcaagacccagggtgcccgtcagaagttctccagcctctacatctctcagtttatcatcatgtatagtcttgatgggaagaagtggcagacttatcgaggaaattccactggaaccttaatggtcttctttggcaatgtggattcatctgggataaaacacaatatttttaaccctccaattattgctcgatacatccgtttgcacccaactcattatagcattcgcagcactcttcgcatggagttgatgggctgtgatttaaatagttgcagcatgccattgggaatggagagtaaagcaatatcagatgcacagattactgcttcatcctactttaccaatatgtttgccacctggtctccttcaaaagctcgacttcacctccaagggaggagtaatgcctggagacctcaggtgaataatccaaaagagtggctgcaagtggacttccagaagacaatgaaagtcacaggagtaactactcagggagtaaaatctctgcttaccagcatgtatgtgaaggagttcctcatctccagcagtcaagatggccatcagtggactctcttttttcagaatggcaaagtaaaggtttttcagggaaatcaagactccttcacacctgtggtgaactctctagacccaccgttactgactcgctaccttcgaattcacccccagagttgggtgcaccagattgccctgaggatggaggttctgggctgcgaggcacaggacctctacggcgcgccaacatctaccgagccttccgaaggctctgcccctgggacctcagaatctgcaacccctgaaagcggccctggaacctccgaaagtgccactcccgagagcggcccagggacaagcgagtcagcaacccctgagtctggacccggcagcgagcctgcaacctctggctcagagactcccggctcagaacccgctacctcaggctccgagacacccggctctcctgctgggagtcccacttccaccgaggaaggaacatccactgagcctagtgagggctctgcccctggaaccagcacagagccaagtgagggcagtgcaccaggatccgagccagcaaccagcgggtccgagactcccgggacctctgagtctgccaccccagagagcggacccggcacttcaaccgagccctccgaaggatcagcaccaggtgcctcgagcgaacaaaaactcatctcagaagaggatctgtcacctgcaaccggtcatcatcaccatcaccattga

SEQ ID NO: 813 - protein, 1759 aa, synthetic construct
  REGION 1..1759: note = Description of Artificial Sequence: Synthetic polypeptide
ATRRYYLGAVELSWDYMQSDLGELPVDARFPPRVPKSFPFNTSVVYKKTLFVEFTDHLFNIAKPRPPWMGLLGPTIQAEVYDTVVITLKNMASHPVSLHAVGVSYWKASEGAEYDDQTSQREKEDDKVFPGGSHTYVWQVLKENGPMASDPLCLTYSYLSHVDLVKDLNSGLIGALLVCREGSLAKEKTQTLHKFILLFAVFDEGKSWHSETKNSLMQDRDAASARAWPKMHTVNGYVNRSLPGLIGCHRKSVYWHVIGMGTTPEVHSIFLEGHTFLVRNHRQASLEISPITFLTAQTLLMDLGQFLLFCHISSHQHDGMEAYVKVDSCPEEPQLRMKNNEEAEDYDDDLTDSEMDVVRFDDDNSPSFIQIRSVAKKHPKTWVHYIAAEEEDWDYAPLVLAPDDRSYKSQYLNNGPQRIGRKYKKVRFMAYTDETFKTREAIQHESGILGPLLYGEVGDTLLIIFKNQASRPYNIYPHGITDVRPLYSRRLPKGVKHLKDFPILPGEIFKYKWTVTVEDGPTKSDPRCLTRYYSSFVNMERDLASGLIGPLLICYKESVDQRGNQIMSDKRNVILFSVFDENRSWYLTENIQRFLPNPAGVQLEDPEFQASNIMHSINGYVFDSLQLSVCLHEVAYWYILSIGAQTDFLSVFFSGYTFKHKMVYEDTLTLFPFSGETVFMSMENPGLWILGCHNSDFRNRGMTALLKVSSCDKNTGDYYEDSYEDISAYLLSKNNAIEPRSFSQNGAPGTPGSGTASSSPGSSTPSGATGSPGASPGTSSTGSPGTPGSGTASSSPGSSTPSGATGSPGSSPSASTGTGPGSSPSASTGTGPGSSTPSGATGSPGSSTPSGATGSPGASPGTSSTGSPGASPGTSSTGSPGASPGTSSTGSPASSPPVLKRHQAEITRTTLQSDQEEIDYDDTISVEMKKEDFDIYDEDENQSPRSFQKKTRHYFIAAVERLWDYGMSSSPHVLRNRAQSGSVPQFKKVVFQEFTDGSFTQPLYRGELNEHLGLLGPYIRAEVEDNIMVTFRNQASRPYSFYSSLISYEEDQRQGAEPRKNFVKPNETKTYFWKVQHHMAPTKDEFDCKAWAYFSDVDLEKDVHSGLIGPLLVCHTNTLNPAHGRQVTVQEFALFFTIFDETKSWYFTENMERNCRAPCNIQMEDPTFKENYRFHAINGYIMDTLPGLVMAQDQRIRWYLLSMGSNENIHSIHFSGHVFTVRKKEEYKMALYNLYPGVFETVEMLPSKAGIWRVECLIGEHLHAGMSTLFLVYSNKCQTPLGMASGHIRDFQITASGQYGQWAPKLARLHYSGSINAWSTKEPFSWIKVDLLAPMIIHGIKTQGARQKFSSLYISQFIIMYSLDGKKWQTYRGNSTGTLMVFFGNVDSSGIKHNIFNPPIIARYIRLHPTHYSIRSTLRMELMGCDLNSCSMPLGMESKAISDAQITASSYFTNMFATWSPSKARLHLQGRSNAWRPQVNNPKEWLQVDFQKTMKVTGVTTQGVKSLLTSMYVKEFLISSSQDGHQWTLFFQNGKVKVFQGNQDSFTPVVNSLDPPLLTRYLRIHPQSWVHQIALRMEVLGCEAQDLYGAPTSTEPSEGSAPGTSESATPESGPGTSESATPESGPGTSESATPESGPGSEPATSGSETPGSEPATSGSETPGSPAGSPTSTEEGTSTEPSEGSAPGTSTEPSEGSAPGSEPATSGSETPGTSESATPESGPGTSTEPSEGSAPGASSEQKLISEEDLSPATGHHHHHH

SEQ ID NO: 814 - DNA, 5280 bp, synthetic construct
  misc_feature 1..5280: note = Description of Artificial Sequence: Synthetic polynucleotide
  source 1..5280: mol_type = other DNA
gccaccagaagatactacctgggtgcagtggaactgtcatgggactatatgcaaagtgatctcggtgagctgcctgtggacgcaagatttcctcctagagtgccaaaatcttttccattcaacacctcagtcgtgtacaaaaagactctgtttgtagaattcacggatcaccttttcaacatcgctaagccaaggccaccctggatgggtctgctaggtcctaccatccaggctgaggtttatgatacagtggtcattacacttaagaacatggcttcccatcctgtcagtcttcatgctgttggtgtatcctactggaaagcttctgagggagctgaatatgatgatcagaccagtcaaagggagaaagaagatgataaagtcttccctggtggaagccatacatatgtctggcaggtcctgaaagagaatggtccaatggcctctgacccactgtgccttacctactcatatctttctcatgtggacctggtaaaagacttgaattcaggcctcattggagccctactagtatgtagagaagggagtctggccaaggaaaagacacagaccttgcacaaatttatactactttttgctgtatttgatgaagggaaaagttggcactcagaaacaaagaactccttgatgcaggatagggatgctgcatctgctcgggcctggcctaaaatgcacacagtcaatggttatgtaaacaggtctctgccaggtctgattggatgccacaggaaatcagtctattggcatgtgattggaatgggcaccactcctgaagtgcactcaatattcctcgaaggtcacacatttcttgtgaggaaccatcgccaggctagcttggaaatctcgccaataactttccttactgctcaaacactcttgatggaccttggacagtttctactgttttgtcatatctcttcccaccaacatgatggcatggaagcttatgtcaaagtagacagctgtccagaggaaccccaactacgaatgaaaaataatgaagaagcggaagactatgatgatgatcttactgattctgaaatggatgtggtcaggtttgatgatgacaactctccttcctttatccaaattcgctcagttgccaagaagcatcctaaaacttgggtacattacattgctgctgaagaggaggactgggactatgctcccttagtcctcgcccccgatgacagaagttataaaagtcaatatttgaacaatggccctcagcggattggtaggaagtacaaaaaagtccgatttatggcatacacagatgaaacctttaagactcgtgaagctattcagcatgaatcaggaatcttgggacctttactttatggggaagttggagacacactgttgattatatttaagaatcaagcaagcagaccatataacatctaccctcacggaatcactgatgtccgtcctttgtattcaaggagattaccaaaaggtgtaaaacatttgaaggattttccaattctgccaggagaaatattcaaatataaatggacagtgactgtagaagatgggccaactaaatcagatcctcggtgcctgacccgctattactctagtttcgttaatatggagagagatctagcttcaggactcattggccctctcctcatctgctacaaagaatctgtagatcaaagaggaaaccagataatgtcagacaagaggaatgtcatcctgttttctgtatttgatgagaaccgaagctggtacctcacagagaatatacaacgctttctccccaatccagctggagtgcagcttgaggatccagagttccaagcctccaacatcatgcacagcatcaatggctatgtttttgatagtttgcagttgtcagtttgtttgcatgaggtggcatactggtacattctaagcattggagcacagactgacttcctttctgtcttcttctctggatataccttcaaacacaaaatggtctatgaagacacactcaccctattcccattctcaggagaaactgtcttcatgtcgatggaaaacccaggtctatggattctggggtgccacaactcagactttcggaacagaggcatgaccgccttactgaaggtttctagttgtgacaagaacactggtgattattacgaggacagttatgaagatatttcagcatacttgctgagtaaaaacaatgccattgaaccaagaagcttctctcaaaacggcgcgccaggtacaccgggcagcggcacggcttcgtcgtcacccggctcgtccacaccgtcgggagctacgggaagcccaggagcgtcaccgggaacgtcgtcaacggggtcaccgggtacgccaggtagcggcacggccagcagctcgccaggttcatcgaccccgtcgggagcgactgggtcgcccggatcaagcccgtcagcttccactggaacaggacccgggtcgtcgccgtcagcctcaacggggacaggacctggttcatcgacgccgtcaggggcgacaggctcgcccggatcgtcaacaccctcgggggcaacggggagccctggtgcgtcgcctggaacctcatccaccggaagcccgggggcctcgccgggtacgagctccacgggatcgcccggagcgtcccccggaacttcaagcacagggagccctgcctcgagcccaccagtcttgaaacgccatcaagctgaaataactcgtactactcttcagtcagatcaagaggaaatcgattatgatgataccatatcagttgaaatgaagaaggaagattttgacatttatgatgaggatgaaaatcagagcccccgcagctttcaaaagaaaacacgacactattttattgctgcagtggagaggctctgggattatgggatgagtagctccccacatgttctaagaaacagggctcagagtggcagtgtccctcagttcaagaaagttgttttccaggaatttactgatggctcctttactcagcccttataccgtggagaactaaatgaacatttgggactcctggggccatatataagagcagaagttgaagataatatcatggtaactttcagaaatcaggcctctcgtccctattccttctattctagccttatttcttatgaggaagatcagaggcaaggagcagaacctagaaaaaactttgtcaagcctaatgaaaccaaaacttacttttggaaagtgcaacatcatatggcacccactaaagatgagtttgactgcaaagcctgggcttatttctctgatgttgacctggaaaaagatgtgcactcaggcctgattggaccccttctggtctgccacactaacacactgaaccctgctcatgggagacaagtgacagtacaggaatttgctctgtttttcaccatctttgatgagaccaaaagctggtacttcactgaaaatatggaaagaaactgcagggctccctgcaatatccagatggaagatcccacttttaaagagaattatcgcttccatgcaatcaatggctacataatggatacactacctggcttagtaatggctcaggatcaaaggattcgatggtatctgctcagcatgggcagcaatgaaaacatccattctattcatttcagtggacatgtgttcactgtacgaaaaaaagaggagtataaaatggcactgtacaatctctatccaggtgtttttgagacagtggaaatgttaccatccaaagctggaatttggcgggtggaatgccttattggcgagcatctacatgctgggatgagcacactttttctggtgtacagcaataagtgtcagactcccctgggaatggcttctggacacattagagattttcagattacagcttcaggacaatatggacagtgggccccaaagctggccagacttcattattccggatcaatcaatgcctggagcaccaaggagcccttttcttggatcaaggtggatctgttggcaccaatgattattcacggcatcaagacccagggtgcccgtcagaagttctccagcctctacatctctcagtttatcatcatgtatagtcttgatgggaagaagtggcagacttatcgaggaaattccactggaaccttaatggtcttctttggcaatgtggattcatctgggataaaacacaatatttttaaccctccaattattgctcgatacatccgtttgcacccaactcattatagcattcgcagcactcttcgcatggagttgatgggctgtgatttaaatagttgcagcatgccattgggaatggagagtaaagcaatatcagatgcacagattactgcttcatcctactttaccaatatgtttgccacctggtctccttcaaaagctcgacttcacctccaagggaggagtaatgcctggagacctcaggtgaataatccaaaagagtggctgcaagtggacttccagaagacaatgaaagtcacaggagtaactactcagggagtaaaatctctgcttaccagcatgtatgtgaaggagttcctcatctccagcagtcaagatggccatcagtggactctcttttttcagaatggcaaagtaaaggtttttcagggaaatcaagactccttcacacctgtggtgaactctctagacccaccgttactgactcgctaccttcgaattcacccccagagttgggtgcaccagattgccctgaggatggaggttctgggctgcgaggcacaggacctctacggcgcgccaacatctaccgagccttccgaaggctctgcccctgggacctcagaatctgcaacccctgaaagcggccctggaacctccgaaagtgccactcccgagagcggcccagggacaagcgagtcagcaacccctgagtctggacccggcagcgagcctgcaacctctggctcagagactcccggctcagaacccgctacctcaggctccgagacacccggctctcctgctgggagtcccacttccaccgaggaaggaacatccactgagcctagtgagggctctgcccctggaaccagcacagagccaagtgagggcagtgcaccaggatccgagccagcaaccagcgggtccgagactcccgggacctctgagtctgccaccccagagagcggacccggcacttcaaccgagccctccgaaggatcagcaccaggtgcctcgagcgaacaaaaactcatctcagaagaggatctgtcacctgcaaccggtcatcatcaccatcaccattga

SEQ ID NO: 815 - protein, 1759 aa, synthetic construct
  REGION 1..1759: note = Description of Artificial Sequence: Synthetic polypeptide
ATRRYYLGAVELSWDYMQSDLGELPVDARFPPRVPKSFPFNTSVVYKKTLFVEFTDHLFNIAKPRPPWMGLLGPTIQAEVYDTVVITLKNMASHPVSLHAVGVSYWKASEGAEYDDQTSQREKEDDKVFPGGSHTYVWQVLKENGPMASDPLCLTYSYLSHVDLVKDLNSGLIGALLVCREGSLAKEKTQTLHKFILLFAVFDEGKSWHSETKNSLMQDRDAASARAWPKMHTVNGYVNRSLPGLIGCHRKSVYWHVIGMGTTPEVHSIFLEGHTFLVRNHRQASLEISPITFLTAQTLLMDLGQFLLFCHISSHQHDGMEAYVKVDSCPEEPQLRMKNNEEAEDYDDDLTDSEMDVVRFDDDNSPSFIQIRSVAKKHPKTWVHYIAAEEEDWDYAPLVLAPDDRSYKSQYLNNGPQRIGRKYKKVRFMAYTDETFKTREAIQHESGILGPLLYGEVGDTLLIIFKNQASRPYNIYPHGITDVRPLYSRRLPKGVKHLKDFPILPGEIFKYKWTVTVEDGPTKSDPRCLTRYYSSFVNMERDLASGLIGPLLICYKESVDQRGNQIMSDKRNVILFSVFDENRSWYLTENIQRFLPNPAGVQLEDPEFQASNIMHSINGYVFDSLQLSVCLHEVAYWYILSIGAQTDFLSVFFSGYTFKHKMVYEDTLTLFPFSGETVFMSMENPGLWILGCHNSDFRNRGMTALLKVSSCDKNTGDYYEDSYEDISAYLLSKNNAIEPRSFSQNGAPGTPGSGTASSSPGSSTPSGATGSPGASPGTSSTGSPGTPGSGTASSSPGSSTPSGATGSPGSSPSASTGTGPGSSPSASTGTGPGSSTPSGATGSPGSSTPSGATGSPGASPGTSSTGSPGASPGTSSTGSPGASPGTSSTGSPASSPPVLKRHQREITRTTLQSDQEEIDYDDTISVEMKKEDFDIYDEDENQSPRSFQKKTRHYFIAAVERLWDYGMSSSPHVLRNRAQSGSVPQFKKVVFQEFTDGSFTQPLYRGELNEHLGLLGPYIRAEVEDNIMVTFRNQASRPYSFYSSLISYEEDQRQGAEPRKNFVKPNETKTYFWKVQHHMAPTKDEFDCKAWAYFSDVDLEKDVHSGLIGPLLVCHTNTLNPAHGRQVTVQEFALFFTIFDETKSWYFTENMERNCRAPCNIQMEDPTFKENYRFHAINGYIMDTLPGLVMAQDQRIRWYLLSMGSNENIHSIHFSGHVFTVRKKEEYKMALYNLYPGVFETVEMLPSKAGIWRVECLIGEHLHAGMSTLFLVYSNKCQTPLGMASGHIRDFQITASGQYGQWAPKLARLHYSGSINAWSTKEPFSWIKVDLLAPMIIHGIKTQGARQKFSSLYISQFIIMYSLDGKKWQTYRGNSTGTLMVFFGNVDSSGIKHNIFNPPIIARYIRLHPTHYSIRSTLRMELMGCDLNSCSMPLGMESKAISDAQITASSYFTNMFATWSPSKARLHLQGRSNAWRPQVNNPKEWLQVDFQKTMKVTGVTTQGVKSLLTSMYVKEFLISSSQDGHQWTLFFQNGKVKVFQGNQDSFTPVVNSLDPPLLTRYLRIHPQSWVHQIALRMEVLGCEAQDLYGAPTSTEPSEGSAPGTSESATPESGPGTSESATPESGPGTSESATPESGPGSEPATSGSETPGSEPATSGSETPGSPAGSPTSTEEGTSTEPSEGSAPGTSTEPSEGSAPGSEPATSGSETPGTSESATPESGPGTSTEPSEGSAPGASSEQKLISEEDLSPATGHHHHHH

SEQ ID NO: 816 - DNA, 5280 bp, synthetic construct
  misc_feature 1..5280: note = Description of Artificial Sequence: Synthetic polynucleotide
  source 1..5280: mol_type = other DNA
gccaccagaagatactacctgggtgcagtggaactgtcatgggactatatgcaaagtgatctcggtgagctgcctgtggacgcaagatttcctcctagagtgccaaaatcttttccattcaacacctcagtcgtgtacaaaaagactctgtttgtagaattcacggatcaccttttcaacatcgctaagccaaggccaccctggatgggtctgctaggtcctaccatccaggctgaggtttatgatacagtggtcattacacttaagaacatggcttcccatcctgtcagtcttcatgctgttggtgtatcctactggaaagcttctgagggagctgaatatgatgatcagaccagtcaaagggagaaagaagatgataaagtcttccctggtggaagccatacatatgtctggcaggtcctgaaagagaatggtccaatggcctctgacccactgtgccttacctactcatatctttctcatgtggacctggtaaaagacttgaattcaggcctcattggagccctactagtatgtagagaagggagtctggccaaggaaaagacacagaccttgcacaaatttatactactttttgctgtatttgatgaagggaaaagttggcactcagaaacaaagaactccttgatgcaggatagggatgctgcatctgctcgggcctggcctaaaatgcacacagtcaatggttatgtaaacaggtctctgccaggtctgattggatgccacaggaaatcagtctattggcatgtgattggaatgggcaccactcctgaagtgcactcaatattcctcgaaggtcacacatttcttgtgaggaaccatcgccaggctagcttggaaatctcgccaataactttccttactgctcaaacactcttgatggaccttggacagtttctactgttttgtcatatctcttcccaccaacatgatggcatggaagcttatgtcaaagtagacagctgtccagaggaaccccaactacgaatgaaaaataatgaagaagcggaagactatgatgatgatcttactgattctgaaatggatgtggtcaggtttgatgatgacaactctccttcctttatccaaattcgctcagttgccaagaagcatcctaaaacttgggtacattacattgctgctgaagaggaggactgggactatgctcccttagtcctcgcccccgatgacagaagttataaaagtcaatatttgaacaatggccctcagcggattggtaggaagtacaaaaaagtccgatttatggcatacacagatgaaacctttaagactcgtgaagctattcagcatgaatcaggaatcttgggacctttactttatggggaagttggagacacactgttgattatatttaagaatcaagcaagcagaccatataacatctaccctcacggaatcactgatgtccgtcctttgtattcaaggagattaccaaaaggtgtaaaacatttgaaggattttccaattctgccaggagaaatattcaaatataaatggacagtgactgtagaagatgggccaactaaatcagatcctcggtgcctgacccgctattactctagtttcgttaatatggagagagatctagcttcaggactcattggccctctcctcatctgctacaaagaatctgtagatcaaagaggaaaccagataatgtcagacaagaggaatgtcatcctgttttctgtatttgatgagaaccgaagctggtacctcacagagaatatacaacgctttctccccaatccagctggagtgcagcttgaggatccagagttccaagcctccaacatcatgcacagcatcaatggctatgtttttgatagtttgcagttgtcagtttgtttgcatgaggtggcatactggtacattctaagcattggagcacagactgacttcctttctgtcttcttctctggatataccttcaaacacaaaatggtctatgaagacacactcaccctattcccattctcaggagaaactgtcttcatgtcgatggaaaacccaggtctatggattctggggtgccacaactcagactttcggaacagaggcatgaccgccttactgaaggtttctagttgtgacaagaacactggtgattattacgaggacagttatgaagatatttcagcatacttgctgagtaaaaacaatgccattgaaccaagaagcttctctcaaaacggcgcgccaggtacaccgggcagcggcacggcttcgtcgtcacccggctcgtccacaccgtcgggagctacgggaagcccaggagcgtcaccgggaacgtcgtcaacggggtcaccgggtacgccaggtagcggcacggccagcagctcgccaggttcatcgaccccgtcgggagcgactgggtcgcccggatcaagcccgtcagcttccactggaacaggacccgggtcgtcgccgtcagcctcaacggggacaggacctggttcatcgacgccgtcaggggcgacaggctcgcccggatcgtcaacaccctcgggggcaacggggagccctggtgcgtcgcctggaacctcatccaccggaagcccgggggcctcgccgggtacgagctccacgggatcgcccggagcgtcccccggaacttcaagcacagggagccctgcctcgagcccaccagtcttgaaacgccatcaacgggaaataactcgtactactcttcagtcagatcaagaggaaatcgattatgatgataccatatcagttgaaatgaagaaggaagattttgacatttatgatgaggatgaaaatcagagcccccgcagctttcaaaagaaaacacgacactattttattgctgcagtggagaggctctgggattatgggatgagtagctccccacatgttctaagaaacagggctcagagtggcagtgtccctcagttcaagaaagttgttttccaggaatttactgatggctcctttactcagcccttataccgtggagaactaaatgaacatttgggactcctggggccatatataagagcagaagttgaagataatatcatggtaactttcagaaatcaggcctctcgtccctattccttctattctagccttatttcttatgaggaagatcagaggcaaggagcagaacctagaaaaaactttgtcaagcctaatgaaaccaaaacttacttttggaaagtgcaacatcatatggcacccactaaagatgagtttgactgcaaagcctgggcttatttctctgatgttgacctggaaaaagatgtgcactcaggcctgattggaccccttctggtctgccacactaacacactgaaccctgctcatgggagacaagtgacagtacaggaatttgctctgtttttcaccatctttgatgagaccaaaagctggtacttcactgaaaatatggaaagaaactgcagggctccctgcaatatccagatggaagatcccacttttaaagagaattatcgcttccatgcaatcaatggctacataatggatacactacctggcttagtaatggctcaggatcaaaggattcgatggtatctgctcagcatgggcagcaatgaaaacatccattctattcatttcagtggacatgtgttcactgtacgaaaaaaagaggagtataaaatggcactgtacaatctctatccaggtgtttttgagacagtggaaatgttaccatccaaagctggaatttggcgggtggaatgccttattggcgagcatctacatgctgggatgagcacactttttctggtgtacagcaataagtgtcagactcccctgggaatggcttctggacacattagagattttcagattacagcttcaggacaatatggacagtgggccccaaagctggccagacttcattattccggatcaatcaatgcctggagcaccaaggagcccttttcttggatcaaggtggatctgttggcaccaatgattattcacggcatcaagacccagggtgcccgtcagaagttctccagcctctacatctctcagtttatcatcatgtatagtcttgatgggaagaagtggcagacttatcgaggaaattccactggaaccttaatggtcttctttggcaatgtggattcatctgggataaaacacaatatttttaaccctccaattattgctcgatacatccgtttgcacccaactcattatagcattcgcagcactcttcgcatggagttgatgggctgtgatttaaatagttgcagcatgccattgggaatggagagtaaagcaatatcagatgcacagattactgcttcatcctactttaccaatatgtttgccacctggtctccttcaaaagctcgacttcacctccaagggaggagtaatgcctggagacctcaggtgaataatccaaaagagtggctgcaagtggacttccagaagacaatgaaagtcacaggagtaactactcagggagtaaaatctctgcttaccagcatgtatgtgaaggagttcctcatctccagcagtcaagatggccatcagtggactctcttttttcagaatggcaaagtaaaggtttttcagggaaatcaagactccttcacacctgtggtgaactctctagacccaccgttactgactcgctaccttcgaattcacccccagagttgggtgcaccagattgccctgaggatggaggttctgggctgcgaggcacaggacctctacggcgcgccaacatctaccgagccttccgaaggctctgcccctgggacctcagaatctgcaacccctgaaagcggccctggaacctccgaaagtgccactcccgagagcggcccagggacaagcgagtcagcaacccctgagtctggacccggcagcgagcctgcaacctctggctcagagactcccggctcagaacccgctacctcaggctccgagacacccggctctcctgctgggagtcccacttccaccgaggaaggaacatccactgagcctagtgagggctctgcccctggaaccagcacagagccaagtgagggcagtgcaccaggatccgagccagcaaccagcgggtccgagactcccgggacctctgagtctgccaccccagagagcggacccggcacttcaaccgagccctccgaaggatcagcaccaggtgcctcgagcgaacaaaaactcatctcagaagaggatctgtcacctgcaaccggtcatcatcaccatcaccattga

SEQ ID NO: 817 - protein, 1759 aa, synthetic construct
  REGION 1..1759: note = Description of Artificial Sequence: Synthetic polypeptide
ATRRYYLGAVELSWDYMQSDLGELPVDARFPPRVPKSFPFNTSVVYKKTLFVEFTDHLFNIAKPRPPWMGLLGPTIQAEVYDTVVITLKNMASHPVSLHAVGVSYWKASEGAEYDDQTSQREKEDDKVFPGGSHTYVWQVLKENGPMASDPLCLTYSYLSHVDLVKDLNSGLIGALLVCREGSLAKEKTQTLHKFILLFAVFDEGKSWHSETKNSLMQDRDAASARAWPKMHTVNGYVNRSLPGLIGCHRKSVYWHVIGMGTTPEVHSIFLEGHTFLVRNHRQASLEISPITFLTAQTLLMDLGQFLLFCHISSHQHDGMEAYVKVDSCPEEPQLRMKNNEEAEDYDDDLTDSEMDVVRFDDDNSPSFIQIRSVAKKHPKTWVHYIAAEEEDWDYAPLVLAPDDRSYKSQYLNNGPQRIGRKYKKVRFMAYTDETFKTREAIQHESGILGPLLYGEVGDTLLIIFKNQASRPYNIYPHGITDVRPLYSRRLPKGVKHLKDFPILPGEIFKYKWTVTVEDGPTKSDPRCLTRYYSSFVNMERDLASGLIGPLLICYKESVDQRGNQIMSDKRNVILFSVFDENRSWYLTENIQRFLPNPAGVQLEDPEFQASNIMHSINGYVFDSLQLSVCLHEVAYWYILSIGAQTDFLSVFFSGYTFKHKMVYEDTLTLFPFSGETVFMSMENPGLWILGCHNSDFRNRGMTALLKVSSCDKNTGDYYEDSYEDISAYLLSKNNAIEPRSFSQNGAPSPAGSPTSTEEGTSESATPESGPGSEPATSGSETPGTSESATPESGPGTSTEPSEGSAPGTSTEPSEGSAPGTSTEPSEGSAPGTSTEPSEGSAPGTSTEPSEGSAPGTSTEPSEGSAPGSPAGSPTSTEEGTSTEPSEGSAPGASSPPVLKRHQAEITRTTLQSDQEEIDYDDTISVEMKKEDFDIYDEDENQSPRSFQKKTRHYFIAAVERLWDYGMSSSPHVLRNRAQSGSVPQFKKVVFQEFTDGSFTQPLYRGELNEHLGLLGPYIRAEVEDNIMVTFRNQASRPYSFYSSLISYEEDQRQGAEPRKNFVKPNETKTYFWKVQHHMAPTKDEFDCKAWAYFSDVDLEKDVHSGLIGPLLVCHTNTLNPAHGRQVTVQEFALFFTIFDETKSWYFTENMERNCRAPCNIQMEDPTFKENYRFHAINGYIMDTLPGLVMAQDQRIRWYLLSMGSNENIHSIHFSGHVFTVRKKEEYKMALYNLYPGVFETVEMLPSKAGIWRVECLIGEHLHAGMSTLFLVYSNKCQTPLGMASGHIRDFQITASGQYGQWAPKLARLHYSGSINAWSTKEPFSWIKVDLLAPMIIHGIKTQGARQKFSSLYISQFIIMYSLDGKKWQTYRGNSTGTLMVFFGNVDSSGIKHNIFNPPIIARYIRLHPTHYSIRSTLRMELMGCDLNSCSMPLGMESKAISDAQITASSYFTNMFATWSPSKARLHLQGRSNAWRPQVNNPKEWLQVDFQKTMKVTGVTTQGVKSLLTSMYVKEFLISSSQDGHQWTLFFQNGKVKVFQGNQDSFTPVVNSLDPPLLTRYLRIHPQSWVHQIALRMEVLGCEAQDLYGAPTSTEPSEGSAPGTSESATPESGPGTSESATPESGPGTSESATPESGPGSEPATSGSETPGSEPATSGSETPGSPAGSPTSTEEGTSTEPSEGSAPGTSTEPSEGSAPGSEPATSGSETPGTSESATPESGPGTSTEPSEGSAPGASSEQKLISEEDLSPATGHHHHHH

SEQ ID NO: 818 - DNA, 5280 bp, synthetic construct
  misc_feature 1..5280: note = Description of Artificial Sequence: Synthetic polynucleotide
  source 1..5280: mol_type = other DNA
gccaccagaagatactacctgggtgcagtggaactgtcatgggactatatgcaaagtgatctcggtgagctgcctgtggacgcaagatttcctcctagagtgccaaaatcttttccattcaacacctcagtcgtgtacaaaaagactctgtttgtagaattcacggatcaccttttcaacatcgctaagccaaggccaccctggatgggtctgctaggtcctaccatccaggctgaggtttatgatacagtggtcattacacttaagaacatggcttcccatcctgtcagtcttcatgctgttggtgtatcctactggaaagcttctgagggagctgaatatgatgatcagaccagtcaaagggagaaagaagatgataaagtcttccctggtggaagccatacatatgtctggcaggtcctgaaagagaatggtccaatggcctctgacccactgtgccttacctactcatatctttctcatgtggacctggtaaaagacttgaattcaggcctcattggagccctactagtatgtagagaagggagtctggccaaggaaaagacacagaccttgcacaaatttatactactttttgctgtatttgatgaagggaaaagttggcactcagaaacaaagaactccttgatgcaggatagggatgctgcatctgctcgggcctggcctaaaatgcacacagtcaatggttatgtaaacaggtctctgccaggtctgattggatgccacaggaaatcagtctattggcatgtgattggaatgggcaccactcctgaagtgcactcaatattcctcgaaggtcacacatttcttgtgaggaaccatcgccaggctagcttggaaatctcgccaataactttccttactgctcaaacactcttgatggaccttggacagtttctactgttttgtcatatctcttcccaccaacatgatggcatggaagcttatgtcaaagtagacagctgtccagaggaaccccaactacgaatgaaaaataatgaagaagcggaagactatgatgatgatcttactgattctgaaatggatgtggtcaggtttgatgatgacaactctccttcctttatccaaattcgctcagttgccaagaagcatcctaaaacttgggtacattacattgctgctgaagaggaggactgggactatgctcccttagtcctcgcccccgatgacagaagttataaaagtcaatatttgaacaatggccctcagcggattggtaggaagtacaaaaaagtccgatttatggcatacacagatgaaacctttaagactcgtgaagctattcagcatgaatcaggaatcttgggacctttactttatggggaagttggagacacactgttgattatatttaagaatcaagcaagcagaccatataacatctaccctcacggaatcactgatgtccgtcctttgtattcaaggagattaccaaaaggtgtaaaacatttgaaggattttccaattctgccaggagaaatattcaaatataaatggacagtgactgtagaagatgggccaactaaatcagatcctcggtgcctgacccgctattactctagtttcgttaatatggagagagatctagcttcaggactcattggccctctcctcatctgctacaaagaatctgtagatcaaagaggaaaccagataatgtcagacaagaggaatgtcatcctgttttctgtatttgatgagaaccgaagctggtacctcacagagaatatacaacgctttctccccaatccagctggagtgcagcttgaggatccagagttccaagcctccaacatcatgcacagcatcaatggctatgtttttgatagtttgcagttgtcagtttgtttgcatgaggtggcatactggtacattctaagcattggagcacagactgacttcctttctgtcttcttctctggatataccttcaaacacaaaatggtctatgaagacacactcaccctattcccattctcaggagaaactgtcttcatgtcgatggaaaacccaggtctatggattctggggtgccacaactcagactttcggaacagaggcatgaccgccttactgaaggtttctagttgtgacaagaacactggtgattattacgaggacagttatgaagatatttcagcatacttgctgagtaaaaacaatgccattgaaccaagaagcttctctcaaaacggcgcgccaagtcccgctggaagcccaactagcaccgaagaggggacctcagagtccgccacccccgagtccggccctggctctgagcctgccactagcggctccgagactcctggcacatccgaaagcgctacacccgagagtggacccggcacctctaccgagcccagtgagggctccgcccctggaacaagcaccgagcccagcgaaggcagcgccccagggacctccacagagcccagtgaaggcagtgctcctggcaccagcaccgaaccaagcgagggctctgcacccgggacctccaccgagccaagcgaaggctctgcccctggcacttccaccgagcccagcgaaggcagcgcccctgggagccccgctggctctcccaccagcactgaggagggcacatctaccgaaccaagtgaaggctctgcaccaggtgcctcgagcccaccagtcttgaaacgccatcaagctgaaataactcgtactactcttcagtcagatcaagaggaaatcgattatgatgataccatatcagttgaaatgaagaaggaagattttgacatttatgatgaggatgaaaatcagagcccccgcagctttcaaaagaaaacacgacactattttattgctgcagtggagaggctctgggattatgggatgagtagctccccacatgttctaagaaacagggctcagagtggcagtgtccctcagttcaagaaagttgttttccaggaatttactgatggctcctttactcagcccttataccgtggagaactaaatgaacatttgggactcctggggccatatataagagcagaagttgaagataatatcatggtaactttcagaaatcaggcctctcgtccctattccttctattctagccttatttcttatgaggaagatcagaggcaaggagcagaacctagaaaaaactttgtcaagcctaatgaaaccaaaacttacttttggaaagtgcaacatcatatggcacccactaaagatgagtttgactgcaaagcctgggcttatttctctgatgttgacctggaaaaagatgtgcactcaggcctgattggaccccttctggtctgccacactaacacactgaaccctgctcatgggagacaagtgacagtacaggaatttgctctgtttttcaccatctttgatgagaccaaaagctggtacttcactgaaaatatggaaagaaactgcagggctccctgcaatatccagatggaagatcccacttttaaagagaattatcgcttccatgcaatcaatggctacataatggatacactacctggcttagtaatggctcaggatcaaaggattcgatggtatctgctcagcatgggcagcaatgaaaacatccattctattcatttcagtggacatgtgttcactgtacgaaaaaaagaggagtataaaatggcactgtacaatctctatccaggtgtttttgagacagtggaaatgttaccatccaaagctggaatttggcgggtggaatgccttattggcgagcatctacatgctgggatgagcacactttttctggtgtacagcaataagtgtcagactcccctgggaatggcttctggacacattagagattttcagattacagcttcaggacaatatggacagtgggccccaaagctggccagacttcattattccggatcaatcaatgcctggagcaccaaggagcccttttcttggatcaaggtggatctgttggcaccaatgattattcacggcatcaagacccagggtgcccgtcagaagttctccagcctctacatctctcagtttatcatcatgtatagtcttgatgggaagaagtggcagacttatcgaggaaattccactggaaccttaatggtcttctttggcaatgtggattcatctgggataaaacacaatatttttaaccctccaattattgctcgatacatccgtttgcacccaactcattatagcattcgcagcactcttcgcatggagttgatgggctgtgatttaaatagttgcagcatgccattgggaatggagagtaaagcaatatcagatgcacagattactgcttcatcctactttaccaatatgtttgccacctggtctccttcaaaagctcgacttcacctccaagggaggagtaatgcctggagacctcaggtgaataatccaaaagagtggctgcaagtggacttccagaagacaatgaaagtcacaggagtaactactcagggagtaaaatctctgcttaccagcatgtatgtgaaggagttcctcatctccagcagtcaagatggccatcagtggactctcttttttcagaatggcaaagtaaaggtttttcagggaaatcaagactccttcacacctgtggtgaactctctagacccaccgttactgactcgctaccttcgaattcacccccagagttgggtgcaccagattgccctgaggatggaggttctgggctgcgaggcacaggacctctacggcgcgccaacatctaccgagccttccgaaggctctgcccctgggacctcagaatctgcaacccctgaaagcggccctggaacctccgaaagtgccactcccgagagcggcccagggacaagcgagtcagcaacccctgagtctggacccggcagcgagcctgcaacctctggctcagagactcccggctcagaacccgctacctcaggctccgagacacccggctctcctgctgggagtcccacttccaccgaggaaggaacatccactgagcctagtgagggctctgcccctggaaccagcacagagccaagtgagggcagtgcaccaggatccgagccagcaaccagcgggtccgagactcccgggacctctgagtctgccaccccagagagcggacccggcacttcaaccgagccctccgaaggatcagcaccaggtgcctcgagcgaacaaaaactcatctcagaagaggatctgtcacctgcaaccggtcatcatcaccatcaccattga

SEQ ID NO: 819 - protein, 1903 aa, synthetic construct
  REGION 1..1903: note = Description of Artificial Sequence: Synthetic polypeptide
ATRRYYLGAVELSWDYMQSDLGELPVDARFPPRVPKSFPFNTSVVYKKTLFVEFTDHLFNIAKPRPPWMGLLGPTIQAEVYDTVVITLKNMASHPVSLHAVGVSYWKASEGAEYDDQTSQREKEDDKVFPGGSHTYVWQVLKENGPMASDPLCLTYSYLSHVDLVKDLNSGLIGALLVCREGSLAKEKTQTLHKFILLFAVFDEGKSWHSETKNSLMQDRDAASARAWPKMHTVNGYVNRSLPGLIGCHRKSVYWHVIGMGTTPEVHSIFLEGHTFLVRNHRQASLEISPITFLTAQTLLMDLGQFLLFCHISSHQHDGMEAYVKVDSCPEEPQLRMKNNEEAEDYDDDLTDSEMDVVRFDDDNSPSFIQIRSVAKKHPKTWVHYIAAEEEDWDYAPLVLAPDDRSYKSQYLNNGPQRIGRKYKKVRFMAYTDETFKTREAIQHESGILGPLLYGEVGDTLLIIFKNQASRPYNIYPHGITDVRPLYSRRLPKGVKHLKDFPILPGEIFKYKWTVTVEDGPTKSDPRCLTRYYSSFVNMERDLASGLIGPLLICYKESVDQRGNQIMSDKRNVILFSVFDENRSWYLTENIQRFLPNPAGVQLEDPEFQASNIMHSINGYVFDSLQLSVCLHEVAYWYILSIGAQTDFLSVFFSGYTFKHKMVYEDTLTLFPFSGETVFMSMENPGLWILGCHNSDFRNRGMTALLKVSSCDKNTGDYYEDSYEDISAYLLSKNNAIEPRSFSQNGAPGTSESATPESGPGSEPATSGSETPGTSESATPESGPGSEPATSGSETPGTSESATPESGPGTSTEPSEGSAPGSPAGSPTSTEEGTSESATPESGPGSEPATSGSETPGTSESATPESGPGSPAGSPTSTEEGSPAGSPTSTEEGTSTEPSEGSAPGTSESATPESGPGTSESATPESGPGTSESATPESGPGSEPATSGSETPGSEPATSGSETPGSPAGSPTSTEEGTSTEPSEGSAPGTSTEPSEGSAPGSEPATSGSETPGTSESATPESGPGTSTEPSEGSAPASSPPVLKRHQAEITRTTLQSDQEEIDYDDTISVEMKKEDFDIYDEDENQSPRSFQKKTRHYFIAAVERLWDYGMSSSPHVLRNRAQSGSVPQFKKVVFQEFTDGSFTQPLYRGELNEHLGLLGPYIRAEVEDNIMVTFRNQASRPYSFYSSLISYEEDQRQGAEPRKNFVKPNETKTYFWKVQHHMAPTKDEFDCKAWAYFSDVDLEKDVHSGLIGPLLVCHTNTLNPAHGRQVTVQEFALFFTIFDETKSWYFTENMERNCRAPCNIQMEDPTFKENYRFHAINGYIMDTLPGLVMAQDQRIRWYLLSMGSNENIHSIHFSGHVFTVRKKEEYKMALYNLYPGVFETVEMLPSKAGIWRVECLIGEHLHAGMSTLFLVYSNKCQTPLGMASGHIRDFQITASGQYGQWAPKLARLHYSGSINAWSTKEPFSWIKVDLLAPMIIHGIKTQGARQKFSSLYISQFIIMYSLDGKKWQTYRGNSTGTLMVFFGNVDSSGIKHNIFNPPIIARYIRLHPTHYSIRSTLRMELMGCDLNSCSMPLGMESKAISDAQITASSYFTNMFATWSPSKARLHLQGRSNAWRPQVNNPKEWLQVDFQKTMKVTGVTTQGVKSLLTSMYVKEFLISSSQDGHQWTLFFQNGKVKVFQGNQDSFTPVVNSLDPPLLTRYLRIHPQSWVHQIALRMEVLGCEAQDLYGAPTSTEPSEGSAPGTSESATPESGPGTSESATPESGPGTSESATPESGPGSEPATSGSETPGSEPATSGSETPGSPAGSPTSTEEGTSTEPSEGSAPGTSTEPSEGSAPGSEPATSGSETPGTSESATPESGPGTSTEPSEGSAPGASSEQKLISEEDLSPATGHHHHHH

SEQ ID NO: 820 - DNA, 5712 bp, synthetic construct
  misc_feature 1..5712: note = Description of Artificial Sequence: Synthetic polynucleotide
  source 1..5712: mol_type = other DNA
gccaccagaagatactacctgggtgcagtggaactgtcatgggactatatgcaaagtgatctcggtgagctgcctgtggacgcaagatttcctcctagagtgccaaaatcttttccattcaacacctcagtcgtgtacaaaaagactctgtttgtagaattcacggatcaccttttcaacatcgctaagccaaggccaccctggatgggtctgctaggtcctaccatccaggctgaggtttatgatacagtggtcattacacttaagaacatggcttcccatcctgtcagtcttcatgctgttggtgtatcctactggaaagcttctgagggagctgaatatgatgatcagaccagtcaaagggagaaagaagatgataaagtcttccctggtggaagccatacatatgtctggcaggtcctgaaagagaatggtccaatggcctctgacccactgtgccttacctactcatatctttctcatgtggacctggtaaaagacttgaattcaggcctcattggagccctactagtatgtagagaagggagtctggccaaggaaaagacacagaccttgcacaaatttatactactttttgctgtatttgatgaagggaaaagttggcactcagaaacaaagaactccttgatgcaggatagggatgctgcatctgctcgggcctggcctaaaatgcacacagtcaatggttatgtaaacaggtctctgccaggtctgattggatgccacaggaaatcagtctattggcatgtgattggaatgggcaccactcctgaagtgcactcaatattcctcgaaggtcacacatttcttgtgaggaaccatcgccaggctagcttggaaatctcgccaataactttccttactgctcaaacactcttgatggaccttggacagtttctactgttttgtcatatctcttcccaccaacatgatggcatggaagcttatgtcaaagtagacagctgtccagaggaaccccaactacgaatgaaaaataatgaagaagcggaagactatgatgatgatcttactgattctgaaatggatgtggtcaggtttgatgatgacaactctccttcctttatccaaattcgctcagttgccaagaagcatcctaaaacttgggtacattacattgctgctgaagaggaggactgggactatgctcccttagtcctcgcccccgatgacagaagttataaaagtcaatatttgaacaatggccctcagcggattggtaggaagtacaaaaaagtccgatttatggcatacacagatgaaacctttaagactcgtgaagctattcagcatgaatcaggaatcttgggacctttactttatggggaagttggagacacactgttgattatatttaagaatcaagcaagcagaccatataacatctaccctcacggaatcactgatgtccgtcctttgtattcaaggagattaccaaaaggtgtaaaacatttgaaggattttccaattctgccaggagaaatattcaaatataaatggacagtgactgtagaagatgggccaactaaatcagatcctcggtgcctgacccgctattactctagtttcgttaatatggagagagatctagcttcaggactcattggccctctcctcatctgctacaaagaatctgtagatcaaagaggaaaccagataatgtcagacaagaggaatgtcatcctgttttctgtatttgatgagaaccgaagctggtacctcacagagaatatacaacgctttctccccaatccagctggagtgcagcttgaggatccagagttccaagcctccaacatcatgcacagcatcaatggctatgtttttgatagtttgcagttgtcagtttgtttgcatgaggtggcatactggtacattctaagcattggagcacagactgacttcctttctgtcttcttctctggatataccttcaaacacaaaatggtctatgaagacacactcaccctattcccattctcaggagaaactgtcttcatgtcgatggaaaacccaggtctatggattctggggtgccacaactcagactttcggaacagaggcatgaccgccttactgaaggtttctagttgtgacaagaacactggtgattattacgaggacagttatgaagatatttcagcatacttgctgagtaaaaacaatgccattgaaccaagaagcttctctcaaaacggcgcgccaggtacctcagagtctgctacccccgagtcagggccaggatcagagccagccacctccgggtctgagacacccgggacttccgagagtgccacccctgagtccggacccgggtccgagcccgccacttccggctccgaaactcccggcacaagcgagagcgctaccccagagtcaggaccaggaacatctacagagccctctgaaggctccgctccagggtccccagccggcagtcccactagcaccgaggagggaacctctgaaagcgccacacccgaatcagggccagggtctgagcctgctaccagcggcagcgagacaccaggcacctctgagtccgccacaccagagtccggacccggatctcccgctgggagccccacctccactgaggagggatctcctgctggctctccaacatctactgaggaaggtacctcaaccgagccatccgagggatcagctcccggcacctcagagtcggcaaccccggagtctggacccggaacttccgaaagtgccacaccagagtccggtcccgggacttcagaatcagcaacacccgagtccggccctgggtctgaacccgccacaagtggtagtgagacaccaggatcagaacctgctacctcagggtcagagacacccggatctccggcaggctcaccaacctccactgaggagggcaccagcacagaaccaagcgagggctccgcacccggaacaagcactgaacccagtgagggttcagcacccggctctgagccggccacaagtggcagtgagacacccggcacttcagagagtgccacccccgagagtggcccaggcactagtaccgagccctctgaaggcagtgcgccagcctcgagcccaccagtcttgaaacgccatcaagctgaaataactcgtactactcttcagtcagatcaagaggaaatcgattatgatgataccatatcagttgaaatgaagaaggaagattttgacatttatgatgaggatgaaaatcagagcccccgcagctttcaaaagaaaacacgacactattttattgctgcagtggagaggctctgggattatgggatgagtagctccccacatgttctaagaaacagggctcagagtggcagtgtccctcagttcaagaaagttgttttccaggaatttactgatggctcctttactcagcccttataccgtggagaactaaatgaacatttgggactcctggggccatatataagagcagaagttgaagataatatcatggtaactttcagaaatcaggcctctcgtccctattccttctattctagccttatttcttatgaggaagatcagaggcaaggagcagaacctagaaaaaactttgtcaagcctaatgaaaccaaaacttacttttggaaagtgcaacatcatatggcacccactaaagatgagtttgactgcaaagcctgggcttatttctctgatgttgacctggaaaaagatgtgcactcaggcctgattggaccccttctggtctgccacactaacacactgaaccctgctcatgggagacaagtgacagtacaggaatttgctctgtttttcaccatctttgatgagaccaaaagctggtacttcactgaaaatatggaaagaaactgcagggctccctgcaatatccagatggaagatcccacttttaaagagaattatcgcttccatgcaatcaatggctacataatggatacactacctggcttagtaatggctcaggatcaaaggattcgatggtatctgctcagcatgggcagcaatgaaaacatccattctattcatttcagtggacatgtgttcactgtacgaaaaaaagaggagtataaaatggcactgtacaatctctatccaggtgtttttgagacagtggaaatgttaccatccaaagctggaatttggcgggtggaatgccttattggcgagcatctacatgctgggatgagcacactttttctggtgtacagcaataagtgtcagactcccctgggaatggcttctggacacattagagattttcagattacagcttcaggacaatatggacagtgggccccaaagctggccagacttcattattccggatcaatcaatgcctggagcaccaaggagcccttttcttggatcaaggtggatctgttggcaccaatgattattcacggcatcaagacccagggtgcccgtcagaagttctccagcctctacatctctcagtttatcatcatgtatagtcttgatgggaagaagtggcagacttatcgaggaaattccactggaaccttaatggtcttctttggcaatgtggattcatctgggataaaacacaatatttttaaccctccaattattgctcgatacatccgtttgcacccaactcattatagcattcgcagcactcttcgcatggagttgatgggctgtgatttaaatagttgcagcatgccattgggaatggagagtaaagcaatatcagatgcacagattactgcttcatcctactttaccaatatgtttgccacctggtctccttcaaaagctcgacttcacctccaagggaggagtaatgcctggagacctcaggtgaataatccaaaagagtggctgcaagtggacttccagaagacaatgaaagtcacaggagtaactactcagggagtaaaatctctgcttaccagcatgtatgtgaaggagttcctcatctccagcagtcaagatggccatcagtggactctcttttttcagaatggcaaagtaaaggtttttcagggaaatcaagactccttcacacctgtggtgaactctctagacccaccgttactgactcgctaccttcgaattcacccccagagttgggtgcaccagattgccctgaggatggaggttctgggctgcgaggcacaggacctctacggcgcgccaacatctaccgagccttccgaaggctctgcccctgggacctcagaatctgcaacccctgaaagcggccctggaacctccgaaagtgccactcccgagagcggcccagggacaagcgagtcagcaacccctgagtctggacccggcagcgagcctgcaacctctggctcagagactcccggctcagaacccgctacctcaggctccgagacacccggctctcctgctgggagtcccacttccaccgaggaaggaacatccactgagcctagtgagggctctgcccctggaaccagcacagagccaagtgagggcagtgcaccaggatccgagccagcaaccagcgggtccgagactcccgggacctctgagtctgccaccccagagagcggacccggcacttcaaccgagccctccgaaggatcagcaccaggtgcctcgagcgaacaaaaactcatctcagaagaggatctgtcacctgcaaccggtcatcatcaccatcaccattga

SEQ ID NO: 821 - protein, 1903 aa, synthetic construct
  REGION 1..1903: note = Description of Artificial Sequence: Synthetic polypeptide
ATRRYYLGAVELSWDYMQSDLGELPVDARFPPRVPKSFPFNTSVVYKKTLFVEFTDHLFNIAKPRPPWMGLLGPTIQAEVYDTVVITLKNMASHPVSLHAVGVSYWKASEGAEYDDQTSQREKEDDKVFPGGSHTYVWQVLKENGPMASDPLCLTYSYLSHVDLVKDLNSGLIGALLVCREGSLAKEKTQTLHKFILLFAVFDEGKSWHSETKNSLMQDRDAASARAWPKMHTVNGYVNRSLPGLIGCHRKSVYWHVIGMGTTPEVHSIFLEGHTFLVRNHRQASLEISPITFLTAQTLLMDLGQFLLFCHISSHQHDGMEAYVKVDSCPEEPQLRMKNNEEAEDYDDDLTDSEMDVVRFDDDNSPSFIQIRSVAKKHPKTWVHYIAAEEEDWDYAPLVLAPDDRSYKSQYLNNGPQRIGRKYKKVRFMAYTDETFKTREAIQHESGILGPLLYGEVGDTLLIIFKNQASRPYNIYPHGITDVRPLYSRRLPKGVKHLKDFPILPGEIFKYKWTVTVEDGPTKSDPRCLTRYYSSFVNMERDLASGLIGPLLICYKESVDQRGNQIMSDKRNVILFSVFDENRSWYLTENIQRFLPNPAGVQLEDPEFQASNIMHSINGYVFDSLQLSVCLHEVAYWYILSIGAQTDFLSVFFSGYTFKHKMVYEDTLTLFPFSGETVFMSMENPGLWILGCHNSDFRNRGMTALLKVSSCDKNTGDYYEDSYEDISAYLLSKNNAIEPRSFSQNGAPPGASPGTSSTGSPGASPGTSSTGSPGTPGSGTASSSPGSSTPSGATGSPGTPGSGTASSSPGSSTPSGATGSPGTPGSGTASSSPGSSTPSGATGSPGSSTPSGATGSPGSSPSASTGTGPGSSPSASTGTGPGASPGTSSTGSPGTPGSGTASSSPGSSTPSGATGSPGSSPSASTGTGPGSSPSASTGTGPGASPGTSSTGSPGASPGTSSTGSPGSSTPSGATGSPGSSPSASTGTGPGASPGTSSTGSPGSSPSASTGTGPGTPGSGTASSSPGSSTPSGATGSASSPPVLKRHQAEITRTTLQSDQEEIDYDDTISVEMKKEDFDIYDEDENQSPRSFQKKTRHYFIAAVERLWDYGMSSSPHVLRNRAQSGSVPQFKKVVFQEFTDGSFTQPLYRGELNEHLGLLGPYIRAEVEDNIMVTFRNQASRPYSFYSSLISYEEDQRQGAEPRKNFVKPNETKTYFWKVQHHMAPTKDEFDCKAWAYFSDVDLEKDVHSGLIGPLLVCHTNTLNPAHGRQVTVQEFALFFTIFDETKSWYFTENMERNCRAPCNIQMEDPTFKENYRFHAINGYIMDTLPGLVMAQDQRIRWYLLSMGSNENIHSIHFSGHVFTVRKKEEYKMALYNLYPGVFETVEMLPSKAGIWRVECLIGEHLHAGMSTLFLVYSNKCQTPLGMASGHIRDFQITASGQYGQWAPKLARLHYSGSINAWSTKEPFSWIKVDLLAPMIIHGIKTQGARQKFSSLYISQFIIMYSLDGKKWQTYRGNSTGTLMVFFGNVDSSGIKHNIFNPPIIARYIRLHPTHYSIRSTLRMELMGCDLNSCSMPLGMESKAISDAQITASSYFTNMFATWSPSKARLHLQGRSNAWRPQVNNPKEWLQVDFQKTMKVTGVTTQGVKSLLTSMYVKEFLISSSQDGHQWTLFFQNGKVKVFQGNQDSFTPVVNSLDPPLLTRYLRIHPQSWVHQIALRMEVLGCEAQDLYGAPTSTEPSEGSAPGTSESATPESGPGTSESATPESGPGTSESATPESGPGSEPATSGSETPGSEPATSGSETPGSPAGSPTSTEEGTSTEPSEGSAPGTSTEPSEGSAPGSEPATSGSETPGTSESATPESGPGTSTEPSEGSAPGASSEQKLISEEDLSPATGHHHHHH

SEQ ID NO: 822 - DNA, 5712 bp, synthetic construct
  misc_feature 1..5712: note = Description of Artificial Sequence: Synthetic polynucleotide
  source 1..5712: mol_type = other DNA
gccaccagaagatactacctgggtgcagtggaactgtcatgggactatatgcaaagtgatctcggtgagctgcctgtggacgcaagatttcctcctagagtgccaaaatcttttccattcaacacctcagtcgtgtacaaaaagactctgtttgtagaattcacggatcaccttttcaacatcgctaagccaaggccaccctggatgggtctgctaggtcctaccatccaggctgaggtttatgatacagtggtcattacacttaagaacatggcttcccatcctgtcagtcttcatgctgttggtgtatcctactggaaagcttctgagggagctgaatatgatgatcagaccagtcaaagggagaaagaagatgataaagtcttccctggtggaagccatacatatgtctggcaggtcctgaaagagaatggtccaatggcctctgacccactgtgccttacctactcatatctttctcatgtggacctggtaaaagacttgaattcaggcctcattggagccctactagtatgtagagaagggagtctggccaaggaaaagacacagaccttgcacaaatttatactactttttgctgtatttgatgaagggaaaagttggcactcagaaacaaagaactccttgatgcaggatagggatgctgcatctgctcgggcctggcctaaaatgcacacagtcaatggttatgtaaacaggtctctgccaggtctgattggatgccacaggaaatcagtctattggcatgtgattggaatgggcaccactcctgaagtgcactcaatattcctcgaaggtcacacatttcttgtgaggaaccatcgccaggctagcttggaaatctcgccaataactttccttactgctcaaacactcttgatggaccttggacagtttctactgttttgtcatatctcttcccaccaacatgatggcatggaagcttatgtcaaagtagacagctgtccagaggaaccccaactacgaatgaaaaataatgaagaagcggaagactatgatgatgatcttactgattctgaaatggatgtggtcaggtttgatgatgacaactctccttcctttatccaaattcgctcagttgccaagaagcatcctaaaacttgggtacattacattgctgctgaagaggaggactgggactatgctcccttagtcctcgcccccgatgacagaagttataaaagtcaatatttgaacaatggccctcagcggattggtaggaagtacaaaaaagtccgatttatggcatacacagatgaaacctttaagactcgtgaagctattcagcatgaatcaggaatcttgggacctttactttatggggaagttggagacacactgttgattatatttaagaatcaagcaagcagaccatataacatctaccctcacggaatcactgatgtccgtcctttgtattcaaggagattaccaaaaggtgtaaaacatttgaaggattttccaattctgccaggagaaatattcaaatataaatggacagtgactgtagaagatgggccaactaaatcagatcctcggtgcctgacccgctattactctagtttcgttaatatggagagagatctagcttcaggactcattggccctctcctcatctgctacaaagaatctgtagatcaaagaggaaaccagataatgtcagacaagaggaatgtcatcctgttttctgtatttgatgagaaccgaagctggtacctcacagagaatatacaacgctttctccccaatccagctggagtgcagcttgaggatccagagttccaagcctccaacatcatgcacagcatcaatggctatgtttttgatagtttgcagttgtcagtttgtttgcatgaggtggcatactggtacattctaagcattggagcacagactgacttcctttctgtcttcttctctggatataccttcaaacacaaaatggtctatgaagacacactcaccctattcccattctcaggagaaactgtcttcatgtcgatggaaaacccaggtctatggattctggggtgccacaactcagactttcggaacagaggcatgaccgccttactgaaggtttctagttgtgacaagaacactggtgattattacgaggacagttatgaagatatttcagcatacttgctgagtaaaaacaatgccattgaaccaagaagcttctctcaaaacggcgcgccaccgggagcgtcacccggtacgtcctcaacggggagccctggggcatcacccggcacgtcctcgacagggtcccccggaacaccgggttcggggactgcgtcgtcgtcacccggttcgtcaacacccagcggtgcgacgggttccccgggaacccccggatcaggaacagcgtcgtcgagccccggaagctcgaccccgtcaggagcgaccgggtcgccaggaacgcctgggtcgggtactgcctcatcgtcgccgggttcatcgacgccctccggagcaacaggttcacccgggtcgtccacccccagcggagcgactggatcaccgggatcgagcccgtcggcatcgacaggaacaggtcccggtagctccccatcggcctccacggggacggggcctggtgcgtcaccggggacaagcagcacgggttcgccgggaacgccagggtcagggaccgcgtcgtcgagcccagggtcgtccaccccaagcggggctactgggtccccgggtagctcgccgagcgcatcaacgggaaccggaccgggcagctccccctcagcgtcgacagggacaggccctggcgcgagcccgggaacatcgtcgacggggtcacccggagcatcgccagggacctcgtcaactggctcgcctggatcgtcaacgccctcgggagccacggggtcgcccggatcatccccgtccgcctcaactggcacaggccctggtgcttcccctggaacgtccagcacaggctcccccggttccagcccttccgcttcgactgggactggacccggaaccccgggatcggggacagcgtcaagctcgcccggaagctccacgccttcgggggcaaccgggtcagcctcgagcccaccagtcttgaaacgccatcaagctgaaataactcgtactactcttcagtcagatcaagaggaaatcgattatgatgataccatatcagttgaaatgaagaaggaagattttgacatttatgatgaggatgaaaatcagagcccccgcagctttcaaaagaaaacacgacactattttattgctgcagtggagaggctctgggattatgggatgagtagctccccacatgttctaagaaacagggctcagagtggcagtgtccctcagttcaagaaagttgttttccaggaatttactgatggctcctttactcagcccttataccgtggagaactaaatgaacatttgggactcctggggccatatataagagcagaagttgaagataatatcatggtaactttcagaaatcaggcctctcgtccctattccttctattctagccttatttcttatgaggaagatcagaggcaaggagcagaacctagaaaaaactttgtcaagcctaatgaaaccaaaacttacttttggaaagtgcaacatcatatggcacccactaaagatgagtttgactgcaaagcctgggcttatttctctgatgttgacctggaaaaagatgtgcactcaggcctgattggaccccttctggtctgccacactaacacactgaaccctgctcatgggagacaagtgacagtacaggaatttgctctgtttttcaccatctttgatgagaccaaaagctggtacttcactgaaaatatggaaagaaactgcagggctccctgcaatatccagatggaagatcccacttttaaagagaattatcgcttccatgcaatcaatggctacataatggatacactacctggcttagtaatggctcaggatcaaaggattcgatggtatctgctcagcatgggcagcaatgaaaacatccattctattcatttcagtggacatgtgttcactgtacgaaaaaaagaggagtataaaatggcactgtacaatctctatccaggtgtttttgagacagtggaaatgttaccatccaaagctggaatttggcgggtggaatgccttattggcgagcatctacatgctgggatgagcacactttttctggtgtacagcaataagtgtcagactcccctgggaatggcttctggacacattagagattttcagattacagcttcaggacaatatggacagtgggccccaaagctggccagacttcattattccggatcaatcaatgcctggagcaccaaggagcccttttcttggatcaaggtggatctgttggcaccaatgattattcacggcatcaagacccagggtgcccgtcagaagttctccagcctctacatctctcagtttatcatcatgtatagtcttgatgggaagaagtggcagacttatcgaggaaattccactggaaccttaatggtcttctttggcaatgtggattcatctgggataaaacacaatatttttaaccctccaattattgctcgatacatccgtttgcacccaactcattatagcattcgcagcactcttcgcatggagttgatgggctgtgatttaaatagttgcagcatgccattgggaatggagagtaaagcaatatcagatgcacagattactgcttcatcctactttaccaatatgtttgccacctggtctccttcaaaagctcgacttcacctccaagggaggagtaatgcctggagacctcaggtgaataatccaaaagagtggctgcaagtggacttccagaagacaatgaaagtcacaggagtaactactcagggagtaaaatctctgcttaccagcatgtatgtgaaggagttcctcatctccagcagtcaagatggccatcagtggactctcttttttcagaatggcaaagtaaaggtttttcagggaaatcaagactccttcacacctgtggtgaactctctagacccaccgttactgactcgctaccttcgaattcacccccagagttgggtgcaccagattgccctgaggatggaggttctgggctgcgaggcacaggacctctacggcgcgccaacatctaccgagccttccgaaggctctgcccctgggacctcagaatctgcaacccctgaaagcggccctggaacctccgaaagtgccactcccgagagcggcccagggacaagcgagtcagcaacccctgagtctggacccggcagcgagcctgcaacctctggctcagagactcccggctcagaacccgctacctcaggctccgagacacccggctctcctgctgggagtcccacttccaccgaggaaggaacatccactgagcctagtgagggctctgcccctggaaccagcacagagccaagtgagggcagtgcaccaggatccgagccagcaaccagcgggtccgagactcccgggacctctgagtctgccaccccagagagcggacccggcacttcaaccgagccctccgaaggatcagcaccaggtgcctcgagcgaacaaaaactcatctcagaagaggatctgtcacctgcaaccggtcatcatcaccatcaccattga

SEQ ID NO: 823 - protein, 1903 aa, synthetic construct
  REGION 1..1903: note = Description of Artificial Sequence: Synthetic polypeptide
ATRRYYLGAVELSWDYMQSDLGELPVDARFPPRVPKSFPFNTSVVYKKTLFVEFTDHLFNIAKPRPPWMGLLGPTIQAEVYDTVVITLKNMASHPVSLHAVGVSYWKASEGAEYDDQTSQREKEDDKVFPGGSHTYVWQVLKENGPMASDPLCLTYSYLSHVDLVKDLNSGLIGALLVCREGSLAKEKTQTLHKFILLFAVFDEGKSWHSETKNSLMQDRDAASARAWPKMHTVNGYVNRSLPGLIGCHRKSVYWHVIGMGTTPEVHSIFLEGHTFLVRNHRQASLEISPITFLTAQTLLMDLGQFLLFCHISSHQHDGMEAYVKVDSCPEEPQLRMKNNEEAEDYDDDLTDSEMDVVRFDDDNSPSFIQIRSVAKKHPKTWVHYIAAEEEDWDYAPLVLAPDDRSYKSQYLNNGPQRIGRKYKKVRFMAYTDETFKTREAIQHESGILGPLLYGEVGDTLLIIFKNQASRPYNIYPHGITDVRPLYSRRLPKGVKHLKDFPILPGEIFKYKWTVTVEDGPTKSDPRCLTRYYSSFVNMERDLASGLIGPLLICYKESVDQRGNQIMSDKRNVILFSVFDENRSWYLTENIQRFLPNPAGVQLEDPEFQASNIMHSINGYVFDSLQLSVCLHEVAYWYILSIGAQTDFLSVFFSGYTFKHKMVYEDTLTLFPFSGETVFMSMENPGLWILGCHNSDFRNRGMTALLKVSSCDKNTGDYYEDSYEDISAYLLSKNNAIEPRSFSQNGAPPGASPGTSSTGSPGASPGTSSTGSPGTPGSGTASSSPGSSTPSGATGSPGTPGSGTASSSPGSSTPSGATGSPGTPGSGTASSSPGSSTPSGATGSPGSSTPSGATGSPGSSPSASTGTGPGSSPSASTGTGPGASPGTSSTGSPGTPGSGTASSSPGSSTPSGATGSPGSSPSASTGTGPGSSPSASTGTGPGASPGTSSTGSPGASPGTSSTGSPGSSTPSGATGSPGSSPSASTGTGPGASPGTSSTGSPGSSPSASTGTGPGTPGSGTASSSPGSSTPSGATGSASSPPVLKRHQREITRTTLQSDQEEIDYDDTISVEMKKEDFDIYDEDENQSPRSFQKKTRHYFIAAVERLWDYGMSSSPHVLRNRAQSGSVPQFKKVVFQEFTDGSFTQPLYRGELNEHLGLLGPYIRAEVEDNIMVTFRNQASRPYSFYSSLISYEEDQRQGAEPRKNFVKPNETKTYFWKVQHHMAPTKDEFDCKAWAYFSDVDLEKDVHSGLIGPLLVCHTNTLNPAHGRQVTVQEFALFFTIFDETKSWYFTENMERNCRAPCNIQMEDPTFKENYRFHAINGYIMDTLPGLVMAQDQRIRWYLLSMGSNENIHSIHFSGHVFTVRKKEEYKMALYNLYPGVFETVEMLPSKAGIWRVECLIGEHLHAGMSTLFLVYSNKCQTPLGMASGHIRDFQITASGQYGQWAPKLARLHYSGSINAWSTKEPFSWIKVDLLAPMIIHGIKTQGARQKFSSLYISQFIIMYSLDGKKWQTYRGNSTGTLMVFFGNVDSSGIKHNIFNPPIIARYIRLHPTHYSIRSTLRMELMGCDLNSCSMPLGMESKAISDAQITASSYFTNMFATWSPSKARLHLQGRSNAWRPQVNNPKEWLQVDFQKTMKVTGVTTQGVKSLLTSMYVKEFLISSSQDGHQWTLFFQNGKVKVFQGNQDSFTPVVNSLDPPLLTRYLRIHPQSWVHQIALRMEVLGCEAQDLYGAPTSTEPSEGSAPGTSESATPESGPGTSESATPESGPGTSESATPESGPGSEPATSGSETPGSEPATSGSETPGSPAGSPTSTEEGTSTEPSEGSAPGTSTEPSEGSAPGSEPATSGSETPGTSESATPESGPGTSTEPSEGSAPGASSEQKLISEEDLSPATGHHHHHH

SEQ ID NO: 824 - DNA, 5712 bp, synthetic construct
  misc_feature 1..5712: note = Description of Artificial Sequence: Synthetic polynucleotide
  source 1..5712: mol_type = other DNA
gccaccagaagatactacctgggtgcagtggaactgtcatgggactatatgcaaagtgatctcggtgagctgcctgtggacgcaagatttcctcctagagtgccaaaatcttttccattcaacacctcagtcgtgtacaaaaagactctgtttgtagaattcacggatcaccttttcaacatcgctaagccaaggccaccctggatgggtctgctaggtcctaccatccaggctgaggtttatgatacagtggtcattacacttaagaacatggcttcccatcctgtcagtcttcatgctgttggtgtatcctactggaaagcttctgagggagctgaatatgatgatcagaccagtcaaagggagaaagaagatgataaagtcttccctggtggaagccatacatatgtctggcaggtcctgaaagagaatggtccaatggcctctgacccactgtgccttacctactcatatctttctcatgtggacctggtaaaagacttgaattcaggcctcattggagccctactagtatgtagagaagggagtctggccaaggaaaagacacagaccttgcacaaatttatactactttttgctgtatttgatgaagggaaaagttggcactcagaaacaaagaactccttgatgcaggatagggatgctgcatctgctcgggcctggcctaaaatgcacacagtcaatggttatgtaaacaggtctctgccaggtctgattggatgccacaggaaatcagtctattggcatgtgattggaatgggcaccactcctgaagtgcactcaatattcctcgaaggtcacacatttcttgtgaggaaccatcgccaggctagcttggaaatctcgccaataactttccttactgctcaaacactcttgatggaccttggacagtttctactgttttgtcatatctcttcccaccaacatgatggcatggaagcttatgtcaaagtagacagctgtccagaggaaccccaactacgaatgaaaaataatgaagaagcggaagactatgatgatgatcttactgattctgaaatggatgtggtcaggtttgatgatgacaactctccttcctttatccaaattcgctcagttgccaagaagcatcctaaaacttgggtacattacattgctgctgaagaggaggactgggactatgctcccttagtcctcgcccccgatgacagaagttataaaagtcaatatttgaacaatggccctcagcggattggtaggaagtacaaaaaagtccgatttatggcatacacagatgaaacctttaagactcgtgaagctattcagcatgaatcaggaatcttgggacctttactttatggggaagttggagacacactgttgattatatttaagaatcaagcaagcagaccatataacatctaccctcacggaatcactgatgtccgtcctttgtattcaaggagattaccaaaaggtgtaaaacatttgaaggattttccaattctgccaggagaaatattcaaatataaatggacagtgactgtagaagatgggccaactaaatcagatcctcggtgcctgacccgctattactctagtttcgttaatatggagagagatctagcttcaggactcattggccctctcctcatctgctacaaagaatctgtagatcaaagaggaaaccagataatgtcagacaagaggaatgtcatcctgttttctgtatttgatgagaaccgaagctggtacctcacagagaatatacaacgctttctccccaatccagctggagtgcagcttgaggatccagagttccaagcctccaacatcatgcacagcatcaatggctatgtttttgatagtttgcagttgtcagtttgtttgcatgaggtggcatactggtacattctaagcattggagcacagactgacttcctttctgtcttcttctctggatataccttcaaacacaaaatggtctatgaagacacactcaccctattcccattctcaggagaaactgtcttcatgtcgatggaaaacccaggtctatggattctggggtgccacaactcagactttcggaacagaggcatgaccgccttactgaaggtttctagttgtgacaagaacactggtgattattacgaggacagttatgaagatatttcagcatacttgctgagtaaaaacaatgccattgaaccaagaagcttctctcaaaacggcgcgccaccgggagcgtcacccggtacgtcctcaacggggagccctggggcatcacccggcacgtcctcgacagggtcccccggaacaccgggttcggggactgcgtcgtcgtcacccggttcgtcaacacccagcggtgcgacgggttccccgggaacccccggatcaggaacagcgtcgtcgagccccggaagctcgaccccgtcaggagcgaccgggtcgccaggaacgcctgggtcgggtactgcctcatcgtcgccgggttcatcgacgccctccggagcaacaggttcacccgggtcgtccacccccagcggagcgactggatcaccgggatcgagcccgtcggcatcgacaggaacaggtcccggtagctccccatcggcctccacggggacggggcctggtgcgtcaccggggacaagcagcacgggttcgccgggaacgccagggtcagggaccgcgtcgtcgagcccagggtcgtccaccccaagcggggctactgggtccccgggtagctcgccgagcgcatcaacgggaaccggaccgggcagctccccctcagcgtcgacagggacaggccctggcgcgagcccgggaacatcgtcgacggggtcacccggagcatcgccagggacctcgtcaactggctcgcctggatcgtcaacgccctcgggagccacggggtcgcccggatcatccccgtccgcctcaactggcacaggccctggtgcttcccctggaacgtccagcacaggctcccccggttccagcccttccgcttcgactgggactggacccggaaccccgggatcggggacagcgtcaagctcgcccggaagctccacgccttcgggggcaaccgggtcagcctcgagcccaccagtcttgaaacgccatcaacgggaaataactcgtactactcttcagtcagatcaagaggaaatcgattatgatgataccatatcagttgaaatgaagaaggaagattttgacatttatgatgaggatgaaaatcagagcccccgcagctttcaaaagaaaacacgacactattttattgctgcagtggagaggctctgggattatgggatgagtagctccccacatgttctaagaaacagggctcagagtggcagtgtccctcagttcaagaaagttgttttccaggaatttactgatggctcctttactcagcccttataccgtggagaactaaatgaacatttgggactcctggggccatatataagagcagaagttgaagataatatcatggtaactttcagaaatcaggcctctcgtccctattccttctattctagccttatttcttatgaggaagatcagaggcaaggagcagaacctagaaaaaactttgtcaagcctaatgaaaccaaaacttacttttggaaagtgcaacatcatatggcacccactaaagatgagtttgactgcaaagcctgggcttatttctctgatgttgacctggaaaaagatgtgcactcaggcctgattggaccccttctggtctgccacactaacacactgaaccctgctcatgggagacaagtgacagtacaggaatttgctctgtttttcaccatctttgatgagaccaaaagctggtacttcactgaaaatatggaaagaaactgcagggctccctgcaatatccagatggaagatcccacttttaaagagaattatcgcttccatgcaatcaatggctacataatggatacactacctggcttagtaatggctcaggatcaaaggattcgatggtatctgctcagcatgggcagcaatgaaaacatccattctattcatttcagtggacatgtgttcactgtacgaaaaaaagaggagtataaaatggcactgtacaatctctatccaggtgtttttgagacagtggaaatgttaccatccaaagctggaatttggcgggtggaatgccttattggcgagcatctacatgctgggatgagcacactttttctggtgtacagcaataagtgtcagactcccctgggaatggcttctggacacattagagattttcagattacagcttcaggacaatatggacagtgggccccaaagctggccagacttcattattccggatcaatcaatgcctggagcaccaaggagcccttttcttggatcaaggtggatctgttggcaccaatgattattcacggcatcaagacccagggtgcccgtcagaagttctccagcctctacatctctcagtttatcatcatgtatagtcttgatgggaagaagtggcagacttatcgaggaaattccactggaaccttaatggtcttctttggcaatgtggattcatctgggataaaacacaatatttttaaccctccaattattgctcgatacatccgtttgcacccaactcattatagcattcgcagcactcttcgcatggagttgatgggctgtgatttaaatagttgcagcatgccattgggaatggagagtaaagcaatatcagatgcacagattactgcttcatcctactttaccaatatgtttgccacctggtctccttcaaaagctcgacttcacctccaagggaggagtaatgcctggagacctcaggtgaataatccaaaagagtggctgcaagtggacttccagaagacaatgaaagtcacaggagtaactactcagggagtaaaatctctgcttaccagcatgtatgtgaaggagttcctcatctccagcagtcaagatggccatcagtggactctcttttttcagaatggcaaagtaaaggtttttcagggaaatcaagactccttcacacctgtggtgaactctctagacccaccgttactgactcgctaccttcgaattcacccccagagttgggtgcaccagattgccctgaggatggaggttctgggctgcgaggcacaggacctctacggcgcgccaacatctaccgagccttccgaaggctctgcccctgggacctcagaatctgcaacccctgaaagcggccctggaacctccgaaagtgccactcccgagagcggcccagggacaagcgagtcagcaacccctgagtctggacccggcagcgagcctgcaacctctggctcagagactcccggctcagaacccgctacctcaggctccgagacacccggctctcctgctgggagtcccacttccaccgaggaaggaacatccactgagcctagtgagggctctgcccctggaaccagcacagagccaagtgagggcagtgcaccaggatccgagccagcaaccagcgggtccgagactcccgggacctctgagtctgccaccccagagagcggacccggcacttcaaccgagccctccgaaggatcagcaccaggtgcctcgagcgaacaaaaactcatctcagaagaggatctgtcacctgcaaccggtcatcatcaccatcaccattga

SEQ ID NO: 825 - protein, 1903 aa, synthetic construct
  REGION 1..1903: note = Description of Artificial Sequence: Synthetic polypeptide
ATRRYYLGAVELSWDYMQSDLGELPVDARFPPRVPKSFPFNTSVVYKKTLFVEFTDHLFNIAKPRPPWMGLLGPTIQAEVYDTVVITLKNMASHPVSLHAVGVSYWKASEGAEYDDQTSQREKEDDKVFPGGSHTYVWQVLKENGPMASDPLCLTYSYLSHVDLVKDLNSGLIGALLVCREGSLAKEKTQTLHKFILLFAVFDEGKSWHSETKNSLMQDRDAASARAWPKMHTVNGYVNRSLPGLIGCHRKSVYWHVIGMGTTPEVHSIFLEGHTFLVRNHRQASLEISPITFLTAQTLLMDLGQFLLFCHISSHQHDGMEAYVKVDSCPEEPQLRMKNNEEAEDYDDDLTDSEMDVVRFDDDNSPSFIQIRSVAKKHPKTWVHYIAAEEEDWDYAPLVLAPDDRSYKSQYLNNGPQRIGRKYKKVRFMAYTDETFKTREAIQHESGILGPLLYGEVGDTLLIIFKNQASRPYNIYPHGITDVRPLYSRRLPKGVKHLKDFPILPGEIFKYKWTVTVEDGPTKSDPRCLTRYYSSFVNMERDLASGLIGPLLICYKESVDQRGNQIMSDKRNVILFSVFDENRSWYLTENIQRFLPNPAGVQLEDPEFQASNIMHSINGYVFDSLQLSVCLHEVAYWYILSIGAQTDFLSVFFSGYTFKHKMVYEDTLTLFPFSGETVFMSMENPGLWILGCHNSDFRNRGMTALLKVSSCDKNTGDYYEDSYEDISAYLLSKNNAIEPRSFSQNGAPGTSESATPESGPGSEPATSGSETPGTSESATPESGPGSEPATSGSETPGTSESATPESGPGTSTEPSEGSAPGSPAGSPTSTEEGTSESATPESGPGSEPATSGSETPGTSESATPESGPGSPAGSPTSTEEGSPAGSPTSTEEGTSTEPSEGSAPGTSESATPESGPGTSESATPESGPGTSESATPESGPGSEPATSGSETPGSEPATSGSETPGSPAGSPTSTEEGTSTEPSEGSAPGTSTEPSEGSAPGSEPATSGSETPGTSESATPESGPGTSTEPSEGSAPASSPPVLKRHQREITRTTLQSDQEEIDYDDTISVEMKKEDFDIYDEDENQSPRSFQKKTRHYFIAAVERLWDYGMSSSPHVLRNRAQSGSVPQFKKVVFQEFTDGSFTQPLYRGELNEHLGLLGPYIRAEVEDNIMVTFRNQASRPYSFYSSLISYEEDQRQGAEPRKNFVKPNETKTYFWKVQHHMAPTKDEFDCKAWAYFSDVDLEKDVHSGLIGPLLVCHTNTLNPAHGRQVTVQEFALFFTIFDETKSWYFTENMERNCRAPCNIQMEDPTFKENYRFHAINGYIMDTLPGLVMAQDQRIRWYLLSMGSNENIHSIHFSGHVFTVRKKEEYKMALYNLYPGVFETVEMLPSKAGIWRVECLIGEHLHAGMSTLFLVYSNKCQTPLGMASGHIRDFQITASGQYGQWAPKLARLHYSGSINAWSTKEPFSWIKVDLLAPMIIHGIKTQGARQKFSSLYISQFIIMYSLDGKKWQTYRGNSTGTLMVFFGNVDSSGIKHNIFNPPIIARYIRLHPTHYSIRSTLRMELMGCDLNSCSMPLGMESKAISDAQITASSYFTNMFATWSPSKARLHLQGRSNAWRPQVNNPKEWLQVDFQKTMKVTGVTTQGVKSLLTSMYVKEFLISSSQDGHQWTLFFQNGKVKVFQGNQDSFTPVVNSLDPPLLTRYLRIHPQSWVHQIALRMEVLGCEAQDLYGAPPGSSPSASTGTGPGSSPSASTGTGPGTPGSGTASSSPGSSTPSGATGSPGSSPSASTGTGPGASPGTSSTGSPGTPGSGTASSSPGSSTPSGATGSPGTPGSGTASSSPGASPGTSSTGSPGASPGTSSTGSPGTPGSGTASSSASSEQKLISEEDLSPATGHHHHHH

SEQ ID NO: 826 - DNA, 5712 bp, synthetic construct
  misc_feature 1..5712: note = Description of Artificial Sequence: Synthetic polynucleotide
  source 1..5712: mol_type = other DNA
gccaccagaagatactacctgggtgcagtggaactgtcatgggactatatgcaaagtgatctcggtgagctgcctgtggacgcaagatttcctcctagagtgccaaaatcttttccattcaacacctcagtcgtgtacaaaaagactctgtttgtagaattcacggatcaccttttcaacatcgctaagccaaggccaccctggatgggtctgctaggtcctaccatccaggctgaggtttatgatacagtggtcattacacttaagaacatggcttcccatcctgtcagtcttcatgctgttggtgtatcctactggaaagcttctgagggagctgaatatgatgatcagaccagtcaaagggagaaagaagatgataaagtcttccctggtggaagccatacatatgtctggcaggtcctgaaagagaatggtccaatggcctctgacccactgtgccttacctactcatatctttctcatgtggacctggtaaaagacttgaattcaggcctcattggagccctactagtatgtagagaagggagtctggccaaggaaaagacacagaccttgcacaaatttatactactttttgctgtatttgatgaagggaaaagttggcactcagaaacaaagaactccttgatgcaggatagggatgctgcatctgctcgggcctggcctaaaatgcacacagtcaatggttatgtaaacaggtctctgccaggtctgattggatgccacaggaaatcagtctattggcatgtgattggaatgggcaccactcctgaagtgcactcaatattcctcgaaggtcacacatttcttgtgaggaaccatcgccaggctagcttggaaatctcgccaataactttccttactgctcaaacactcttgatggaccttggacagtttctactgttttgtcatatctcttcccaccaacatgatggcatggaagcttatgtcaaagtagacagctgtccagaggaaccccaactacgaatgaaaaataatgaagaagcggaagactatgatgatgatcttactgattctgaaatggatgtggtcaggtttgatgatgacaactctccttcctttatccaaattcgctcagttgccaagaagcatcctaaaacttgggtacattacattgctgctgaagaggaggactgggactatgctcccttagtcctcgcccccgatgacagaagttataaaagtcaatatttgaacaatggccctcagcggattggtaggaagtacaaaaaagtccgatttatggcatacacagatgaaacctttaagactcgtgaagctattcagcatgaatcaggaatcttgggacctttactttatggggaagttggagacacactgttgattatatttaagaatcaagcaagcagaccatataacatctaccctcacggaatcactgatgtccgtcctttgtattcaaggagattaccaaaaggtgtaaaacatttgaaggattttccaattctgccaggagaaatattcaaatataaatggacagtgactgtagaagatgggccaactaaatcagatcctcggtgcctgacccgctattactctagtttcgttaatatggagagagatctagcttcaggactcattggccctctcctcatctgctacaaagaatctgtagatcaaagaggaaaccagataatgtcagacaagaggaatgtcatcctgttttctgtatttgatgagaaccgaagctggtacctcacagagaatatacaacgctttctccccaatccagctggagtgcagcttgaggatccagagttccaagcctccaacatcatgcacagcatcaatggctatgtttttgatagtttgcagttgtcagtttgtttgcatgaggtggcatactggtacattctaagcattggagcacagactgacttcctttctgtcttcttctctggatataccttcaaacacaaaatggtctatgaagacacactcaccctattcccattctcaggagaaactgtcttcatgtcgatggaaaacccaggtctatggattctggggtgccacaactcagactttcggaacagaggcatgaccgccttactgaaggtttctagttgtgacaagaacactggtgattattacgaggacagttatgaagatatttcagcatacttgctgagtaaaaacaatgccattgaaccaagaagcttctctcaaaacggcgcgccaggtacctcagagtctgctacccccgagtcagggccaggatcagagccagccacctccgggtctgagacacccgggacttccgagagtgccacccctgagtccggacccgggtccgagcccgccacttccggctccgaaactcccggcacaagcgagagcgctaccccagagtcaggaccaggaacatctacagagccctctgaaggctccgctccagggtccccagccggcagtcccactagcaccgaggagggaacctctgaaagcgccacacccgaatcagggccagggtctgagcctgctaccagcggcagcgagacaccaggcacctctgagtccgccacaccagagtccggacccggatctcccgctgggagccccacctccactgaggagggatctcctgctggctctccaacatctactgaggaaggtacctcaaccgagccatccgagggatcagctcccggcacctcagagtcggcaaccccggagtctggacccggaacttccgaaagtgccacaccagagtccggtcccgggacttcagaatcagcaacacccgagtccggccctgggtctgaacccgccacaagtggtagtgagacaccaggatcagaacctgctacctcagggtcagagacacccggatctccggcaggctcaccaacctccactgaggagggcaccagcacagaaccaagcgagggctccgcacccggaacaagcactgaacccagtgagggttcagcacccggctctgagccggccacaagtggcagtgagacacccggcacttcagagagtgccacccccgagagtggcccaggcactagtaccgagccctctgaaggcagtgcgccagcctcgagcccaccagtcttgaaacgccatcaacgggaaataactcgtactactcttcagtcagatcaagaggaaatcgattatgatgataccatatcagttgaaatgaagaaggaagattttgacatttatgatgaggatgaaaatcagagcccccgcagctttcaaaagaaaacacgacactattttattgctgcagtggagaggctctgggattatgggatgagtagctccccacatgttctaagaaacagggctcagagtggcagtgtccctcagttcaagaaagttgttttccaggaatttactgatggctcctttactcagcccttataccgtggagaactaaatgaacatttgggactcctggggccatatataagagcagaagttgaagataatatcatggtaactttcagaaatcaggcctctcgtccctattccttctattctagccttatttcttatgaggaagatcagaggcaaggagcagaacctagaaaaaactttgtcaagcctaatgaaaccaaaacttacttttggaaagtgcaacatcatatggcacccactaaagatgagtttgactgcaaagcctgggcttatttctctgatgttgacctggaaaaagatgtgcactcaggcctgattggaccccttctggtctgccacactaacacactgaaccctgctcatgggagacaagtgacagtacaggaatttgctctgtttttcaccatctttgatgagaccaaaagctggtacttcactgaaaatatggaaagaaactgcagggctccctgcaatatccagatggaagatcccacttttaaagagaattatcgcttccatgcaatcaatggctacataatggatacactacctggcttagtaatggctcaggatcaaaggattcgatggtatctgctcagcatgggcagcaatgaaaacatccattctattcatttcagtggacatgtgttcactgtacgaaaaaaagaggagtataaaatggcactgtacaatctctatccaggtgtttttgagacagtggaaatgttaccatccaaagctggaatttggcgggtggaatgccttattggcgagcatctacatgctgggatgagcacactttttctggtgtacagcaataagtgtcagactcccctgggaatggcttctggacacattagagattttcagattacagcttcaggacaatatggacagtgggccccaaagctggccagacttcattattccggatcaatcaatgcctggagcaccaaggagcccttttcttggatcaaggtggatctgttggcaccaatgattattcacggcatcaagacccagggtgcccgtcagaagttctccagcctctacatctctcagtttatcatcatgtatagtcttgatgggaagaagtggcagacttatcgaggaaattccactggaaccttaatggtcttctttggcaatgtggattcatctgggataaaacacaatatttttaaccctccaattattgctcgatacatccgtttgcacccaactcattatagcattcgcagcactcttcgcatggagttgatgggctgtgatttaaatagttgcagcatgccattgggaatggagagtaaagcaatatcagatgcacagattactgcttcatcctactttaccaatatgtttgccacctggtctccttcaaaagctcgacttcacctccaagggaggagtaatgcctggagacctcaggtgaataatccaaaagagtggctgcaagtggacttccagaagacaatgaaagtcacaggagtaactactcagggagtaaaatctctgcttaccagcatgtatgtgaaggagttcctcatctccagcagtcaagatggccatcagtggactctcttttttcagaatggcaaagtaaaggtttttcagggaaatcaagactccttcacacctgtggtgaactctctagacccaccgttactgactcgctaccttcgaattcacccccagagttgggtgcaccagattgccctgaggatggaggttctgggctgcgaggcacaggacctctacggcgcgccacccgggtcgtccccgtcggcgtccaccggaacagggccagggtcatccccgtcagcgtcgactgggacgggacccgggacacccggttcggggactgcatcctcctcgcctggttcgtccaccccgtcaggagccacgggttcgccgggaagcagcccaagcgcatccactggtacagggcctggggcttcaccgggtacttcatccacggggtcaccgggaacgcccggatcggggacggcttcctcatcaccaggatcgtcaacaccctcgggcgcaacgggcagccccggaacccctggttcgggtacggcgtcgtcgagccccggtgcgagcccgggaacaagctcgacaggatcgcctggggcgtcacccggcacgtcgagcacaggcagccccggaacccctggatcgggaaccgcgtcgtcaagcgcctcgagcgaacaaaaactcatctcagaagaggatctgtcacctgcaaccggtcatcatcaccatcaccattga

SEQ ID NO: 827 - protein, 1903 aa, synthetic construct
  REGION 1..1903: note = Description of Artificial Sequence: Synthetic polypeptide
ATRRYYLGAVELSWDYMQSDLGELPVDARFPPRVPKSFPFNTSVVYKKTLFVEFTDHLFNIAKPRPPWMGLLGPTIQAEVYDTVVITLKNMASHPVSLHAVGVSYWKASEGAEYDDQTSQREKEDDKVFPGGSHTYVWQVLKENGPMASDPLCLTYSYLSHVDLVKDLNSGLIGALLVCREGSLAKEKTQTLHKFILLFAVFDEGKSWHSETKNSLMQDRDAASARAWPKMHTVNGYVNRSLPGLIGCHRKSVYWHVIGMGTTPEVHSIFLEGHTFLVRNHRQASLEISPITFLTAQTLLMDLGQFLLFCHISSHQHDGMEAYVKVDSCPEEPQLRMKNNEEAEDYDDDLTDSEMDVVRFDDDNSPSFIQIRSVAKKHPKTWVHYIAAEEEDWDYAPLVLAPDDRSYKSQYLNNGPQRIGRKYKKVRFMAYTDETFKTREAIQHESGILGPLLYGEVGDTLLIIFKNQASRPYNIYPHGITDVRPLYSRRLPKGVKHLKDFPILPGEIFKYKWTVTVEDGPTKSDPRCLTRYYSSFVNMERDLASGLIGPLLICYKESVDQRGNQIMSDKRNVILFSVFDENRSWYLTENIQRFLPNPAGVQLEDPEFQASNIMHSINGYVFDSLQLSVCLHEVAYWYILSIGAQTDFLSVFFSGYTFKHKMVYEDTLTLFPFSGETVFMSMENPGLWILGCHNSDFRNRGMTALLKVSSCDKNTGDYYEDSYEDISAYLLSKNNAIEPRSFSQNGAPPGASPGTSSTGSPGASPGTSSTGSPGTPGSGTASSSPGSSTPSGATGSPGTPGSGTASSSPGSSTPSGATGSPGTPGSGTASSSPGSSTPSGATGSPGSSTPSGATGSPGSSPSASTGTGPGSSPSASTGTGPGASPGTSSTGSPGTPGSGTASSSPGSSTPSGATGSPGSSPSASTGTGPGSSPSASTGTGPGASPGTSSTGSPGASPGTSSTGSPGSSTPSGATGSPGSSPSASTGTGPGASPGTSSTGSPGSSPSASTGTGPGTPGSGTASSSPGSSTPSGATGSASSPPVLKRHQREITRTTLQSDQEEIDYDDTISVEMKKEDFDIYDEDENQSPRSFQKKTRHYFIAAVERLWDYGMSSSPHVLRNRAQSGSVPQFKKVVFQEFTDGSFTQPLYRGELNEHLGLLGPYIRAEVEDNIMVTFRNQASRPYSFYSSLISYEEDQRQGAEPRKNFVKPNETKTYFWKVQHHMAPTKDEFDCKAWAYFSDVDLEKDVHSGLIGPLLVCHTNTLNPAHGRQVTVQEFALFFTIFDETKSWYFTENMERNCRAPCNIQMEDPTFKENYRFHAINGYIMDTLPGLVMAQDQRIRWYLLSMGSNENIHSIHFSGHVFTVRKKEEYKMALYNLYPGVFETVEMLPSKAGIWRVECLIGEHLHAGMSTLFLVYSNKCQTPLGMASGHIRDFQITASGQYGQWAPKLARLHYSGSINAWSTKEPFSWIKVDLLAPMIIHGIKTQGARQKFSSLYISQFIIMYSLDGKKWQTYRGNSTGTLMVFFGNVDSSGIKHNIFNPPIIARYIRLHPTHYSIRSTLRMELMGCDLNSCSMPLGMESKAISDAQITASSYFTNMFATWSPSKARLHLQGRSNAWRPQVNNPKEWLQVDFQKTMKVTGVTTQGVKSLLTSMYVKEFLISSSQDGHQWTLFFQNGKVKVFQGNQDSFTPVVNSLDPPLLTRYLRIHPQSWVHQIALRMEVLGCEAQDLYGAPPGSSPSASTGTGPGSSPSASTGTGPGTPGSGTASSSPGSSTPSGATGSPGSSPSASTGTGPGASPGTSSTGSPGTPGSGTASSSPGSSTPSGATGSPGTPGSGTASSSPGASPGTSSTGSPGASPGTSSTGSPGTPGSGTASSSASSEQKLISEEDLSPATGHHHHHH

SEQ ID NO: 828 - DNA, 5712 bp, synthetic construct
  misc_feature 1..5712: note = Description of Artificial Sequence: Synthetic polynucleotide
  source 1..5712: mol_type = other DNA
gccaccagaagatactacctgggtgcagtggaactgtcatgggactatatgcaaagtgatctcggtgagctgcctgtggacgcaagatttcctcctagagtgccaaaatcttttccattcaacacctcagtcgtgtacaaaaagactctgtttgtagaattcacggatcaccttttcaacatcgctaagccaaggccaccctggatgggtctgctaggtcctaccatccaggctgaggtttatgatacagtggtcattacacttaagaacatggcttcccatcctgtcagtcttcatgctgttggtgtatcctactggaaagcttctgagggagctgaatatgatgatcagaccagtcaaagggagaaagaagatgataaagtcttccctggtggaagccatacatatgtctggcaggtcctgaaagagaatggtccaatggcctctgacccactgtgccttacctactcatatctttctcatgtggacctggtaaaagacttgaattcaggcctcattggagccctactagtatgtagagaagggagtctggccaaggaaaagacacagaccttgcacaaatttatactactttttgctgtatttgatgaagggaaaagttggcactcagaaacaaagaactccttgatgcaggatagggatgctgcatctgctcgggcctggcctaaaatgcacacagtcaatggttatgtaaacaggtctctgccaggtctgattggatgccacaggaaatcagtctattggcatgtgattggaatgggcaccactcctgaagtgcactcaatattcctcgaaggtcacacatttcttgtgaggaaccatcgccaggctagcttggaaatctcgccaataactttccttactgctcaaacactcttgatggaccttggacagtttctactgttttgtcatatctcttcccaccaacatgatggcatggaagcttatgtcaaagtagacagctgtccagaggaaccccaactacgaatgaaaaataatgaagaagcggaagactatgatgatgatcttactgattctgaaatggatgtggtcaggtttgatgatgacaactctccttcctttatccaaattcgctcagttgccaagaagcatcctaaaacttgggtacattacattgctgctgaagaggaggactgggactatgctcccttagtcctcgcccccgatgacagaagttataaaagtcaatatttgaacaatggccctcagcggattggtaggaagtacaaaaaagtccgatttatggcatacacagatgaaacctttaagactcgtgaagctattcagcatgaatcaggaatcttgggacctttactttatggggaagttggagacacactgttgattatatttaagaatcaagcaagcagaccatataacatctaccctcacggaatcactgatgtccgtcctttgtattcaaggagattaccaaaaggtgtaaaacatttgaaggattttccaattctgccaggagaaatattcaaatataaatggacagtgactgtagaagatgggccaactaaatcagatcctcggtgcctgacccgctattactctagtttcgttaatatggagagagatctagcttcaggactcattggccctctcctcatctgctacaaagaatctgtagatcaaagaggaaaccagataatgtcagacaagaggaatgtcatcctgttttctgtatttgatgagaaccgaagctggtacctcacagagaatatacaacgctttctccccaatccagctggagtgcagcttgaggatccagagttccaagcctccaacatcatgcacagcatcaatggctatgtttttgatagtttgcagttgtcagtttgtttgcatgaggtggcatactggtacattctaagcattggagcacagactgacttcctttctgtcttcttctctggatataccttcaaacacaaaatggtctatgaagacacactcaccctattcccattctcaggagaaactgtcttcatgtcgatggaaaacccaggtctatggattctggggtgccacaactcagactttcggaacagaggcatgaccgccttactgaaggtttctagttgtgacaagaacactggtgattattacgaggacagttatgaagatatttcagcatacttgctgagtaaaaacaatgccattgaaccaagaagcttctctcaaaacggcgcgccaccgggagcgtcacccggtacgtcctcaacggggagccctggggcatcacccggcacgtcctcgacagggtcccccggaacaccgggttcggggactgcgtcgtcgtcacccggttcgtcaacacccagcggtgcgacgggttccccgggaacccccggatcaggaacagcgtcgtcgagccccggaagctcgaccccgtcaggagcgaccgggtcgccaggaacgcctgggtcgggtactgcctcatcgtcgccgggttcatcgacgccctccggagcaacaggttcacccgggtcgtccacccccagcggagcgactggatcaccgggatcgagcccgtcggcatcgacaggaacaggtcccggtagctccccatcggcctccacggggacggggcctggtgcgtcaccggggacaagcagcacgggttcgccgggaacgccagggtcagggaccgcgtcgtcgagcccagggtcgtccaccccaagcggggctactgggtccccgggtagctcgccgagcgcatcaacgggaaccggaccgggcagctccccctcagcgtcgacagggacaggccctggcgcgagcccgggaacatcgtcgacggggtcacccggagcatcgccagggacctcgtcaactggctcgcctggatcgtcaacgccctcgggagccacggggtcgcccggatcatccccgtccgcctcaactggcacaggccctggtgcttcccctggaacgtccagcacaggctcccccggttccagcccttccgcttcgactgggactggacccggaaccccgggatcggggacagcgtcaagctcgcccggaagctccacgccttcgggggcaaccgggtcagcctcgagcccaccagtcttgaaacgccatcaacgggaaataactcgtactactcttcagtcagatcaagaggaaatcgattatgatgataccatatcagttgaaatgaagaaggaagattttgacatttatgatgaggatgaaaatcagagcccccgcagctttcaaaagaaaacacgacactattttattgctgcagtggagaggctctgggattatgggatgagtagctccccacatgttctaagaaacagggctcagagtggcagtgtccctcagttcaagaaagttgttttccaggaatttactgatggctcctttactcagcccttataccgtggagaactaaatgaacatttgggactcctggggccatatataagagcagaagttgaagataatatcatggtaactttcagaaatcaggcctctcgtccctattccttctattctagccttatttcttatgaggaagatcagaggcaaggagcagaacctagaaaaaactttgtcaagcctaatgaaaccaaaacttacttttggaaagtgcaacatcatatggcacccactaaagatgagtttgactgcaaagcctgggcttatttctctgatgttgacctggaaaaagatgtgcactcaggcctgattggaccccttctggtctgccacactaacacactgaaccctgctcatgggagacaagtgacagtacaggaatttgctctgtttttcaccatctttgatgagaccaaaagctggtacttcactgaaaatatggaaagaaactgcagggctccctgcaatatccagatggaagatcccacttttaaagagaattatcgcttccatgcaatcaatggctacataatggatacactacctggcttagtaatggctcaggatcaaaggattcgatggtatctgctcagcatgggcagcaatgaaaacatccattctattcatttcagtggacatgtgttcactgtacgaaaaaaagaggagtataaaatggcactgtacaatctctatccaggtgtttttgagacagtggaaatgttaccatccaaagctggaatttggcgggtggaatgccttattggcgagcatctacatgctgggatgagcacactttttctggtgtacagcaataagtgtcagactcccctgggaatggcttctggacacattagagattttcagattacagcttcaggacaatatggacagtgggccccaaagctggccagacttcattattccggatcaatcaatgcctggagcaccaaggagcccttttcttggatcaaggtggatctgttggcaccaatgattattcacggcatcaagacccagggtgcccgtcagaagttctccagcctctacatctctcagtttatcatcatgtatagtcttgatgggaagaagtggcagacttatcgaggaaattccactggaaccttaatggtcttctttggcaatgtggattcatctgggataaaacacaatatttttaaccctccaattattgctcgatacatccgtttgcacccaactcattatagcattcgcagcactcttcgcatggagttgatgggctgtgatttaaatagttgcagcatgccattgggaatggagagtaaagcaatatcagatgcacagattactgcttcatcctactttaccaatatgtttgccacctggtctccttcaaaagctcgacttcacctccaagggaggagtaatgcctggagacctcaggtgaataatccaaaagagtggctgcaagtggacttccagaagacaatgaaagtcacaggagtaactactcagggagtaaaatctctgcttaccagcatgtatgtgaaggagttcctcatctccagcagtcaagatggccatcagtggactctcttttttcagaatggcaaagtaaaggtttttcagggaaatcaagactccttcacacctgtggtgaactctctagacccaccgttactgactcgctaccttcgaattcacccccagagttgggtgcaccagattgccctgaggatggaggttctgggctgcgaggcacaggacctctacggcgcgccacccgggtcgtccccgtcggcgtccaccggaacagggccagggtcatccccgtcagcgtcgactgggacgggacccgggacacccggttcggggactgcatcctcctcgcctggttcgtccaccccgtcaggagccacgggttcgccgggaagcagcccaagcgcatccactggtacagggcctggggcttcaccgggtacttcatccacggggtcaccgggaacgcccggatcggggacggcttcctcatcaccaggatcgtcaacaccctcgggcgcaacgggcagccccggaacccctggttcgggtacggcgtcgtcgagccccggtgcgagcccgggaacaagctcgacaggatcgcctggggcgtcacccggcacgtcgagcacaggcagccccggaacccctggatcgggaaccgcgtcgtcaagcgcctcgagcgaacaaaaactcatctcagaagaggatctgtcacctgcaaccggtcatcatcaccatcaccattga

SEQ ID NO: 829 - protein, 1903 aa, synthetic construct
  REGION 1..1903: note = Description of Artificial Sequence: Synthetic polypeptide
ATRRYYLGAVELSWDYMQSDLGELPVDARFPPRVPKSFPFNTSVVYKKTLFVEFTDHLFNIAKPRPPWMGLLGPTIQAEVYDTVVITLKNMASHPVSLHAVGVSYWKASEGAEYDDQTSQREKEDDKVFPGGSHTYVWQVLKENGPMASDPLCLTYSYLSHVDLVKDLNSGLIGALLVCREGSLAKEKTQTLHKFILLFAVFDEGKSWHSETKNSLMQDRDAASARAWPKMHTVNGYVNRSLPGLIGCHRKSVYWHVIGMGTTPEVHSIFLEGHTFLVRNHRQASLEISPITFLTAQTLLMDLGQFLLFCHISSHQHDGMEAYVKVDSCPEEPQLRMKNNEEAEDYDDDLTDSEMDVVRFDDDNSPSFIQIRSVAKKHPKTWVHYIAAEEEDWDYAPLVLAPDDRSYKSQYLNNGPQRIGRKYKKVRFMAYTDETFKTREAIQHESGILGPLLYGEVGDTLLIIFKNQASRPYNIYPHGITDVRPLYSRRLPKGVKHLKDFPILPGEIFKYKWTVTVEDGPTKSDPRCLTRYYSSFVNMERDLASGLIGPLLICYKESVDQRGNQIMSDKRNVILFSVFDENRSWYLTENIQRFLPNPAGVQLEDPEFQASNIMHSINGYVFDSLQLSVCLHEVAYWYILSIGAQTDFLSVFFSGYTFKHKMVYEDTLTLFPFSGETVFMSMENPGLWILGCHNSDFRNRGMTALLKVSSCDKNTGDYYEDSYEDISAYLLSKNNAIEPRSFSQNGAPGTSESATPESGPGSEPATSGSETPGTSESATPESGPGSEPATSGSETPGTSESATPESGPGTSTEPSEGSAPGSPAGSPTSTEEGTSESATPESGPGSEPATSGSETPGTSESATPESGPGSPAGSPTSTEEGSPAGSPTSTEEGTSTEPSEGSAPGTSESATPESGPGTSESATPESGPGTSESATPESGPGSEPATSGSETPGSEPATSGSETPGSPAGSPTSTEEGTSTEPSEGSAPGTSTEPSEGSAPGSEPATSGSETPGTSESATPESGPGTSTEPSEGSAPASSPPVLKRHQAEITRTTLQSDQEEIDYDDTISVEMKKEDFDIYDEDENQSPRSFQKKTRHYFIAAVERLWDYGMSSSPHVLRNRAQSGSVPQFKKVVFQEFTDGSFTQPLYRGELNEHLGLLGPYIRAEVEDNIMVTFRNQASRPYSFYSSLISYEEDQRQGAEPRKNFVKPNETKTYFWKVQHHMAPTKDEFDCKAWAYFSDVDLEKDVHSGLIGPLLVCHTNTLNPAHGRQVTVQEFALFFTIFDETKSWYFTENMERNCRAPCNIQMEDPTFKENYRFHAINGYIMDTLPGLVMAQDQRIRWYLLSMGSNENIHSIHFSGHVFTVRKKEEYKMALYNLYPGVFETVEMLPSKAGIWRVECLIGEHLHAGMSTLFLVYSNKCQTPLGMASGHIRDFQITASGQYGQWAPKLARLHYSGSINAWSTKEPFSWIKVDLLAPMIIHGIKTQGARQKFSSLYISQFIIMYSLDGKKWQTYRGNSTGTLMVFFGNVDSSGIKHNIFNPPIIARYIRLHPTHYSIRSTLRMELMGCDLNSCSMPLGMESKAISDAQITASSYFTNMFATWSPSKARLHLQGRSNAWRPQVNNPKEWLQVDFQKTMKVTGVTTQGVKSLLTSMYVKEFLISSSQDGHQWTLFFQNGKVKVFQGNQDSFTPVVNSLDPPLLTRYLRIHPQSWVHQIALRMEVLGCEAQDLYGAPPGSSPSASTGTGPGSSPSASTGTGPGTPGSGTASSSPGSSTPSGATGSPGSSPSASTGTGPGASPGTSSTGSPGTPGSGTASSSPGSSTPSGATGSPGTPGSGTASSSPGASPGTSSTGSPGASPGTSSTGSPGTPGSGTASSSASSEQKLISEEDLSPATGHHHHHH

SEQ ID NO: 830 - DNA, 5712 bp, synthetic construct
  misc_feature 1..5712: note = Description of Artificial Sequence: Synthetic polynucleotide
  source 1..5712: mol_type = other DNA
gccaccagaagatactacctgggtgcagtggaactgtcatgggactatatgcaaagtgatctcggtgagctgcctgtggacgcaagatttcctcctagagtgccaaaatcttttccattcaacacctcagtcgtgtacaaaaagactctgtttgtagaattcacggatcaccttttcaacatcgctaagccaaggccaccctggatgggtctgctaggtcctaccatccaggctgaggtttatgatacagtggtcattacacttaagaacatggcttcccatcctgtcagtcttcatgctgttggtgtatcctactggaaagcttctgagggagctgaatatgatgatcagaccagtcaaagggagaaagaagatgataaagtcttccctggtggaagccatacatatgtctggcaggtcctgaaagagaatggtccaatggcctctgacccactgtgccttacctactcatatctttctcatgtggacctggtaaaagacttgaattcaggcctcattggagccctactagtatgtagagaagggagtctggccaaggaaaagacacagaccttgcacaaatttatactactttttgctgtatttgatgaagggaaaagttggcactcagaaacaaagaactccttgatgcaggatagggatgctgcatctgctcgggcctggcctaaaatgcacacagtcaatggttatgtaaacaggtctctgccaggtctgattggatgccacaggaaatcagtctattggcatgtgattggaatgggcaccactcctgaagtgcactcaatattcctcgaaggtcacacatttcttgtgaggaaccatcgccaggctagcttggaaatctcgccaataactttccttactgctcaaacactcttgatggaccttggacagtttctactgttttgtcatatctcttcccaccaacatgatggcatggaagcttatgtcaaagtagacagctgtccagaggaaccccaactacgaatgaaaaataatgaagaagcggaagactatgatgatgatcttactgattctgaaatggatgtggtcaggtttgatgatgacaactctccttcctttatccaaattcgctcagttgccaagaagcatcctaaaacttgggtacattacattgctgctgaagaggaggactgggactatgctcccttagtcctcgcccccgatgacagaagttataaaagtcaatatttgaacaatggccctcagcggattggtaggaagtacaaaaaagtccgatttatggcatacacagatgaaacctttaagactcgtgaagctattcagcatgaatcaggaatcttgggacctttactttatggggaagttggagacacactgttgattatatttaagaatcaagcaagcagaccatataacatctaccctcacggaatcactgatgtccgtcctttgtattcaaggagattaccaaaaggtgtaaaacatttgaaggattttccaattctgccaggagaaatattcaaatataaatggacagtgactgtagaagatgggccaactaaatcagatcctcggtgcctgacccgctattactctagtttcgttaatatggagagagatctagcttcaggactcattggccctctcctcatctgctacaaagaatctgtagatcaaagaggaaaccagataatgtcagacaagaggaatgtcatcctgttttctgtatttgatgagaaccgaagctggtacctcacagagaatatacaacgctttctccccaatccagctggagtgcagcttgaggatccagagttccaagcctccaacatcatgcacagcatcaatggctatgtttttgatagtttgcagttgtcagtttgtttgcatgaggtggcatactggtacattctaagcattggagcacagactgacttcctttctgtcttcttctctggatataccttcaaacacaaaatggtctatgaagacacactcaccctattcccattctcaggagaaactgtcttcatgtcgatggaaaacccaggtctatggattctggggtgccacaactcagactttcggaacagaggcatgaccgccttactgaaggtttctagttgtgacaagaacactggtgattattacgaggacagttatgaagatatttcagcatacttgctgagtaaaaacaatgccattgaaccaagaagcttctctcaaaacggcgcgccaggtacctcagagtctgctacccccgagtcagggccaggatcagagccagccacctccgggtctgagacacccgggacttccgagagtgccacccctgagtccggacccgggtccgagcccgccacttccggctccgaaactcccggcacaagcgagagcgctaccccagagtcaggaccaggaacatctacagagccctctgaaggctccgctccagggtccccagccggcagtcccactagcaccgaggagggaacctctgaaagcgccacacccgaatcagggccagggtctgagcctgctaccagcggcagcgagacaccaggcacctctgagtccgccacaccagagtccggacccggatctcccgctgggagccccacctccactgaggagggatctcctgctggctctccaacatctactgaggaaggtacctcaaccgagccatccgagggatcagctcccggcacctcagagtcggcaaccccggagtctggacccggaacttccgaaagtgccacaccagagtccggtcccgggacttcagaatcagcaacacccgagtccggccctgggtctgaacccgccacaagtggtagtgagacaccaggatcagaacctgctacctcagggtcagagacacccggatctccggcaggctcaccaacctccactgaggagggcaccagcacagaaccaagcgagggctccgcacccggaacaagcactgaacccagtgagggttcagcacccggctctgagccggccacaagtggcagtgagacacccggcacttcagagagtgccacccccgagagtggcccaggcactagtaccgagccctctgaaggcagtgcgccagcctcgagcccaccagtcttgaaacgccatcaagctgaaataactcgtactactcttcagtcagatcaagaggaaatcgattatgatgataccatatcagttgaaatgaagaaggaagattttgacatttatgatgaggatgaaaatcagagcccccgcagctttcaaaagaaaacacgacactattttattgctgcagtggagaggctctgggattatgggatgagtagctccccacatgttctaagaaacagggctcagagtggcagtgtccctcagttcaagaaagttgttttccaggaatttactgatggctcctttactcagcccttataccgtggagaactaaatgaacatttgggactcctggggccatatataagagcagaagttgaagataatatcatggtaactttcagaaatcaggcctctcgtccctattccttctattctagccttatttcttatgaggaagatcagaggcaaggagcagaacctagaaaaaactttgtcaagcctaatgaaaccaaaacttacttttggaaagtgcaacatcatatggcacccactaaagatgagtttgactgcaaagcctgggcttatttctctgatgttgacctggaaaaagatgtgcactcaggcctgattggaccccttctggtctgccacactaacacactgaaccctgctcatgggagacaagtgacagtacaggaatttgctctgtttttcaccatctttgatgagaccaaaagctggtacttcactgaaaatatggaaagaaactgcagggctccctgcaatatccagatggaagatcccacttttaaagagaattatcgcttccatgcaatcaatggctacataatggatacactacctggcttagtaatggctcaggatcaaaggattcgatggtatctgctcagcatgggcagcaatgaaaacatccattctattcatttcagtggacatgtgttcactgtacgaaaaaaagaggagtataaaatggcactgtacaatctctatccaggtgtttttgagacagtggaaatgttaccatccaaagctggaatttggcgggtggaatgccttattggcgagcatctacatgctgggatgagcacactttttctggtgtacagcaataagtgtcagactcccctgggaatggcttctggacacattagagattttcagattacagcttcaggacaatatggacagtgggccccaaagctggccagacttcattattccggatcaatcaatgcctggagcaccaaggagcccttttcttggatcaaggtggatctgttggcaccaatgattattcacggcatcaagacccagggtgcccgtcagaagttctccagcctctacatctctcagtttatcatcatgtatagtcttgatgggaagaagtggcagacttatcgaggaaattccactggaaccttaatggtcttctttggcaatgtggattcatctgggataaaacacaatatttttaaccctccaattattgctcgatacatccgtttgcacccaactcattatagcattcgcagcactcttcgcatggagttgatgggctgtgatttaaatagttgcagcatgccattgggaatggagagtaaagcaatatcagatgcacagattactgcttcatcctactttaccaatatgtttgccacctggtctccttcaaaagctcgacttcacctccaagggaggagtaatgcctggagacctcaggtgaataatccaaaagagtggctgcaagtggacttccagaagacaatgaaagtcacaggagtaactactcagggagtaaaatctctgcttaccagcatgtatgtgaaggagttcctcatctccagcagtcaagatggccatcagtggactctcttttttcagaatggcaaagtaaaggtttttcagggaaatcaagactccttcacacctgtggtgaactctctagacccaccgttactgactcgctaccttcgaattcacccccagagttgggtgcaccagattgccctgaggatggaggttctgggctgcgaggcacaggacctctacggcgcgccacccgggtcgtccccgtcggcgtccaccggaacagggccagggtcatccccgtcagcgtcgactgggacgggacccgggacacccggttcggggactgcatcctcctcgcctggttcgtccaccccgtcaggagccacgggttcgccgggaagcagcccaagcgcatccactggtacagggcctggggcttcaccgggtacttcatccacggggtcaccgggaacgcccggatcggggacggcttcctcatcaccaggatcgtcaacaccctcgggcgcaacgggcagccccggaacccctggttcgggtacggcgtcgtcgagccccggtgcgagcccgggaacaagctcgacaggatcgcctggggcgtcacccggcacgtcgagcacaggcagccccggaacccctggatcgggaaccgcgtcgtcaagcgcctcgagcgaacaaaaactcatctcagaagaggatctgtcacctgcaaccggtcatcatcaccatcaccattga

SEQ ID NO: 831 - protein, 2047 aa, synthetic construct
  REGION 1..2047: note = Description of Artificial Sequence: Synthetic polypeptide
ATRRYYLGAVELSWDYMQSDLGELPVDARFPPRVPKSFPFNTSVVYKKTLFVEFTDHLFNIAKPRPPWMGLLGPTIQAEVYDTVVITLKNMASHPVSLHAVGVSYWKASEGAEYDDQTSQREKEDDKVFPGGSHTYVWQVLKENGPMASDPLCLTYSYLSHVDLVKDLNSGLIGALLVCREGSLAKEKTQTLHKFILLFAVFDEGKSWHSETKNSLMQDRDAASARAWPKMHTVNGYVNRSLPGLIGCHRKSVYWHVIGMGTTPEVHSIFLEGHTFLVRNHRQASLEISPITFLTAQTLLMDLGQFLLFCHISSHQHDGMEAYVKVDSCPEEPQLRMKNNEEAEDYDDDLTDSEMDVVRFDDDNSPSFIQIRSVAKKHPKTWVHYIAAEEEDWDYAPLVLAPDDRSYKSQYLNNGPQRIGRKYKKVRFMAYTDETFKTREAIQHESGILGPLLYGEVGDTLLIIFKNQASRPYNIYPHGITDVRPLYSRRLPKGVKHLKDFPILPGEIFKYKWTVTVEDGPTKSDPRCLTRYYSSFVNMERDLASGLIGPLLICYKESVDQRGNQIMSDKRNVILFSVFDENRSWYLTENIQRFLPNPAGVQLEDPEFQASNIMHSINGYVFDSLQLSVCLHEVAYWYILSIGAQTDFLSVFFSGYTFKHKMVYEDTLTLFPFSGETVFMSMENPGLWILGCHNSDFRNRGMTALLKVSSCDKNTGDYYEDSYEDISAYLLSKNNAIEPRSFSQNGAPGTSESATPESGPGSEPATSGSETPGTSESATPESGPGSEPATSGSETPGTSESATPESGPGTSTEPSEGSAPGSPAGSPTSTEEGTSESATPESGPGSEPATSGSETPGTSESATPESGPGSPAGSPTSTEEGSPAGSPTSTEEGTSTEPSEGSAPGTSESATPESGPGTSESATPESGPGTSESATPESGPGSEPATSGSETPGSEPATSGSETPGSPAGSPTSTEEGTSTEPSEGSAPGTSTEPSEGSAPGSEPATSGSETPGTSESATPESGPGTSTEPSEGSAPASSPPVLKRHQAEITRTTLQSDQEEIDYDDTISVEMKKEDFDIYDEDENQSPRSFQKKTRHYFIAAVERLWDYGMSSSPHVLRNRAQSGSVPQFKKVVFQEFTDGSFTQPLYRGELNEHLGLLGPYIRAEVEDNIMVTFRNQASRPYSFYSSLISYEEDQRQGAEPRKNFVKPNETKTYFWKVQHHMAPTKDEFDCKAWAYFSDVDLEKDVHSGLIGPLLVCHTNTLNPAHGRQVTVQEFALFFTIFDETKSWYFTENMERNCRAPCNIQMEDPTFKENYRFHAINGYIMDTLPGLVMAQDQRIRWYLLSMGSNENIHSIHFSGHVFTVRKKEEYKMALYNLYPGVFETVEMLPSKAGIWRVECLIGEHLHAGMSTLFLVYSNKCQTPLGMASGHIRDFQITASGQYGQWAPKLARLHYSGSINAWSTKEPFSWIKVDLLAPMIIHGIKTQGARQKFSSLYISQFIIMYSLDGKKWQTYRGNSTGTLMVFFGNVDSSGIKHNIFNPPIIARYIRLHPTHYSIRSTLRMELMGCDLNSCSMPLGMESKAISDAQITASSYFTNMFATWSPSKARLHLQGRSNAWRPQVNNPKEWLQVDFQKTMKVTGVTTQGVKSLLTSMYVKEFLISSSQDGHQWTLFFQNGKVKVFQGNQDSFTPVVNSLDPPLLTRYLRIHPQSWVHQIALRMEVLGCEAQDLYGAPGTSESATPESGPGSEPATSGSETPGTSESATPESGPGSEPATSGSETPGTSESATPESGPGTSTEPSEGSAPGSPAGSPTSTEEGTSESATPESGPGSEPATSGSETPGTSESATPESGPGSPAGSPTSTEEGSPAGSPTSTEEGTSTEPSEGSAPGTSESATPESGPGTSESATPESGPGTSESATPESGPGSEPATSGSETPGSEPATSGSETPGSPAGSPTSTEEGTSTEPSEGSAPGTSTEPSEGSAPGSEPATSGSETPGTSESATPESGPGTSTEPSEGSAPASSEQKLISEEDLSPATGHHHHHH

SEQ ID NO: 832 - DNA, 6144 bp, synthetic construct
  misc_feature 1..6144: note = Description of Artificial Sequence: Synthetic polynucleotide
  source 1..6144: mol_type = other DNA
gccaccagaagatactacctgggtgcagtggaactgtcatgggactatatgcaaagtgatctcggtgagctgcctgtggacgcaagatttcctcctagagtgccaaaatcttttccattcaacacctcagtcgtgtacaaaaagactctgtttgtagaattcacggatcaccttttcaacatcgctaagccaaggccaccctggatgggtctgctaggtcctaccatccaggctgaggtttatgatacagtggtcattacacttaagaacatggcttcccatcctgtcagtcttcatgctgttggtgtatcctactggaaagcttctgagggagctgaatatgatgatcagaccagtcaaagggagaaagaagatgataaagtcttccctggtggaagccatacatatgtctggcaggtcctgaaagagaatggtccaatggcctctgacccactgtgccttacctactcatatctttctcatgtggacctggtaaaagacttgaattcaggcctcattggagccctactagtatgtagagaagggagtctggccaaggaaaagacacagaccttgcacaaatttatactactttttgctgtatttgatgaagggaaaagttggcactcagaaacaaagaactccttgatgcaggatagggatgctgcatctgctcgggcctggcctaaaatgcacacagtcaatggttatgtaaacaggtctctgccaggtctgattggatgccacaggaaatcagtctattggcatgtgattggaatgggcaccactcctgaagtgcactcaatattcctcgaaggtcacacatttcttgtgaggaaccatcgccaggctagcttggaaatctcgccaataactttccttactgctcaaacactcttgatggaccttggacagtttctactgttttgtcatatctcttcccaccaacatgatggcatggaagcttatgtcaaagtagacagctgtccagaggaaccccaactacgaatgaaaaataatgaagaagcggaagactatgatgatgatcttactgattctgaaatggatgtggtcaggtttgatgatgacaactctccttcctttatccaaattcgctcagttgccaagaagcatcctaaaacttgggtacattacattgctgctgaagaggaggactgggactatgctcccttagtcctcgcccccgatgacagaagttataaaagtcaatatttgaacaatggccctcagcggattggtaggaagtacaaaaaagtccgatttatggcatacacagatgaaacctttaagactcgtgaagctattcagcatgaatcaggaatcttgggacctttactttatggggaagttggagacacactgttgattatatttaagaatcaagcaagcagaccatataacatctaccctcacggaatcactgatgtccgtcctttgtattcaaggagattaccaaaaggtgtaaaacatttgaaggattttccaattctgccaggagaaatattcaaatataaatggacagtgactgtagaagatgggccaactaaatcagatcctcggtgcctgacccgctattactctagtttcgttaatatggagagagatctagcttcaggactcattggccctctcctcatctgctacaaagaatctgtagatcaaagaggaaaccagataatgtcagacaagaggaatgtcatcctgttttctgtatttgatgagaaccgaagctggtacctcacagagaatatacaacgctttctccccaatccagctggagtgcagcttgaggatccagagttccaagcctccaacatcatgcacagcatcaatggctatgtttttgatagtttgcagttgtcagtttgtttgcatgaggtggcatactggtacattctaagcattggagcacagactgacttcctttctgtcttcttctctggatataccttcaaacacaaaatggtctatgaagacacactcaccctattcccattctcaggagaaactgtcttcatgtcgatggaaaacccaggtctatggattctggggtgccacaactcagactttcggaacagaggcatgaccgccttactgaaggtttctagttgtgacaagaacactggtgattattacgaggacagttatgaagatatttcagcatacttgctgagtaaaaacaatgccattgaaccaagaagcttctctcaaaacggcgcgccaggtacctcagagtctgctacccccgagtcagggccaggatcagagccagccacctccgggtctgagacacccgggacttccgagagtgccacccctgagtccggacccgggtccgagcccgccacttccggctccgaaactcccggcacaagcgagagcgctaccccagagtcaggaccaggaacatctacagagccctctgaaggctccgctccagggtccccagccggcagtcccactagcaccgaggagggaacctctgaaagcgccacacccgaatcagggccagggtctgagcctgctaccagcggcagcgagacaccaggcacctctgagtccgccacaccagagtccggacccggatctcccgctgggagccccacctccactgaggagggatctcctgctggctctccaacatctactgaggaaggtacctcaaccgagccatccgagggatcagctcccggcacctcagagtcggcaaccccggagtctggacccggaacttccgaaagtgccacaccagagtccggtcccgggacttcagaatcagcaacacccgagtccggccctgggtctgaacccgccacaagtggtagtgagacaccaggatcagaacctgctacctcagggtcagagacacccggatctccggcaggctcaccaacctccactgaggagggcaccagcacagaaccaagcgagggctccgcacccggaacaagcactgaacccagtgagggttcagcacccggctctgagccggccacaagtggcagtgagacacccggcacttcagagagtgccacccccgagagtggcccaggcactagtaccgagccctctgaaggcagtgcgccagcctcgagcccaccagtcttgaaacgccatcaagctgaaataactcgtactactcttcagtcagatcaagaggaaatcgattatgatgataccatatcagttgaaatgaagaaggaagattttgacatttatgatgaggatgaaaatcagagcccccgcagctttcaaaagaaaacacgacactattttattgctgcagtggagaggctctgggattatgggatgagtagctccccacatgttctaagaaacagggctcagagtggcagtgtccctcagttcaagaaagttgttttccaggaatttactgatggctcctttactcagcccttataccgtggagaactaaatgaacatttgggactcctggggccatatataagagcagaagttgaagataatatcatggtaactttcagaaatcaggcctctcgtccctattccttctattctagccttatttcttatgaggaagatcagaggcaaggagcagaacctagaaaaaactttgtcaagcctaatgaaaccaaaacttacttttggaaagtgcaacatcatatggcacccactaaagatgagtttgactgcaaagcctgggcttatttctctgatgttgacctggaaaaagatgtgcactcaggcctgattggaccccttctggtctgccacactaacacactgaaccctgctcatgggagacaagtgacagtacaggaatttgctctgtttttcaccatctttgatgagaccaaaagctggtacttcactgaaaatatggaaagaaactgcagggctccctgcaatatccagatggaagatcccacttttaaagagaattatcgcttccatgcaatcaatggctacataatggatacactacctggcttagtaatggctcaggatcaaaggattcgatggtatctgctcagcatgggcagcaatgaaaacatccattctattcatttcagtggacatgtgttcactgtacgaaaaaaagaggagtataaaatggcactgtacaatctctatccaggtgtttttgagacagtggaaatgttaccatccaaagctggaatttggcgggtggaatgccttattggcgagcatctacatgctgggatgagcacactttttctggtgtacagcaataagtgtcagactcccctgggaatggcttctggacacattagagattttcagattacagcttcaggacaatatggacagtgggccccaaagctggccagacttcattattccggatcaatcaatgcctggagcaccaaggagcccttttcttggatcaaggtggatctgttggcaccaatgattattcacggcatcaagacccagggtgcccgtcagaagttctccagcctctacatctctcagtttatcatcatgtatagtcttgatgggaagaagtggcagacttatcgaggaaattccactggaaccttaatggtcttctttggcaatgtggattcatctgggataaaacacaatatttttaaccctccaattattgctcgatacatccgtttgcacccaactcattatagcattcgcagcactcttcgcatggagttgatgggctgtgatttaaatagttgcagcatgccattgggaatggagagtaaagcaatatcagatgcacagattactgcttcatcctactttaccaatatgtttgccacctggtctccttcaaaagctcgacttcacctccaagggaggagtaatgcctggagacctcaggtgaataatccaaaagagtggctgcaagtggacttccagaagacaatgaaagtcacaggagtaactactcagggagtaaaatctctgcttaccagcatgtatgtgaaggagttcctcatctccagcagtcaagatggccatcagtggactctcttttttcagaatggcaaagtaaaggtttttcagggaaatcaagactccttcacacctgtggtgaactctctagacccaccgttactgactcgctaccttcgaattcacccccagagttgggtgcaccagattgccctgaggatggaggttctgggctgcgaggcacaggacctctacggcgcgccaggtacctcagagtctgctacccccgagtcagggccaggatcagagccagccacctccgggtctgagacacccgggacttccgagagtgccacccctgagtccggacccgggtccgagcccgccacttccggctccgaaactcccggcacaagcgagagcgctaccccagagtcaggaccaggaacatctacagagccctctgaaggctccgctccagggtccccagccggcagtcccactagcaccgaggagggaacctctgaaagcgccacacccgaatcagggccagggtctgagcctgctaccagcggcagcgagacaccaggcacctctgagtccgccacaccagagtccggacccggatctcccgctgggagccccacctccactgaggagggatctcctgctggctctccaacatctactgaggaaggtacctcaaccgagccatccgagggatcagctcccggcacctcagagtcggcaaccccggagtctggacccggaacttccgaaagtgccacaccagagtccggtcccgggacttcagaatcagcaacacccgagtccggccctgggtctgaacccgccacaagtggtagtgagacaccaggatcagaacctgctacctcagggtcagagacacccggatctccggcaggctcaccaacctccactgaggagggcaccagcacagaaccaagcgagggctccgcacccggaacaagcactgaacccagtgagggttcagcacccggctctgagccggccacaagtggcagtgagacacccggcacttcagagagtgccacccccgagagtggcccaggcactagtaccgagccctctgaaggcagtgcgccagcctcgagcgaacaaaaactcatctcagaagaggatctgtcacctgcaaccggtcatcatcaccatcaccattga

SEQ ID NO: 833 - protein, 1903 aa, synthetic construct
  REGION 1..1903: note = Description of Artificial Sequence: Synthetic polypeptide
ATRRYYLGAVELSWDYMQSDLGELPVDARFPPRVPKSFPFNTSVVYKKTLFVEFTDHLFNIAKPRPPWMGLLGPTIQAEVYDTVVITLKNMASHPVSLHAVGVSYWKASEGAEYDDQTSQREKEDDKVFPGGSHTYVWQVLKENGPMASDPLCLTYSYLSHVDLVKDLNSGLIGALLVCREGSLAKEKTQTLHKFILLFAVFDEGKSWHSETKNSLMQDRDAASARAWPKMHTVNGYVNRSLPGLIGCHRKSVYWHVIGMGTTPEVHSIFLEGHTFLVRNHRQASLEISPITFLTAQTLLMDLGQFLLFCHISSHQHDGMEAYVKVDSCPEEPQLRMKNNEEAEDYDDDLTDSEMDVVRFDDDNSPSFIQIRSVAKKHPKTWVHYIAAEEEDWDYAPLVLAPDDRSYKSQYLNNGPQRIGRKYKKVRFMAYTDETFKTREAIQHESGILGPLLYGEVGDTLLIIFKNQASRPYNIYPHGITDVRPLYSRRLPKGVKHLKDFPILPGEIFKYKWTVTVEDGPTKSDPRCLTRYYSSFVNMERDLASGLIGPLLICYKESVDQRGNQIMSDKRNVILFSVFDENRSWYLTENIQRFLPNPAGVQLEDPEFQASNIMHSINGYVFDSLQLSVCLHEVAYWYILSIGAQTDFLSVFFSGYTFKHKMVYEDTLTLFPFSGETVFMSMENPGLWILGCHNSDFRNRGMTALLKVSSCDKNTGDYYEDSYEDISAYLLSKNNAIEPRSFSQNGAPSPAGSPTSTEEGTSESATPESGPGSEPATSGSETPGTSESATPESGPGTSTEPSEGSAPGTSTEPSEGSAPGTSTEPSEGSAPGTSTEPSEGSAPGTSTEPSEGSAPGTSTEPSEGSAPGSPAGSPTSTEEGTSTEPSEGSAPGASSPPVLKRHQAEITRTTLQSDQEEIDYDDTISVEMKKEDFDIYDEDENQSPRSFQKKTRHYFIAAVERLWDYGMSSSPHVLRNRAQSGSVPQFKKVVFQEFTDGSFTQPLYRGELNEHLGLLGPYIRAEVEDNIMVTFRNQASRPYSFYSSLISYEEDQRQGAEPRKNFVKPNETKTYFWKVQHHMAPTKDEFDCKAWAYFSDVDLEKDVHSGLIGPLLVCHTNTLNPAHGRQVTVQEFALFFTIFDETKSWYFTENMERNCRAPCNIQMEDPTFKENYRFHAINGYIMDTLPGLVMAQDQRIRWYLLSMGSNENIHSIHFSGHVFTVRKKEEYKMALYNLYPGVFETVEMLPSKAGIWRVECLIGEHLHAGMSTLFLVYSNKCQTPLGMASGHIRDFQITASGQYGQWAPKLARLHYSGSINAWSTKEPFSWIKVDLLAPMIIHGIKTQGARQKFSSLYISQFIIMYSLDGKKWQTYRGNSTGTLMVFFGNVDSSGIKHNIFNPPIIARYIRLHPTHYSIRSTLRMELMGCDLNSCSMPLGMESKAISDAQITASSYFTNMFATWSPSKARLHLQGRSNAWRPQVNNPKEWLQVDFQKTMKVTGVTTQGVKSLLTSMYVKEFLISSSQDGHQWTLFFQNGKVKVFQGNQDSFTPVVNSLDPPLLTRYLRIHPQSWVHQIALRMEVLGCEAQDLYGAPGTSESATPESGPGSEPATSGSETPGTSESATPESGPGSEPATSGSETPGTSESATPESGPGTSTEPSEGSAPGSPAGSPTSTEEGTSESATPESGPGSEPATSGSETPGTSESATPESGPGSPAGSPTSTEEGSPAGSPTSTEEGTSTEPSEGSAPGTSESATPESGPGTSESATPESGPGTSESATPESGPGSEPATSGSETPGSEPATSGSETPGSPAGSPTSTEEGTSTEPSEGSAPGTSTEPSEGSAPGSEPATSGSETPGTSESATPESGPGTSTEPSEGSAPASSEQKLISEEDLSPATGHHHHHH

SEQ ID NO: 834 - DNA, 5712 bp, synthetic construct
  misc_feature 1..5712: note = Description of Artificial Sequence: Synthetic polynucleotide
  source 1..5712: mol_type = other DNA
gccaccagaagatactacctgggtgcagtggaactgtcatgggactatatgcaaagtgatctcggtgagctgcctgtggacgcaagatttcctcctagagtgccaaaatcttttccattcaacacctcagtcgtgtacaaaaagactctgtttgtagaattcacggatcaccttttcaacatcgctaagccaaggccaccctggatgggtctgctaggtcctaccatccaggctgaggtttatgatacagtggtcattacacttaagaacatggcttcccatcctgtcagtcttcatgctgttggtgtatcctactggaaagcttctgagggagctgaatatgatgatcagaccagtcaaagggagaaagaagatgataaagtcttccctggtggaagccatacatatgtctggcaggtcctgaaagagaatggtccaatggcctctgacccactgtgccttacctactcatatctttctcatgtggacctggtaaaagacttgaattcaggcctcattggagccctactagtatgtagagaagggagtctggccaaggaaaagacacagaccttgcacaaatttatactactttttgctgtatttgatgaagggaaaagttggcactcagaaacaaagaactccttgatgcaggatagggatgctgcatctgctcgggcctggcctaaaatgcacacagtcaatggttatgtaaacaggtctctgccaggtctgattggatgccacaggaaatcagtctattggcatgtgattggaatgggcaccactcctgaagtgcactcaatattcctcgaaggtcacacatttcttgtgaggaaccatcgccaggctagcttggaaatctcgccaataactttccttactgctcaaacactcttgatggaccttggacagtttctactgttttgtcatatctcttcccaccaacatgatggcatggaagcttatgtcaaagtagacagctgtccagaggaaccccaactacgaatgaaaaataatgaagaagcggaagactatgatgatgatcttactgattctgaaatggatgtggtcaggtttgatgatgacaactctccttcctttatccaaattcgctcagttgccaagaagcatcctaaaacttgggtacattacattgctgctgaagaggaggactgggactatgctcccttagtcctcgcccccgatgacagaagttataaaagtcaatatttgaacaatggccctcagcggattggtaggaagtacaaaaaagtccgatttatggcatacacagatgaaacctttaagactcgtgaagctattcagcatgaatcaggaatcttgggacctttactttatggggaagttggagacacactgttgattatatttaagaatcaagcaagcagaccatataacatctaccctcacggaatcactgatgtccgtcctttgtattcaaggagattaccaaaaggtgtaaaacatttgaaggattttccaattctgccaggagaaatattcaaatataaatggacagtgactgtagaagatgggccaactaaatcagatcctcggtgcctgacccgctattactctagtttcgttaatatggagagagatctagcttcaggactcattggccctctcctcatctgctacaaagaatctgtagatcaaagaggaaaccagataatgtcagacaagaggaatgtcatcctgttttctgtatttgatgagaaccgaagctggtacctcacagagaatatacaacgctttctccccaatccagctggagtgcagcttgaggatccagagttccaagcctccaacatcatgcacagcatcaatggctatgtttttgatagtttgcagttgtcagtttgtttgcatgaggtggcatactggtacattctaagcattggagcacagactgacttcctttctgtcttcttctctggatataccttcaaacacaaaatggtctatgaagacacactcaccctattcccattctcaggagaaactgtcttcatgtcgatggaaaacccaggtctatggattctggggtgccacaactcagactttcggaacagaggcatgaccgccttactgaaggtttctagttgtgacaagaacactggtgattattacgaggacagttatgaagatatttcagcatacttgctgagtaaaaacaatgccattgaaccaagaagcttctctcaaaacggcgcgccaagtcccgctggaagcccaactagcaccgaagaggggacctcagagtccgccacccccgagtccggccctggctctgagcctgccactagcggctccgagactcctggcacatccgaaagcgctacacccgagagtggacccggcacctctaccgagcccagtgagggctccgcccctggaacaagcaccgagcccagcgaaggcagcgccccagggacctccacagagcccagtgaaggcagtgctcctggcaccagcaccgaaccaagcgagggctctgcacccgggacctccaccgagccaagcgaaggctctgcccctggcacttccaccgagcccagcgaaggcagcgcccctgggagccccgctggctctcccaccagcactgaggagggcacatctaccgaaccaagtgaaggctctgcaccaggtgcctcgagcccaccagtcttgaaacgccatcaagctgaaataactcgtactactcttcagtcagatcaagaggaaatcgattatgatgataccatatcagttgaaatgaagaaggaagattttgacatttatgatgaggatgaaaatcagagcccccgcagctttcaaaagaaaacacgacactattttattgctgcagtggagaggctctgggattatgggatgagtagctccccacatgttctaagaaacagggctcagagtggcagtgtccctcagttcaagaaagttgttttccaggaatttactgatggctcctttactcagcccttataccgtggagaactaaatgaacatttgggactcctggggccatatataagagcagaagttgaagataatatcatggtaactttcagaaatcaggcctctcgtccctattccttctattctagccttatttcttatgaggaagatcagaggcaaggagcagaacctagaaaaaactttgtcaagcctaatgaaaccaaaacttacttttggaaagtgcaacatcatatggcacccactaaagatgagtttgactgcaaagcctgggcttatttctctgatgttgacctggaaaaagatgtgcactcaggcctgattggaccccttctggtctgccacactaacacactgaaccctgctcatgggagacaagtgacagtacaggaatttgctctgtttttcaccatctttgatgagaccaaaagctggtacttcactgaaaatatggaaagaaactgcagggctccctgcaatatccagatggaagatcccacttttaaagagaattatcgcttccatgcaatcaatggctacataatggatacactacctggcttagtaatggctcaggatcaaaggattcgatggtatctgctcagcatgggcagcaatgaaaacatccattctattcatttcagtggacatgtgttcactgtacgaaaaaaagaggagtataaaatggcactgtacaatctctatccaggtgtttttgagacagtggaaatgttaccatccaaagctggaatttggcgggtggaatgccttattggcgagcatctacatgctgggatgagcacactttttctggtgtacagcaataagtgtcagactcccctgggaatggcttctggacacattagagattttcagattacagcttcaggacaatatggacagtgggccccaaagctggccagacttcattattccggatcaatcaatgcctggagcaccaaggagcccttttcttggatcaaggtggatctgttggcaccaatgattattcacggcatcaagacccagggtgcccgtcagaagttctccagcctctacatctctcagtttatcatcatgtatagtcttgatgggaagaagtggcagacttatcgaggaaattccactggaaccttaatggtcttctttggcaatgtggattcatctgggataaaacacaatatttttaaccctccaattattgctcgatacatccgtttgcacccaactcattatagcattcgcagcactcttcgcatggagttgatgggctgtgatttaaatagttgcagcatgccattgggaatggagagtaaagcaatatcagatgcacagattactgcttcatcctactttaccaatatgtttgccacctggtctccttcaaaagctcgacttcacctccaagggaggagtaatgcctggagacctcaggtgaataatccaaaagagtggctgcaagtggacttccagaagacaatgaaagtcacaggagtaactactcagggagtaaaatctctgcttaccagcatgtatgtgaaggagttcctcatctccagcagtcaagatggccatcagtggactctcttttttcagaatggcaaagtaaaggtttttcagggaaatcaagactccttcacacctgtggtgaactctctagacccaccgttactgactcgctaccttcgaattcacccccagagttgggtgcaccagattgccctgaggatggaggttctgggctgcgaggcacaggacctctacggcgcgccaggtacctcagagtctgctacccccgagtcagggccaggatcagagccagccacctccgggtctgagacacccgggacttccgagagtgccacccctgagtccggacccgggtccgagcccgccacttccggctccgaaactcccggcacaagcgagagcgctaccccagagtcaggaccaggaacatctacagagccctctgaaggctccgctccagggtccccagccggcagtcccactagcaccgaggagggaacctctgaaagcgccacacccgaatcagggccagggtctgagcctgctaccagcggcagcgagacaccaggcacctctgagtccgccacaccagagtccggacccggatctcccgctgggagccccacctccactgaggagggatctcctgctggctctccaacatctactgaggaaggtacctcaaccgagccatccgagggatcagctcccggcacctcagagtcggcaaccccggagtctggacccggaacttccgaaagtgccacaccagagtccggtcccgggacttcagaatcagcaacacccgagtccggccctgggtctgaacccgccacaagtggtagtgagacaccaggatcagaacctgctacctcagggtcagagacacccggatctccggcaggctcaccaacctccactgaggagggcaccagcacagaaccaagcgagggctccgcacccggaacaagcactgaacccagtgagggttcagcacccggctctgagccggccacaagtggcagtgagacacccggcacttcagagagtgccacccccgagagtggcccaggcactagtaccgagccctctgaaggcagtgcgccagcctcgagcgaacaaaaactcatctcagaagaggatctgtcacctgcaaccggtcatcatcaccatcaccattga

SEQ ID NO: 835 - protein, 1903 aa, synthetic construct
  REGION 1..1903: note = Description of Artificial Sequence: Synthetic polypeptide
ATRRYYLGAVELSWDYMQSDLGELPVDARFPPRVPKSFPFNTSVVYKKTLFVEFTDHLFNIAKPRPPWMGLLGPTIQAEVYDTVVITLKNMASHPVSLHAVGVSYWKASEGAEYDDQTSQREKEDDKVFPGGSHTYVWQVLKENGPMASDPLCLTYSYLSHVDLVKDLNSGLIGALLVCREGSLAKEKTQTLHKFILLFAVFDEGKSWHSETKNSLMQDRDAASARAWPKMHTVNGYVNRSLPGLIGCHRKSVYWHVIGMGTTPEVHSIFLEGHTFLVRNHRQASLEISPITFLTAQTLLMDLGQFLLFCHISSHQHDGMEAYVKVDSCPEEPQLRMKNNEEAEDYDDDLTDSEMDVVRFDDDNSPSFIQIRSVAKKHPKTWVHYIAAEEEDWDYAPLVLAPDDRSYKSQYLNNGPQRIGRKYKKVRFMAYTDETFKTREAIQHESGILGPLLYGEVGDTLLIIFKNQASRPYNIYPHGITDVRPLYSRRLPKGVKHLKDFPILPGEIFKYKWTVTVEDGPTKSDPRCLTRYYSSFVNMERDLASGLIGPLLICYKESVDQRGNQIMSDKRNVILFSVFDENRSWYLTENIQRFLPNPAGVQLEDPEFQASNIMHSINGYVFDSLQLSVCLHEVAYWYILSIGAQTDFLSVFFSGYTFKHKMVYEDTLTLFPFSGETVFMSMENPGLWILGCHNSDFRNRGMTALLKVSSCDKNTGDYYEDSYEDISAYLLSKNNAIEPRSFSQNGAPSPAGSPTSTEEGTSESATPESGPGSEPATSGSETPGTSESATPESGPGTSTEPSEGSAPGTSTEPSEGSAPGTSTEPSEGSAPGTSTEPSEGSAPGTSTEPSEGSAPGTSTEPSEGSAPGSPAGSPTSTEEGTSTEPSEGSAPGASSPPVLKRHQREITRTTLQSDQEEIDYDDTISVEMKKEDFDIYDEDENQSPRSFQKKTRHYFIAAVERLWDYGMSSSPHVLRNRAQSGSVPQFKKVVFQEFTDGSFTQPLYRGELNEHLGLLGPYIRAEVEDNIMVTFRNQASRPYSFYSSLISYEEDQRQGAEPRKNFVKPNETKTYFWKVQHHMAPTKDEFDCKAWAYFSDVDLEKDVHSGLIGPLLVCHTNTLNPAHGRQVTVQEFALFFTIFDETKSWYFTENMERNCRAPCNIQMEDPTFKENYRFHAINGYIMDTLPGLVMAQDQRIRWYLLSMGSNENIHSIHFSGHVFTVRKKEEYKMALYNLYPGVFETVEMLPSKAGIWRVECLIGEHLHAGMSTLFLVYSNKCQTPLGMASGHIRDFQITASGQYGQWAPKLARLHYSGSINAWSTKEPFSWIKVDLLAPMIIHGIKTQGARQKFSSLYISQFIIMYSLDGKKWQTYRGNSTGTLMVFFGNVDSSGIKHNIFNPPIIARYIRLHPTHYSIRSTLRMELMGCDLNSCSMPLGMESKAISDAQITASSYFTNMFATWSPSKARLHLQGRSNAWRPQVNNPKEWLQVDFQKTMKVTGVTTQGVKSLLTSMYVKEFLISSSQDGHQWTLFFQNGKVKVFQGNQDSFTPVVNSLDPPLLTRYLRIHPQSWVHQIALRMEVLGCEAQDLYGAPGTSESATPESGPGSEPATSGSETPGTSESATPESGPGSEPATSGSETPGTSESATPESGPGTSTEPSEGSAPGSPAGSPTSTEEGTSESATPESGPGSEPATSGSETPGTSESATPESGPGSPAGSPTSTEEGSPAGSPTSTEEGTSTEPSEGSAPGTSESATPESGPGTSESATPESGPGTSESATPESGPGSEPATSGSETPGSEPATSGSETPGSPAGSPTSTEEGTSTEPSEGSAPGTSTEPSEGSAPGSEPATSGSETPGTSESATPESGPGTSTEPSEGSAPASSEQKLISEEDLSPATGHHHHHH

SEQ ID NO: 836 - DNA, 5712 bp, synthetic construct
  misc_feature 1..5712: note = Description of Artificial Sequence: Synthetic polynucleotide
  source 1..5712: mol_type = other DNA
gccaccagaagatactacctgggtgcagtggaactgtcatgggactatatgcaaagtgatctcggtgagctgcctgtggacgcaagatttcctcctagagtgccaaaatcttttccattcaacacctcagtcgtgtacaaaaagactctgtttgtagaattcacggatcaccttttcaacatcgctaagccaaggccaccctggatgggtctgctaggtcctaccatccaggctgaggtttatgatacagtggtcattacacttaagaacatggcttcccatcctgtcagtcttcatgctgttggtgtatcctactggaaagcttctgagggagctgaatatgatgatcagaccagtcaaagggagaaagaagatgataaagtcttccctggtggaagccatacatatgtctggcaggtcctgaaagagaatggtccaatggcctctgacccactgtgccttacctactcatatctttctcatgtggacctggtaaaagacttgaattcaggcctcattggagccctactagtatgtagagaagggagtctggccaaggaaaagacacagaccttgcacaaatttatactactttttgctgtatttgatgaagggaaaagttggcactcagaaacaaagaactccttgatgcaggatagggatgctgcatctgctcgggcctggcctaaaatgcacacagtcaatggttatgtaaacaggtctctgccaggtctgattggatgccacaggaaatcagtctattggcatgtgattggaatgggcaccactcctgaagtgcactcaatattcctcgaaggtcacacatttcttgtgaggaaccatcgccaggctagcttggaaatctcgccaataactttccttactgctcaaacactcttgatggaccttggacagtttctactgttttgtcatatctcttcccaccaacatgatggcatggaagcttatgtcaaagtagacagctgtccagaggaaccccaactacgaatgaaaaataatgaagaagcggaagactatgatgatgatcttactgattctgaaatggatgtggtcaggtttgatgatgacaactctccttcctttatccaaattcgctcagttgccaagaagcatcctaaaacttgggtacattacattgctgctgaagaggaggactgggactatgctcccttagtcctcgcccccgatgacagaagttataaaagtcaatatttgaacaatggccctcagcggattggtaggaagtacaaaaaagtccgatttatggcatacacagatgaaacctttaagactcgtgaagctattcagcatgaatcaggaatcttgggacctttactttatggggaagttggagacacactgttgattatatttaagaatcaagcaagcagaccatataacatctaccctcacggaatcactgatgtccgtcctttgtattcaaggagattaccaaaaggtgtaaaacatttgaaggattttccaattctgccaggagaaatattcaaatataaatggacagtgactgtagaagatgggccaactaaatcagatcctcggtgcctgacccgctattactctagtttcgttaatatggagagagatctagcttcaggactcattggccctctcctcatctgctacaaagaatctgtagatcaaagaggaaaccagataatgtcagacaagaggaatgtcatcctgttttctgtatttgatgagaaccgaagctggtacctcacagagaatatacaacgctttctccccaatccagctggagtgcagcttgaggatccagagttccaagcctccaacatcatgcacagcatcaatggctatgtttttgatagtttgcagttgtcagtttgtttgcatgaggtggcatactggtacattctaagcattggagcacagactgacttcctttctgtcttcttctctggatataccttcaaacacaaaatggtctatgaagacacactcaccctattcccattctcaggagaaactgtcttcatgtcgatggaaaacccaggtctatggattctggggtgccacaactcagactttcggaacagaggcatgaccgccttactgaaggtttctagttgtgacaagaacactggtgattattacgaggacagttatgaagatatttcagcatacttgctgagtaaaaacaatgccattgaaccaagaagcttctctcaaaacggcgcgccaagtcccgctggaagcccaactagcaccgaagaggggacctcagagtccgccacccccgagtccggccctggctctgagcctgccactagcggctccgagactcctggcacatccgaaagcgctacacccgagagtggacccggcacctctaccgagcccagtgagggctccgcccctggaacaagcaccgagcccagcgaaggcagcgccccagggacctccacagagcccagtgaaggcagtgctcctggcaccagcaccgaaccaagcgagggctctgcacccgggacctccaccgagccaagcgaaggctctgcccctggcacttccaccgagcccagcgaaggcagcgcccctgggagccccgctggctctcccaccagcactgaggagggcacatctaccgaaccaagtgaaggctctgcaccaggtgcctcgagcccaccagtcttgaaacgccatcaacgggaaataactcgtactactcttcagtcagatcaagaggaaatcgattatgatgataccatatcagttgaaatgaagaaggaagattttgacatttatgatgaggatgaaaatcagagcccccgcagctttcaaaagaaaacacgacactattttattgctgcagtggagaggctctgggattatgggatgagtagctccccacatgttctaagaaacagggctcagagtggcagtgtccctcagttcaagaaagttgttttccaggaatttactgatggctcctttactcagcccttataccgtggagaactaaatgaacatttgggactcctggggccatatataagagcagaagttgaagataatatcatggtaactttcagaaatcaggcctctcgtccctattccttctattctagccttatttcttatgaggaagatcagaggcaaggagcagaacctagaaaaaactttgtcaagcctaatgaaaccaaaacttacttttggaaagtgcaacatcatatggcacccactaaagatgagtttgactgcaaagcctgggcttatttctctgatgttgacctggaaaaagatgtgcactcaggcctgattggaccccttctggtctgccacactaacacactgaaccctgctcatgggagacaagtgacagtacaggaatttgctctgtttttcaccatctttgatgagaccaaaagctggtacttcactgaaaatatggaaagaaactgcagggctccctgcaatatccagatggaagatcccacttttaaagagaattatcgcttccatgcaatcaatggctacataatggatacactacctggcttagtaatggctcaggatcaaaggattcgatggtatctgctcagcatgggcagcaatgaaaacatccattctattcatttcagtggacatgtgttcactgtacgaaaaaaagaggagtataaaatggcactgtacaatctctatccaggtgtttttgagacagtggaaatgttaccatccaaagctggaatttggcgggtggaatgccttattggcgagcatctacatgctgggatgagcacactttttctggtgtacagcaataagtgtcagactcccctgggaatggcttctggacacattagagattttcagattacagcttcaggacaatatggacagtgggccccaaagctggccagacttcattattccggatcaatcaatgcctggagcaccaaggagcccttttcttggatcaaggtggatctgttggcaccaatgattattcacggcatcaagacccagggtgcccgtcagaagttctccagcctctacatctctcagtttatcatcatgtatagtcttgatgggaagaagtggcagacttatcgaggaaattccactggaaccttaatggtcttctttggcaatgtggattcatctgggataaaacacaatatttttaaccctccaattattgctcgatacatccgtttgcacccaactcattatagcattcgcagcactcttcgcatggagttgatgggctgtgatttaaatagttgcagcatgccattgggaatggagagtaaagcaatatcagatgcacagattactgcttcatcctactttaccaatatgtttgccacctggtctccttcaaaagctcgacttcacctccaagggaggagtaatgcctggagacctcaggtgaataatccaaaagagtggctgcaagtggacttccagaagacaatgaaagtcacaggagtaactactcagggagtaaaatctctgcttaccagcatgtatgtgaaggagttcctcatctccagcagtcaagatggccatcagtggactctcttttttcagaatggcaaagtaaaggtttttcagggaaatcaagactccttcacacctgtggtgaactctctagacccaccgttactgactcgctaccttcgaattcacccccagagttgggtgcaccagattgccctgaggatggaggttctgggctgcgaggcacaggacctctacggcgcgccaggtacctcagagtctgctacccccgagtcagggccaggatcagagccagccacctccgggtctgagacacccgggacttccgagagtgccacccctgagtccggacccgggtccgagcccgccacttccggctccgaaactcccggcacaagcgagagcgctaccccagagtcaggaccaggaacatctacagagccctctgaaggctccgctccagggtccccagccggcagtcccactagcaccgaggagggaacctctgaaagcgccacacccgaatcagggccagggtctgagcctgctaccagcggcagcgagacaccaggcacctctgagtccgccacaccagagtccggacccggatctcccgctgggagccccacctccactgaggagggatctcctgctggctctccaacatctactgaggaaggtacctcaaccgagccatccgagggatcagctcccggcacctcagagtcggcaaccccggagtctggacccggaacttccgaaagtgccacaccagagtccggtcccgggacttcagaatcagcaacacccgagtccggccctgggtctgaacccgccacaagtggtagtgagacaccaggatcagaacctgctacctcagggtcagagacacccggatctccggcaggctcaccaacctccactgaggagggcaccagcacagaaccaagcgagggctccgcacccggaacaagcactgaacccagtgagggttcagcacccggctctgagccggccacaagtggcagtgagacacccggcacttcagagagtgccacccccgagagtggcccaggcactagtaccgagccctctgaaggcagtgcgccagcctcgagcgaacaaaaactcatctcagaagaggatctgtcacctgcaaccggtcatcatcaccatcaccattga

SEQ ID NO: 837 - protein, 2047 aa, synthetic construct
  REGION 1..2047: note = Description of Artificial Sequence: Synthetic polypeptide
ATRRYYLGAVELSWDYMQSDLGELPVDARFPPRVPKSFPFNTSVVYKKTLFVEFTDHLFNIAKPRPPWMGLLGPTIQAEVYDTVVITLKNMASHPVSLHAVGVSYWKASEGAEYDDQTSQREKEDDKVFPGGSHTYVWQVLKENGPMASDPLCLTYSYLSHVDLVKDLNSGLIGALLVCREGSLAKEKTQTLHKFILLFAVFDEGKSWHSETKNSLMQDRDAASARAWPKMHTVNGYVNRSLPGLIGCHRKSVYWHVIGMGTTPEVHSIFLEGHTFLVRNHRQASLEISPITFLTAQTLLMDLGQFLLFCHISSHQHDGMEAYVKVDSCPEEPQLRMKNNEEAEDYDDDLTDSEMDVVRFDDDNSPSFIQIRSVAKKHPKTWVHYIAAEEEDWDYAPLVLAPDDRSYKSQYLNNGPQRIGRKYKKVRFMAYTDETFKTREAIQHESGILGPLLYGEVGDTLLIIFKNQASRPYNIYPHGITDVRPLYSRRLPKGVKHLKDFPILPGEIFKYKWTVTVEDGPTKSDPRCLTRYYSSFVNMERDLASGLIGPLLICYKESVDQRGNQIMSDKRNVILFSVFDENRSWYLTENIQRFLPNPAGVQLEDPEFQASNIMHSINGYVFDSLQLSVCLHEVAYWYILSIGAQTDFLSVFFSGYTFKHKMVYEDTLTLFPFSGETVFMSMENPGLWILGCHNSDFRNRGMTALLKVSSCDKNTGDYYEDSYEDISAYLLSKNNAIEPRSFSQNGAPPGASPGTSSTGSPGASPGTSSTGSPGTPGSGTASSSPGSSTPSGATGSPGTPGSGTASSSPGSSTPSGATGSPGTPGSGTASSSPGSSTPSGATGSPGSSTPSGATGSPGSSPSASTGTGPGSSPSASTGTGPGASPGTSSTGSPGTPGSGTASSSPGSSTPSGATGSPGSSPSASTGTGPGSSPSASTGTGPGASPGTSSTGSPGASPGTSSTGSPGSSTPSGATGSPGSSPSASTGTGPGASPGTSSTGSPGSSPSASTGTGPGTPGSGTASSSPGSSTPSGATGSASSPPVLKRHQAEITRTTLQSDQEEIDYDDTISVEMKKEDFDIYDEDENQSPRSFQKKTRHYFIAAVERLWDYGMSSSPHVLRNRAQSGSVPQFKKVVFQEFTDGSFTQPLYRGELNEHLGLLGPYIRAEVEDNIMVTFRNQASRPYSFYSSLISYEEDQRQGAEPRKNFVKPNETKTYFWKVQHHMAPTKDEFDCKAWAYFSDVDLEKDVHSGLIGPLLVCHTNTLNPAHGRQVTVQEFALFFTIFDETKSWYFTENMERNCRAPCNIQMEDPTFKENYRFHAINGYIMDTLPGLVMAQDQRIRWYLLSMGSNENIHSIHFSGHVFTVRKKEEYKMALYNLYPGVFETVEMLPSKAGIWRVECLIGEHLHAGMSTLFLVYSNKCQTPLGMASGHIRDFQITASGQYGQWAPKLARLHYSGSINAWSTKEPFSWIKVDLLAPMIIHGIKTQGARQKFSSLYISQFIIMYSLDGKKWQTYRGNSTGTLMVFFGNVDSSGIKHNIFNPPIIARYIRLHPTHYSIRSTLRMELMGCDLNSCSMPLGMESKAISDAQITASSYFTNMFATWSPSKARLHLQGRSNAWRPQVNNPKEWLQVDFQKTMKVTGVTTQGVKSLLTSMYVKEFLISSSQDGHQWTLFFQNGKVKVFQGNQDSFTPVVNSLDPPLLTRYLRIHPQSWVHQIALRMEVLGCEAQDLYGAPGTSESATPESGPGSEPATSGSETPGTSESATPESGPGSEPATSGSETPGTSESATPESGPGTSTEPSEGSAPGSPAGSPTSTEEGTSESATPESGPGSEPATSGSETPGTSESATPESGPGSPAGSPTSTEEGSPAGSPTSTEEGTSTEPSEGSAPGTSESATPESGPGTSESATPESGPGTSESATPESGPGSEPATSGSETPGSEPATSGSETPGSPAGSPTSTEEGTSTEPSEGSAPGTSTEPSEGSAPGSEPATSGSETPGTSESATPESGPGTSTEPSEGSAPASSEQKLISEEDLSPATGHHHHHH

SEQ ID NO: 838 - DNA, 6144 bp, synthetic construct
  misc_feature 1..6144: note = Description of Artificial Sequence: Synthetic polynucleotide
  source 1..6144: mol_type = other DNA
gccaccagaagatactacctgggtgcagtggaactgtcatgggactatatgcaaagtgatctcggtgagctgcctgtggacgcaagatttcctcctagagtgccaaaatcttttccattcaacacctcagtcgtgtacaaaaagactctgtttgtagaattcacggatcaccttttcaacatcgctaagccaaggccaccctggatgggtctgctaggtcctaccatccaggctgaggtttatgatacagtggtcattacacttaagaacatggcttcccatcctgtcagtcttcatgctgttggtgtatcctactggaaagcttctgagggagctgaatatgatgatcagaccagtcaaagggagaaagaagatgataaagtcttccctggtggaagccatacatatgtctggcaggtcctgaaagagaatggtccaatggcctctgacccactgtgccttacctactcatatctttctcatgtggacctggtaaaagacttgaattcaggcctcattggagccctactagtatgtagagaagggagtctggccaaggaaaagacacagaccttgcacaaatttatactactttttgctgtatttgatgaagggaaaagttggcactcagaaacaaagaactccttgatgcaggatagggatgctgcatctgctcgggcctggcctaaaatgcacacagtcaatggttatgtaaacaggtctctgccaggtctgattggatgccacaggaaatcagtctattggcatgtgattggaatgggcaccactcctgaagtgcactcaatattcctcgaaggtcacacatttcttgtgaggaaccatcgccaggctagcttggaaatctcgccaataactttccttactgctcaaacactcttgatggaccttggacagtttctactgttttgtcatatctcttcccaccaacatgatggcatggaagcttatgtcaaagtagacagctgtccagaggaaccccaactacgaatgaaaaataatgaagaagcggaagactatgatgatgatcttactgattctgaaatggatgtggtcaggtttgatgatgacaactctccttcctttatccaaattcgctcagttgccaagaagcatcctaaaacttgggtacattacattgctgctgaagaggaggactgggactatgctcccttagtcctcgcccccgatgacagaagttataaaagtcaatatttgaacaatggccctcagcggattggtaggaagtacaaaaaagtccgatttatggcatacacagatgaaacctttaagactcgtgaagctattcagcatgaatcaggaatcttgggacctttactttatggggaagttggagacacactgttgattatatttaagaatcaagcaagcagaccatataacatctaccctcacggaatcactgatgtccgtcctttgtattcaaggagattaccaaaaggtgtaaaacatttgaaggattttccaattctgccaggagaaatattcaaatataaatggacagtgactgtagaagatgggccaactaaatcagatcctcggtgcctgacccgctattactctagtttcgttaatatggagagagatctagcttcaggactcattggccctctcctcatctgctacaaagaatctgtagatcaaagaggaaaccagataatgtcagacaagaggaatgtcatcctgttttctgtatttgatgagaaccgaagctggtacctcacagagaatatacaacgctttctccccaatccagctggagtgcagcttgaggatccagagttccaagcctccaacatcatgcacagcatcaatggctatgtttttgatagtttgcagttgtcagtttgtttgcatgaggtggcatactggtacattctaagcattggagcacagactgacttcctttctgtcttcttctctggatataccttcaaacacaaaatggtctatgaagacacactcaccctattcccattctcaggagaaactgtcttcatgtcgatggaaaacccaggtctatggattctggggtgccacaactcagactttcggaacagaggcatgaccgccttactgaaggtttctagttgtgacaagaacactggtgattattacgaggacagttatgaagatatttcagcatacttgctgagtaaaaacaatgccattgaaccaagaagcttctctcaaaacggcgcgccaccgggagcgtcacccggtacgtcctcaacggggagccctggggcatcacccggcacgtcctcgacagggtcccccggaacaccgggttcggggactgcgtcgtcgtcacccggttcgtcaacacccagcggtgcgacgggttccccgggaacccccggatcaggaacagcgtcgtcgagccccggaagctcgaccccgtcaggagcgaccgggtcgccaggaacgcctgggtcgggtactgcctcatcgtcgccgggttcatcgacgccctccggagcaacaggttcacccgggtcgtccacccccagcggagcgactggatcaccgggatcgagcccgtcggcatcgacaggaacaggtcccggtagctccccatcggcctccacggggacggggcctggtgcgtcaccggggacaagcagcacgggttcgccgggaacgccagggtcagggaccgcgtcgtcgagcccagggtcgtccaccccaagcggggctactgggtccccgggtagctcgccgagcgcatcaacgggaaccggaccgggcagctccccctcagcgtcgacagggacaggccctggcgcgagcccgggaacatcgtcgacggggtcacccggagcatcgccagggacctcgtcaactggctcgcctggatcgtcaacgccctcgggagccacggggtcgcccggatcatccccgtccgcctcaactggcacaggccctggtgcttcccctggaacgtccagcacaggctcccccggttccagcccttccgcttcgactgggactggacccggaaccccgggatcggggacagcgtcaagctcgcccggaagctccacgccttcgggggcaaccgggtcagcctcgagcccaccagtcttgaaacgccatcaagctgaaataactcgtactactcttcagtcagatcaagaggaaatcgattatgatgataccatatcagttgaaatgaagaaggaagattttgacatttatgatgaggatgaaaatcagagcccccgcagctttcaaaagaaaacacgacactattttattgctgcagtggagaggctctgggattatgggatgagtagctccccacatgttctaagaaacagggctcagagtggcagtgtccctcagttcaagaaagttgttttccaggaatttactgatggctcctttactcagcccttataccgtggagaactaaatgaacatttgggactcctggggccatatataagagcagaagttgaagataatatcatggtaactttcagaaatcaggcctctcgtccctattccttctattctagccttatttcttatgaggaagatcagaggcaaggagcagaacctagaaaaaactttgtcaagcctaatgaaaccaaaacttacttttggaaagtgcaacatcatatggcacccactaaagatgagtttgactgcaaagcctgggcttatttctctgatgttgacctggaaaaagatgtgcactcaggcctgattggaccccttctggtctgccacactaacacactgaaccctgctcatgggagacaagtgacagtacaggaatttgctctgtttttcaccatctttgatgagaccaaaagctggtacttcactgaaaatatggaaagaaactgcagggctccctgcaatatccagatggaagatcccacttttaaagagaattatcgcttccatgcaatcaatggctacataatggatacactacctggcttagtaatggctcaggatcaaaggattcgatggtatctgctcagcatgggcagcaatgaaaacatccattctattcatttcagtggacatgtgttcactgtacgaaaaaaagaggagtataaaatggcactgtacaatctctatccaggtgtttttgagacagtggaaatgttaccatccaaagctggaatttggcgggtggaatgccttattggcgagcatctacatgctgggatgagcacactttttctggtgtacagcaataagtgtcagactcccctgggaatggcttctggacacattagagattttcagattacagcttcaggacaatatggacagtgggccccaaagctggccagacttcattattccggatcaatcaatgcctggagcaccaaggagcccttttcttggatcaaggtggatctgttggcaccaatgattattcacggcatcaagacccagggtgcccgtcagaagttctccagcctctacatctctcagtttatcatcatgtatagtcttgatgggaagaagtggcagacttatcgaggaaattccactggaaccttaatggtcttctttggcaatgtggattcatctgggataaaacacaatatttttaaccctccaattattgctcgatacatccgtttgcacccaactcattatagcattcgcagcactcttcgcatggagttgatgggctgtgatttaaatagttgcagcatgccattgggaatggagagtaaagcaatatcagatgcacagattactgcttcatcctactttaccaatatgtttgccacctggtctccttcaaaagctcgacttcacctccaagggaggagtaatgcctggagacctcaggtgaataatccaaaagagtggctgcaagtggacttccagaagacaatgaaagtcacaggagtaactactcagggagtaaaatctctgcttaccagcatgtatgtgaaggagttcctcatctccagcagtcaagatggccatcagtggactctcttttttcagaatggcaaagtaaaggtttttcagggaaatcaagactccttcacacctgtggtgaactctctagacccaccgttactgactcgctaccttcgaattcacccccagagttgggtgcaccagattgccctgaggatggaggttctgggctgcgaggcacaggacctctacggcgcgccaggtacctcagagtctgctacccccgagtcagggccaggatcagagccagccacctccgggtctgagacacccgggacttccgagagtgccacccctgagtccggacccgggtccgagcccgccacttccggctccgaaactcccggcacaagcgagagcgctaccccagagtcaggaccaggaacatctacagagccctctgaaggctccgctccagggtccccagccggcagtcccactagcaccgaggagggaacctctgaaagcgccacacccgaatcagggccagggtctgagcctgctaccagcggcagcgagacaccaggcacctctgagtccgccacaccagagtccggacccggatctcccgctgggagccccacctccactgaggagggatctcctgctggctctccaacatctactgaggaaggtacctcaaccgagccatccgagggatcagctcccggcacctcagagtcggcaaccccggagtctggacccggaacttccgaaagtgccacaccagagtccggtcccgggacttcagaatcagcaacacccgagtccggccctgggtctgaacccgccacaagtggtagtgagacaccaggatcagaacctgctacctcagggtcagagacacccggatctccggcaggctcaccaacctccactgaggagggcaccagcacagaaccaagcgagggctccgcacccggaacaagcactgaacccagtgagggttcagcacccggctctgagccggccacaagtggcagtgagacacccggcacttcagagagtgccacccccgagagtggcccaggcactagtaccgagccctctgaaggcagtgcgccagcctcgagcgaacaaaaactcatctcagaagaggatctgtcacctgcaaccggtcatcatcaccatcaccattga

SEQ ID NO: 839 - protein, 2047 aa, synthetic construct
  REGION 1..2047: note = Description of Artificial Sequence: Synthetic polypeptide
ATRRYYLGAVELSWDYMQSDLGELPVDARFPPRVPKSFPFNTSVVYKKTLFVEFTDHLFNIAKPRPPWMGLLGPTIQAEVYDTVVITLKNMASHPVSLHAVGVSYWKASEGAEYDDQTSQREKEDDKVFPGGSHTYVWQVLKENGPMASDPLCLTYSYLSHVDLVKDLNSGLIGALLVCREGSLAKEKTQTLHKFILLFAVFDEGKSWHSETKNSLMQDRDAASARAWPKMHTVNGYVNRSLPGLIGCHRKSVYWHVIGMGTTPEVHSIFLEGHTFLVRNHRQASLEISPITFLTAQTLLMDLGQFLLFCHISSHQHDGMEAYVKVDSCPEEPQLRMKNNEEAEDYDDDLTDSEMDVVRFDDDNSPSFIQIRSVAKKHPKTWVHYIAAEEEDWDYAPLVLAPDDRSYKSQYLNNGPQRIGRKYKKVRFMAYTDETFKTREAIQHESGILGPLLYGEVGDTLLIIFKNQASRPYNIYPHGITDVRPLYSRRLPKGVKHLKDFPILPGEIFKYKWTVTVEDGPTKSDPRCLTRYYSSFVNMERDLASGLIGPLLICYKESVDQRGNQIMSDKRNVILFSVFDENRSWYLTENIQRFLPNPAGVQLEDPEFQASNIMHSINGYVFDSLQLSVCLHEVAYWYILSIGAQTDFLSVFFSGYTFKHKMVYEDTLTLFPFSGETVFMSMENPGLWILGCHNSDFRNRGMTALLKVSSCDKNTGDYYEDSYEDISAYLLSKNNAIEPRSFSQNGAPGTSESATPESGPGSEPATSGSETPGTSESATPESGPGSEPATSGSETPGTSESATPESGPGTSTEPSEGSAPGSPAGSPTSTEEGTSESATPESGPGSEPATSGSETPGTSESATPESGPGSPAGSPTSTEEGSPAGSPTSTEEGTSTEPSEGSAPGTSESATPESGPGTSESATPESGPGTSESATPESGPGSEPATSGSETPGSEPATSGSETPGSPAGSPTSTEEGTSTEPSEGSAPGTSTEPSEGSAPGSEPATSGSETPGTSESATPESGPGTSTEPSEGSAPASSPPVLKRHQREITRTTLQSDQEEIDYDDTISVEMKKEDFDIYDEDENQSPRSFQKKTRHYFIAAVERLWDYGMSSSPHVLRNRAQSGSVPQFKKVVFQEFTDGSFTQPLYRGELNEHLGLLGPYIRAEVEDNIMVTFRNQASRPYSFYSSLISYEEDQRQGAEPRKNFVKPNETKTYFWKVQHHMAPTKDEFDCKAWAYFSDVDLEKDVHSGLIGPLLVCHTNTLNPAHGRQVTVQEFALFFTIFDETKSWYFTENMERNCRAPCNIQMEDPTFKENYRFHAINGYIMDTLPGLVMAQDQRIRWYLLSMGSNENIHSIHFSGHVFTVRKKEEYKMALYNLYPGVFETVEMLPSKAGIWRVECLIGEHLHAGMSTLFLVYSNKCQTPLGMASGHIRDFQITASGQYGQWAPKLARLHYSGSINAWSTKEPFSWIKVDLLAPMIIHGIKTQGARQKFSSLYISQFIIMYSLDGKKWQTYRGNSTGTLMVFFGNVDSSGIKHNIFNPPIIARYIRLHPTHYSIRSTLRMELMGCDLNSCSMPLGMESKAISDAQITASSYFTNMFATWSPSKARLHLQGRSNAWRPQVNNPKEWLQVDFQKTMKVTGVTTQGVKSLLTSMYVKEFLISSSQDGHQWTLFFQNGKVKVFQGNQDSFTPVVNSLDPPLLTRYLRIHPQSWVHQIALRMEVLGCEAQDLYGAPPGASPGTSSTGSPGASPGTSSTGSPGTPGSGTASSSPGSSTPSGATGSPGTPGSGTASSSPGSSTPSGATGSPGTPGSGTASSSPGSSTPSGATGSPGSSTPSGATGSPGSSPSASTGTGPGSSPSASTGTGPGASPGTSSTGSPGTPGSGTASSSPGSSTPSGATGSPGSSPSASTGTGPGSSPSASTGTGPGASPGTSSTGSPGASPGTSSTGSPGSSTPSGATGSPGSSPSASTGTGPGASPGTSSTGSPGSSPSASTGTGPGTPGSGTASSSPGSSTPSGATGSASSEQKLISEEDLSPATGHHHHHH

SEQ ID NO: 840 - DNA, 6144 bp, synthetic construct
  misc_feature 1..6144: note = Description of Artificial Sequence: Synthetic polynucleotide
  source 1..6144: mol_type = other DNA
gccaccagaagatactacctgggtgcagtggaactgtcatgggactatatgcaaagtgatctcggtgagctgcctgtggacgcaagatttcctcctagagtgccaaaatcttttccattcaacacctcagtcgtgtacaaaaagactctgtttgtagaattcacggatcaccttttcaacatcgctaagccaaggccaccctggatgggtctgctaggtcctaccatccaggctgaggtttatgatacagtggtcattacacttaagaacatggcttcccatcctgtcagtcttcatgctgttggtgtatcctactggaaagcttctgagggagctgaatatgatgatcagaccagtcaaagggagaaagaagatgataaagtcttccctggtggaagccatacatatgtctggcaggtcctgaaagagaatggtccaatggcctctgacccactgtgccttacctactcatatctttctcatgtggacctggtaaaagacttgaattcaggcctcattggagccctactagtatgtagagaagggagtctggccaaggaaaagacacagaccttgcacaaatttatactactttttgctgtatttgatgaagggaaaagttggcactcagaaacaaagaactccttgatgcaggatagggatgctgcatctgctcgggcctggcctaaaatgcacacagtcaatggttatgtaaacaggtctctgccaggtctgattggatgccacaggaaatcagtctattggcatgtgattggaatgggcaccactcctgaagtgcactcaatattcctcgaaggtcacacatttcttgtgaggaaccatcgccaggctagcttggaaatctcgccaataactttccttactgctcaaacactcttgatggaccttggacagtttctactgttttgtcatatctcttcccaccaacatgatggcatggaagcttatgtcaaagtagacagctgtccagaggaaccccaactacgaatgaaaaataatgaagaagcggaagactatgatgatgatcttactgattctgaaatggatgtggtcaggtttgatgatgacaactctccttcctttatccaaattcgctcagttgccaagaagcatcctaaaacttgggtacattacattgctgctgaagaggaggactgggactatgctcccttagtcctcgcccccgatgacagaagttataaaagtcaatatttgaacaatggccctcagcggattggtaggaagtacaaaaaagtccgatttatggcatacacagatgaaacctttaagactcgtgaagctattcagcatgaatcaggaatcttgggacctttactttatggggaagttggagacacactgttgattatatttaagaatcaagcaagcagaccatataacatctaccctcacggaatcactgatgtccgtcctttgtattcaaggagattaccaaaaggtgtaaaacatttgaaggattttccaattctgccaggagaaatattcaaatataaatggacagtgactgtagaagatgggccaactaaatcagatcctcggtgcctgacccgctattactctagtttcgttaatatggagagagatctagcttcaggactcattggccctctcctcatctgctacaaagaatctgtagatcaaagaggaaaccagataatgtcagacaagaggaatgtcatcctgttttctgtatttgatgagaaccgaagctggtacctcacagagaatatacaacgctttctccccaatccagctggagtgcagcttgaggatccagagttccaagcctccaacatcatgcacagcatcaatggctatgtttttgatagtttgcagttgtcagtttgtttgcatgaggtggcatactggtacattctaagcattggagcacagactgacttcctttctgtcttcttctctggatataccttcaaacacaaaatggtctatgaagacacactcaccctattcccattctcaggagaaactgtcttcatgtcgatggaaaacccaggtctatggattctggggtgccacaactcagactttcggaacagaggcatgaccgccttactgaaggtttctagttgtgacaagaacactggtgattattacgaggacagttatgaagatatttcagcatacttgctgagtaaaaacaatgccattgaaccaagaagcttctctcaaaacggcgcgccaggtacctcagagtctgctacccccgagtcagggccaggatcagagccagccacctccgggtctgagacacccgggacttccgagagtgccacccctgagtccggacccgggtccgagcccgccacttccggctccgaaactcccggcacaagcgagagcgctaccccagagtcaggaccaggaacatctacagagccctctgaaggctccgctccagggtccccagccggcagtcccactagcaccgaggagggaacctctgaaagcgccacacccgaatcagggccagggtctgagcctgctaccagcggcagcgagacaccaggcacctctgagtccgccacaccagagtccggacccggatctcccgctgggagccccacctccactgaggagggatctcctgctggctctccaacatctactgaggaaggtacctcaaccgagccatccgagggatcagctcccggcacctcagagtcggcaaccccggagtctggacccggaacttccgaaagtgccacaccagagtccggtcccgggacttcagaatcagcaacacccgagtccggccctgggtctgaacccgccacaagtggtagtgagacaccaggatcagaacctgctacctcagggtcagagacacccggatctccggcaggctcaccaacctccactgaggagggcaccagcacagaaccaagcgagggctccgcacccggaacaagcactgaacccagtgagggttcagcacccggctctgagccggccacaagtggcagtgagacacccggcacttcagagagtgccacccccgagagtggcccaggcactagtaccgagccctctgaaggcagtgcgccagcctcgagcccaccagtcttgaaacgccatcaacgggaaataactcgtactactcttcagtcagatcaagaggaaatcgattatgatgataccatatcagttgaaatgaagaaggaagattttgacatttatgatgaggatgaaaatcagagcccccgcagctttcaaaagaaaacacgacactattttattgctgcagtggagaggctctgggattatgggatgagtagctccccacatgttctaagaaacagggctcagagtggcagtgtccctcagttcaagaaagttgttttccaggaatttactgatggctcctttactcagcccttataccgtggagaactaaatgaacatttgggactcctggggccatatataagagcagaagttgaagataatatcatggtaactttcagaaatcaggcctctcgtccctattccttctattctagccttatttcttatgaggaagatcagaggcaaggagcagaacctagaaaaaactttgtcaagcctaatgaaaccaaaacttacttttggaaagtgcaacatcatatggcacccactaaagatgagtttgactgcaaagcctgggcttatttctctgatgttgacctggaaaaagatgtgcactcaggcctgattggaccccttctggtctgccacactaacacactgaaccctgctcatgggagacaagtgacagtacaggaatttgctctgtttttcaccatctttgatgagaccaaaagctggtacttcactgaaaatatggaaagaaactgcagggctccctgcaatatccagatggaagatcccacttttaaagagaattatcgcttccatgcaatcaatggctacataatggatacactacctggcttagtaatggctcaggatcaaaggattcgatggtatctgctcagcatgggcagcaatgaaaacatccattctattcatttcagtggacatgtgttcactgtacgaaaaaaagaggagtataaaatggcactgtacaatctctatccaggtgtttttgagacagtggaaatgttaccatccaaagctggaatttggcgggtggaatgccttattggcgagcatctacatgctgggatgagcacactttttctggtgtacagcaataagtgtcagactcccctgggaatggcttctggacacattagagattttcagattacagcttcaggacaatatggacagtgggccccaaagctggccagacttcattattccggatcaatcaatgcctggagcaccaaggagcccttttcttggatcaaggtggatctgttggcaccaatgattattcacggcatcaagacccagggtgcccgtcagaagttctccagcctctacatctctcagtttatcatcatgtatagtcttgatgggaagaagtggcagacttatcgaggaaattccactggaaccttaatggtcttctttggcaatgtggattcatctgggataaaacacaatatttttaaccctccaattattgctcgatacatccgtttgcacccaactcattatagcattcgcagcactcttcgcatggagttgatgggctgtgatttaaatagttgcagcatgccattgggaatggagagtaaagcaatatcagatgcacagattactgcttcatcctactttaccaatatgtttgccacctggtctccttcaaaagctcgacttcacctccaagggaggagtaatgcctggagacctcaggtgaataatccaaaagagtggctgcaagtggacttccagaagacaatgaaagtcacaggagtaactactcagggagtaaaatctctgcttaccagcatgtatgtgaaggagttcctcatctccagcagtcaagatggccatcagtggactctcttttttcagaatggcaaagtaaaggtttttcagggaaatcaagactccttcacacctgtggtgaactctctagacccaccgttactgactcgctaccttcgaattcacccccagagttgggtgcaccagattgccctgaggatggaggttctgggctgcgaggcacaggacctctacggcgcgccaccgggagcgtcacccggtacgtcctcaacggggagccctggggcatcacccggcacgtcctcgacagggtcccccggaacaccgggttcggggactgcgtcgtcgtcacccggttcgtcaacacccagcggtgcgacgggttccccgggaacccccggatcaggaacagcgtcgtcgagccccggaagctcgaccccgtcaggagcgaccgggtcgccaggaacgcctgggtcgggtactgcctcatcgtcgccgggttcatcgacgccctccggagcaacaggttcacccgggtcgtccacccccagcggagcgactggatcaccgggatcgagcccgtcggcatcgacaggaacaggtcccggtagctccccatcggcctccacggggacggggcctggtgcgtcaccggggacaagcagcacgggttcgccgggaacgccagggtcagggaccgcgtcgtcgagcccagggtcgtccaccccaagcggggctactgggtccccgggtagctcgccgagcgcatcaacgggaaccggaccgggcagctccccctcagcgtcgacagggacaggccctggcgcgagcccgggaacatcgtcgacggggtcacccggagcatcgccagggacctcgtcaactggctcgcctggatcgtcaacgccctcgggagccacggggtcgcccggatcatccccgtccgcctcaactggcacaggccctggtgcttcccctggaacgtccagcacaggctcccccggttccagcccttccgcttcgactgggactggacccggaaccccgggatcggggacagcgtcaagctcgcccggaagctccacgccttcgggggcaaccgggtcagcctcgagcgaacaaaaactcatctcagaagaggatctgtcacctgcaaccggtcatcatcaccatcaccattga

SEQ ID NO: 841 - protein, 1903 aa, synthetic construct
  REGION 1..1903: note = Description of Artificial Sequence: Synthetic polypeptide
ATRRYYLGAVELSWDYMQSDLGELPVDARFPPRVPKSFPFNTSVVYKKTLFVEFTDHLFNIAKPRPPWMGLLGPTIQAEVYDTVVITLKNMASHPVSLHAVGVSYWKASEGAEYDDQTSQREKEDDKVFPGGSHTYVWQVLKENGPMASDPLCLTYSYLSHVDLVKDLNSGLIGALLVCREGSLAKEKTQTLHKFILLFAVFDEGKSWHSETKNSLMQDRDAASARAWPKMHTVNGYVNRSLPGLIGCHRKSVYWHVIGMGTTPEVHSIFLEGHTFLVRNHRQASLEISPITFLTAQTLLMDLGQFLLFCHISSHQHDGMEAYVKVDSCPEEPQLRMKNNEEAEDYDDDLTDSEMDVVRFDDDNSPSFIQIRSVAKKHPKTWVHYIAAEEEDWDYAPLVLAPDDRSYKSQYLNNGPQRIGRKYKKVRFMAYTDETFKTREAIQHESGILGPLLYGEVGDTLLIIFKNQASRPYNIYPHGITDVRPLYSRRLPKGVKHLKDFPILPGEIFKYKWTVTVEDGPTKSDPRCLTRYYSSFVNMERDLASGLIGPLLICYKESVDQRGNQIMSDKRNVILFSVFDENRSWYLTENIQRFLPNPAGVQLEDPEFQASNIMHSINGYVFDSLQLSVCLHEVAYWYILSIGAQTDFLSVFFSGYTFKHKMVYEDTLTLFPFSGETVFMSMENPGLWILGCHNSDFRNRGMTALLKVSSCDKNTGDYYEDSYEDISAYLLSKNNAIEPRSFSQNGAPGTPGSGTASSSPGSSTPSGATGSPGASPGTSSTGSPGTPGSGTASSSPGSSTPSGATGSPGSSPSASTGTGPGSSPSASTGTGPGSSTPSGATGSPGSSTPSGATGSPGASPGTSSTGSPGASPGTSSTGSPGASPGTSSTGSPASSPPVLKRHQREITRTTLQSDQEEIDYDDTISVEMKKEDFDIYDEDENQSPRSFQKKTRHYFIAAVERLWDYGMSSSPHVLRNRAQSGSVPQFKKVVFQEFTDGSFTQPLYRGELNEHLGLLGPYIRAEVEDNIMVTFRNQASRPYSFYSSLISYEEDQRQGAEPRKNFVKPNETKTYFWKVQHHMAPTKDEFDCKAWAYFSDVDLEKDVHSGLIGPLLVCHTNTLNPAHGRQVTVQEFALFFTIFDETKSWYFTENMERNCRAPCNIQMEDPTFKENYRFHAINGYIMDTLPGLVMAQDQRIRWYLLSMGSNENIHSIHFSGHVFTVRKKEEYKMALYNLYPGVFETVEMLPSKAGIWRVECLIGEHLHAGMSTLFLVYSNKCQTPLGMASGHIRDFQITASGQYGQWAPKLARLHYSGSINAWSTKEPFSWIKVDLLAPMIIHGIKTQGARQKFSSLYISQFIIMYSLDGKKWQTYRGNSTGTLMVFFGNVDSSGIKHNIFNPPIIARYIRLHPTHYSIRSTLRMELMGCDLNSCSMPLGMESKAISDAQITASSYFTNMFATWSPSKARLHLQGRSNAWRPQVNNPKEWLQVDFQKTMKVTGVTTQGVKSLLTSMYVKEFLISSSQDGHQWTLFFQNGKVKVFQGNQDSFTPVVNSLDPPLLTRYLRIHPQSWVHQIALRMEVLGCEAQDLYGAPPGASPGTSSTGSPGASPGTSSTGSPGTPGSGTASSSPGSSTPSGATGSPGTPGSGTASSSPGSSTPSGATGSPGTPGSGTASSSPGSSTPSGATGSPGSSTPSGATGSPGSSPSASTGTGPGSSPSASTGTGPGASPGTSSTGSPGTPGSGTASSSPGSSTPSGATGSPGSSPSASTGTGPGSSPSASTGTGPGASPGTSSTGSPGASPGTSSTGSPGSSTPSGATGSPGSSPSASTGTGPGASPGTSSTGSPGSSPSASTGTGPGTPGSGTASSSPGSSTPSGATGSASSEQKLISEEDLSPATGHHHHHH

SEQ ID NO: 842 - DNA, 5712 bp, synthetic construct
  misc_feature 1..5712: note = Description of Artificial Sequence: Synthetic polynucleotide
  source 1..5712: mol_type = other DNA
gccaccagaagatactacctgggtgcagtggaactgtcatgggactatatgcaaagtgatctcggtgagctgcctgtggacgcaagatttcctcctagagtgccaaaatcttttccattcaacacctcagtcgtgtacaaaaagactctgtttgtagaattcacggatcaccttttcaacatcgctaagccaaggccaccctggatgggtctgctaggtcctaccatccaggctgaggtttatgatacagtggtcattacacttaagaacatggcttcccatcctgtcagtcttcatgctgttggtgtatcctactggaaagcttctgagggagctgaatatgatgatcagaccagtcaaagggagaaagaagatgataaagtcttccctggtggaagccatacatatgtctggcaggtcctgaaagagaatggtccaatggcctctgacccactgtgccttacctactcatatctttctcatgtggacctggtaaaagacttgaattcaggcctcattggagccctactagtatgtagagaagggagtctggccaaggaaaagacacagaccttgcacaaatttatactactttttgctgtatttgatgaagggaaaagttggcactcagaaacaaagaactccttgatgcaggatagggatgctgcatctgctcgggcctggcctaaaatgcacacagtcaatggttatgtaaacaggtctctgccaggtctgattggatgccacaggaaatcagtctattggcatgtgattggaatgggcaccactcctgaagtgcactcaatattcctcgaaggtcacacatttcttgtgaggaaccatcgccaggctagcttggaaatctcgccaataactttccttactgctcaaacactcttgatggaccttggacagtttctactgttttgtcatatctcttcccaccaacatgatggcatggaagcttatgtcaaagtagacagctgtccagaggaaccccaactacgaatgaaaaataatgaagaagcggaagactatgatgatgatcttactgattctgaaatggatgtggtcaggtttgatgatgacaactctccttcctttatccaaattcgctcagttgccaagaagcatcctaaaacttgggtacattacattgctgctgaagaggaggactgggactatgctcccttagtcctcgcccccgatgacagaagttataaaagtcaatatttgaacaatggccctcagcggattggtaggaagtacaaaaaagtccgatttatggcatacacagatgaaacctttaagactcgtgaagctattcagcatgaatcaggaatcttgggacctttactttatggggaagttggagacacactgttgattatatttaagaatcaagcaagcagaccatataacatctaccctcacggaatcactgatgtccgtcctttgtattcaaggagattaccaaaaggtgtaaaacatttgaaggattttccaattctgccaggagaaatattcaaatataaatggacagtgactgtagaagatgggccaactaaatcagatcctcggtgcctgacccgctattactctagtttcgttaatatggagagagatctagcttcaggactcattggccctctcctcatctgctacaaagaatctgtagatcaaagaggaaaccagataatgtcagacaagaggaatgtcatcctgttttctgtatttgatgagaaccgaagctggtacctcacagagaatatacaacgctttctccccaatccagctggagtgcagcttgaggatccagagttccaagcctccaacatcatgcacagcatcaatggctatgtttttgatagtttgcagttgtcagtttgtttgcatgaggtggcatactggtacattctaagcattggagcacagactgacttcctttctgtcttcttctctggatataccttcaaacacaaaatggtctatgaagacacactcaccctattcccattctcaggagaaactgtcttcatgtcgatggaaaacccaggtctatggattctggggtgccacaactcagactttcggaacagaggcatgaccgccttactgaaggtttctagttgtgacaagaacactggtgattattacgaggacagttatgaagatatttcagcatacttgctgagtaaaaacaatgccattgaaccaagaagcttctctcaaaacggcgcgccaggtacaccgggcagcggcacggcttcgtcgtcacccggctcgtccacaccgtcgggagctacgggaagcccaggagcgtcaccgggaacgtcgtcaacggggtcaccgggtacgccaggtagcggcacggccagcagctcgccaggttcatcgaccccgtcgggagcgactgggtcgcccggatcaagcccgtcagcttccactggaacaggacccgggtcgtcgccgtcagcctcaacggggacaggacctggttcatcgacgccgtcaggggcgacaggctcgcccggatcgtcaacaccctcgggggcaacggggagccctggtgcgtcgcctggaacctcatccaccggaagcccgggggcctcgccgggtacgagctccacgggatcgcccggagcgtcccccggaacttcaagcacagggagccctgcctcgagcccaccagtcttgaaacgccatcaacgggaaataactcgtactactcttcagtcagatcaagaggaaatcgattatgatgataccatatcagttgaaatgaagaaggaagattttgacatttatgatgaggatgaaaatcagagcccccgcagctttcaaaagaaaacacgacactattttattgctgcagtggagaggctctgggattatgggatgagtagctccccacatgttctaagaaacagggctcagagtggcagtgtccctcagttcaagaaagttgttttccaggaatttactgatggctcctttactcagcccttataccgtggagaactaaatgaacatttgggactcctggggccatatataagagcagaagttgaagataatatcatggtaactttcagaaatcaggcctctcgtccctattccttctattctagccttatttcttatgaggaagatcagaggcaaggagcagaacctagaaaaaactttgtcaagcctaatgaaaccaaaacttacttttggaaagtgcaacatcatatggcacccactaaagatgagtttgactgcaaagcctgggcttatttctctgatgttgacctggaaaaagatgtgcactcaggcctgattggaccccttctggtctgccacactaacacactgaaccctgctcatgggagacaagtgacagtacaggaatttgctctgtttttcaccatctttgatgagaccaaaagctggtacttcactgaaaatatggaaagaaactgcagggctccctgcaatatccagatggaagatcccacttttaaagagaattatcgcttccatgcaatcaatggctacataatggatacactacctggcttagtaatggctcaggatcaaaggattcgatggtatctgctcagcatgggcagcaatgaaaacatccattctattcatttcagtggacatgtgttcactgtacgaaaaaaagaggagtataaaatggcactgtacaatctctatccaggtgtttttgagacagtggaaatgttaccatccaaagctggaatttggcgggtggaatgccttattggcgagcatctacatgctgggatgagcacactttttctggtgtacagcaataagtgtcagactcccctgggaatggcttctggacacattagagattttcagattacagcttcaggacaatatggacagtgggccccaaagctggccagacttcattattccggatcaatcaatgcctggagcaccaaggagcccttttcttggatcaaggtggatctgttggcaccaatgattattcacggcatcaagacccagggtgcccgtcagaagttctccagcctctacatctctcagtttatcatcatgtatagtcttgatgggaagaagtggcagacttatcgaggaaattccactggaaccttaatggtcttctttggcaatgtggattcatctgggataaaacacaatatttttaaccctccaattattgctcgatacatccgtttgcacccaactcattatagcattcgcagcactcttcgcatggagttgatgggctgtgatttaaatagttgcagcatgccattgggaatggagagtaaagcaatatcagatgcacagattactgcttcatcctactttaccaatatgtttgccacctggtctccttcaaaagctcgacttcacctccaagggaggagtaatgcctggagacctcaggtgaataatccaaaagagtggctgcaagtggacttccagaagacaatgaaagtcacaggagtaactactcagggagtaaaatctctgcttaccagcatgtatgtgaaggagttcctcatctccagcagtcaagatggccatcagtggactctcttttttcagaatggcaaagtaaaggtttttcagggaaatcaagactccttcacacctgtggtgaactctctagacccaccgttactgactcgctaccttcgaattcacccccagagttgggtgcaccagattgccctgaggatggaggttctgggctgcgaggcacaggacctctacggcgcgccaccgggagcgtcacccggtacgtcctcaacggggagccctggggcatcacccggcacgtcctcgacagggtcccccggaacaccgggttcggggactgcgtcgtcgtcacccggttcgtcaacacccagcggtgcgacgggttccccgggaacccccggatcaggaacagcgtcgtcgagccccggaagctcgaccccgtcaggagcgaccgggtcgccaggaacgcctgggtcgggtactgcctcatcgtcgccgggttcatcgacgccctccggagcaacaggttcacccgggtcgtccacccccagcggagcgactggatcaccgggatcgagcccgtcggcatcgacaggaacaggtcccggtagctccccatcggcctccacggggacggggcctggtgcgtcaccggggacaagcagcacgggttcgccgggaacgccagggtcagggaccgcgtcgtcgagcccagggtcgtccaccccaagcggggctactgggtccccgggtagctcgccgagcgcatcaacgggaaccggaccgggcagctccccctcagcgtcgacagggacaggccctggcgcgagcccgggaacatcgtcgacggggtcacccggagcatcgccagggacctcgtcaactggctcgcctggatcgtcaacgccctcgggagccacggggtcgcccggatcatccccgtccgcctcaactggcacaggccctggtgcttcccctggaacgtccagcacaggctcccccggttccagcccttccgcttcgactgggactggacccggaaccccgggatcggggacagcgtcaagctcgcccggaagctccacgccttcgggggcaaccgggtcagcctcgagcgaacaaaaactcatctcagaagaggatctgtcacctgcaaccggtcatcatcaccatcaccattga

SEQ ID NO: 843 - protein, 2047 aa, synthetic construct
  REGION 1..2047: note = Description of Artificial Sequence: Synthetic polypeptide
ATRRYYLGAVELSWDYMQSDLGELPVDARFPPRVPKSFPFNTSVVYKKTLFVEFTDHLFNIAKPRPPWMGLLGPTIQAEVYDTVVITLKNMASHPVSLHAVGVSYWKASEGAEYDDQTSQREKEDDKVFPGGSHTYVWQVLKENGPMASDPLCLTYSYLSHVDLVKDLNSGLIGALLVCREGSLAKEKTQTLHKFILLFAVFDEGKSWHSETKNSLMQDRDAASARAWPKMHTVNGYVNRSLPGLIGCHRKSVYWHVIGMGTTPEVHSIFLEGHTFLVRNHRQASLEISPITFLTAQTLLMDLGQFLLFCHISSHQHDGMEAYVKVDSCPEEPQLRMKNNEEAEDYDDDLTDSEMDVVRFDDDNSPSFIQIRSVAKKHPKTWVHYIAAEEEDWDYAPLVLAPDDRSYKSQYLNNGPQRIGRKYKKVRFMAYTDETFKTREAIQHESGILGPLLYGEVGDTLLIIFKNQASRPYNIYPHGITDVRPLYSRRLPKGVKHLKDFPILPGEIFKYKWTVTVEDGPTKSDPRCLTRYYSSFVNMERDLASGLIGPLLICYKESVDQRGNQIMSDKRNVILFSVFDENRSWYLTENIQRFLPNPAGVQLEDPEFQASNIMHSINGYVFDSLQLSVCLHEVAYWYILSIGAQTDFLSVFFSGYTFKHKMVYEDTLTLFPFSGETVFMSMENPGLWILGCHNSDFRNRGMTALLKVSSCDKNTGDYYEDSYEDISAYLLSKNNAIEPRSFSQNGAPPGASPGTSSTGSPGASPGTSSTGSPGTPGSGTASSSPGSSTPSGATGSPGTPGSGTASSSPGSSTPSGATGSPGTPGSGTASSSPGSSTPSGATGSPGSSTPSGATGSPGSSPSASTGTGPGSSPSASTGTGPGASPGTSSTGSPGTPGSGTASSSPGSSTPSGATGSPGSSPSASTGTGPGSSPSASTGTGPGASPGTSSTGSPGASPGTSSTGSPGSSTPSGATGSPGSSPSASTGTGPGASPGTSSTGSPGSSPSASTGTGPGTPGSGTASSSPGSSTPSGATGSASSPPVLKRHQAEITRTTLQSDQEEIDYDDTISVEMKKEDFDIYDEDENQSPRSFQKKTRHYFIAAVERLWDYGMSSSPHVLRNRAQSGSVPQFKKVVFQEFTDGSFTQPLYRGELNEHLGLLGPYIRAEVEDNIMVTFRNQASRPYSFYSSLISYEEDQRQGAEPRKNFVKPNETKTYFWKVQHHMAPTKDEFDCKAWAYFSDVDLEKDVHSGLIGPLLVCHTNTLNPAHGRQVTVQEFALFFTIFDETKSWYFTENMERNCRAPCNIQMEDPTFKENYRFHAINGYIMDTLPGLVMAQDQRIRWYLLSMGSNENIHSIHFSGHVFTVRKKEEYKMALYNLYPGVFETVEMLPSKAGIWRVECLIGEHLHAGMSTLFLVYSNKCQTPLGMASGHIRDFQITASGQYGQWAPKLARLHYSGSINAWSTKEPFSWIKVDLLAPMIIHGIKTQGARQKFSSLYISQFIIMYSLDGKKWQTYRGNSTGTLMVFFGNVDSSGIKHNIFNPPIIARYIRLHPTHYSIRSTLRMELMGCDLNSCSMPLGMESKAISDAQITASSYFTNMFATWSPSKARLHLQGRSNAWRPQVNNPKEWLQVDFQKTMKVTGVTTQGVKSLLTSMYVKEFLISSSQDGHQWTLFFQNGKVKVFQGNQDSFTPVVNSLDPPLLTRYLRIHPQSWVHQIALRMEVLGCEAQDLYGAPPGASPGTSSTGSPGASPGTSSTGSPGTPGSGTASSSPGSSTPSGATGSPGTPGSGTASSSPGSSTPSGATGSPGTPGSGTASSSPGSSTPSGATGSPGSSTPSGATGSPGSSPSASTGTGPGSSPSASTGTGPGASPGTSSTGSPGTPGSGTASSSPGSSTPSGATGSPGSSPSASTGTGPGSSPSASTGTGPGASPGTSSTGSPGASPGTSSTGSPGSSTPSGATGSPGSSPSASTGTGPGASPGTSSTGSPGSSPSASTGTGPGTPGSGTASSSPGSSTPSGATGSASSEQKLISEEDLSPATGHHHHHH

SEQ ID NO: 844 - DNA, 6144 bp, synthetic construct
  misc_feature 1..6144: note = Description of Artificial Sequence: Synthetic polynucleotide
  source 1..6144: mol_type = other DNA
gccaccagaagatactacctgggtgcagtggaactgtcatgggactatatgcaaagtgatctcggtgagctgcctgtggacgcaagatttcctcctagagtgccaaaatcttttccattcaacacctcagtcgtgtacaaaaagactctgtttgtagaattcacggatcaccttttcaacatcgctaagccaaggccaccctggatgggtctgctaggtcctaccatccaggctgaggtttatgatacagtggtcattacacttaagaacatggcttcccatcctgtcagtcttcatgctgttggtgtatcctactggaaagcttctgagggagctgaatatgatgatcagaccagtcaaagggagaaagaagatgataaagtcttccctggtggaagccatacatatgtctggcaggtcctgaaagagaatggtccaatggcctctgacccactgtgccttacctactcatatctttctcatgtggacctggtaaaagacttgaattcaggcctcattggagccctactagtatgtagagaagggagtctggccaaggaaaagacacagaccttgcacaaatttatactactttttgctgtatttgatgaagggaaaagttggcactcagaaacaaagaactccttgatgcaggatagggatgctgcatctgctcgggcctggcctaaaatgcacacagtcaatggttatgtaaacaggtctctgccaggtctgattggatgccacaggaaatcagtctattggcatgtgattggaatgggcaccactcctgaagtgcactcaatattcctcgaaggtcacacatttcttgtgaggaaccatcgccaggctagcttggaaatctcgccaataactttccttactgctcaaacactcttgatggaccttggacagtttctactgttttgtcatatctcttcccaccaacatgatggcatggaagcttatgtcaaagtagacagctgtccagaggaaccccaactacgaatgaaaaataatgaagaagcggaagactatgatgatgatcttactgattctgaaatggatgtggtcaggtttgatgatgacaactctccttcctttatccaaattcgctcagttgccaagaagcatcctaaaacttgggtacattacattgctgctgaagaggaggactgggactatgctcccttagtcctcgcccccgatgacagaagttataaaagtcaatatttgaacaatggccctcagcggattggtaggaagtacaaaaaagtccgatttatggcatacacagatgaaacctttaagactcgtgaagctattcagcatgaatcaggaatcttgggacctttactttatggggaagttggagacacactgttgattatatttaagaatcaagcaagcagaccatataacatctaccctcacggaatcactgatgtccgtcctttgtattcaaggagattaccaaaaggtgtaaaacatttgaaggattttccaattctgccaggagaaatattcaaatataaatggacagtgactgtagaagatgggccaactaaatcagatcctcggtgcctgacccgctattactctagtttcgttaatatggagagagatctagcttcaggactcattggccctctcctcatctgctacaaagaatctgtagatcaaagaggaaaccagataatgtcagacaagaggaatgtcatcctgttttctgtatttgatgagaaccgaagctggtacctcacagagaatatacaacgctttctccccaatccagctggagtgcagcttgaggatccagagttccaagcctccaacatcatgcacagcatcaatggctatgtttttgatagtttgcagttgtcagtttgtttgcatgaggtggcatactggtacattctaagcattggagcacagactgacttcctttctgtcttcttctctggatataccttcaaacacaaaatggtctatgaagacacactcaccctattcccattctcaggagaaactgtcttcatgtcgatggaaaacccaggtctatggattctggggtgccacaactcagactttcggaacagaggcatgaccgccttactgaaggtttctagttgtgacaagaacactggtgattattacgaggacagttatgaagatatttcagcatacttgctgagtaaaaacaatgccattgaaccaagaagcttctctcaaaacggcgcgccaccgggagcgtcacccggtacgtcctcaacggggagccctggggcatcacccggcacgtcctcgacagggtcccccggaacaccgggttcggggactgcgtcgtcgtcacccggttcgtcaacacccagcggtgcgacgggttccccgggaacccccggatcaggaacagcgtcgtcgagccccggaagctcgaccccgtcaggagcgaccgggtcgccaggaacgcctgggtcgggtactgcctcatcgtcgccgggttcatcgacgccctccggagcaacaggttcacccgggtcgtccacccccagcggagcgactggatcaccgggatcgagcccgtcggcatcgacaggaacaggtcccggtagctccccatcggcctccacggggacggggcctggtgcgtcaccggggacaagcagcacgggttcgccgggaacgccagggtcagggaccgcgtcgtcgagcccagggtcgtccaccccaagcggggctactgggtccccgggtagctcgccgagcgcatcaacgggaaccggaccgggcagctccccctcagcgtcgacagggacaggccctggcgcgagcccgggaacatcgtcgacggggtcacccggagcatcgccagggacctcgtcaactggctcgcctggatcgtcaacgccctcgggagccacggggtcgcccggatcatccccgtccgcctcaactggcacaggccctggtgcttcccctggaacgtccagcacaggctcccccggttccagcccttccgcttcgactgggactggacccggaaccccgggatcggggacagcgtcaagctcgcccggaagctccacgccttcgggggcaaccgggtcagcctcgagcccaccagtcttgaaacgccatcaagctgaaataactcgtactactcttcagtcagatcaagaggaaatcgattatgatgataccatatcagttgaaatgaagaaggaagattttgacatttatgatgaggatgaaaatcagagcccccgcagctttcaaaagaaaacacgacactattttattgctgcagtggagaggctctgggattatgggatgagtagctccccacatgttctaagaaacagggctcagagtggcagtgtccctcagttcaagaaagttgttttccaggaatttactgatggctcctttactcagcccttataccgtggagaactaaatgaacatttgggactcctggggccatatataagagcagaagttgaagataatatcatggtaactttcagaaatcaggcctctcgtccctattccttctattctagccttatttcttatgaggaagatcagaggcaaggagcagaacctagaaaaaactttgtcaagcctaatgaaaccaaaacttacttttggaaagtgcaacatcatatggcacccactaaagatgagtttgactgcaaagcctgggcttatttctctgatgttgacctggaaaaagatgtgcactcaggcctgattggaccccttctggtctgccacactaacacactgaaccctgctcatgggagacaagtgacagtacaggaatttgctctgtttttcaccatctttgatgagaccaaaagctggtacttcactgaaaatatggaaagaaactgcagggctccctgcaatatccagatggaagatcccacttttaaagagaattatcgcttccatgcaatcaatggctacataatggatacactacctggcttagtaatggctcaggatcaaaggattcgatggtatctgctcagcatgggcagcaatgaaaacatccattctattcatttcagtggacatgtgttcactgtacgaaaaaaagaggagtataaaatggcactgtacaatctctatccaggtgtttttgagacagtggaaatgttaccatccaaagctggaatttggcgggtggaatgccttattggcgagcatctacatgctgggatgagcacactttttctggtgtacagcaataagtgtcagactcccctgggaatggcttctggacacattagagattttcagattacagcttcaggacaatatggacagtgggccccaaagctggccagacttcattattccggatcaatcaatgcctggagcaccaaggagcccttttcttggatcaaggtggatctgttggcaccaatgattattcacggcatcaagacccagggtgcccgtcagaagttctccagcctctacatctctcagtttatcatcatgtatagtcttgatgggaagaagtggcagacttatcgaggaaattccactggaaccttaatggtcttctttggcaatgtggattcatctgggataaaacacaatatttttaaccctccaattattgctcgatacatccgtttgcacccaactcattatagcattcgcagcactcttcgcatggagttgatgggctgtgatttaaatagttgcagcatgccattgggaatggagagtaaagcaatatcagatgcacagattactgcttcatcctactttaccaatatgtttgccacctggtctccttcaaaagctcgacttcacctccaagggaggagtaatgcctggagacctcaggtgaataatccaaaagagtggctgcaagtggacttccagaagacaatgaaagtcacaggagtaactactcagggagtaaaatctctgcttaccagcatgtatgtgaaggagttcctcatctccagcagtcaagatggccatcagtggactctcttttttcagaatggcaaagtaaaggtttttcagggaaatcaagactccttcacacctgtggtgaactctctagacccaccgttactgactcgctaccttcgaattcacccccagagttgggtgcaccagattgccctgaggatggaggttctgggctgcgaggcacaggacctctacggcgcgccaccgggagcgtcacccggtacgtcctcaacggggagccctggggcatcacccggcacgtcctcgacagggtcccccggaacaccgggttcggggactgcgtcgtcgtcacccggttcgtcaacacccagcggtgcgacgggttccccgggaacccccggatcaggaacagcgtcgtcgagccccggaagctcgaccccgtcaggagcgaccgggtcgccaggaacgcctgggtcgggtactgcctcatcgtcgccgggttcatcgacgccctccggagcaacaggttcacccgggtcgtccacccccagcggagcgactggatcaccgggatcgagcccgtcggcatcgacaggaacaggtcccggtagctccccatcggcctccacggggacggggcctggtgcgtcaccggggacaagcagcacgggttcgccgggaacgccagggtcagggaccgcgtcgtcgagcccagggtcgtccaccccaagcggggctactgggtccccgggtagctcgccgagcgcatcaacgggaaccggaccgggcagctccccctcagcgtcgacagggacaggccctggcgcgagcccgggaacatcgtcgacggggtcacccggagcatcgccagggacctcgtcaactggctcgcctggatcgtcaacgccctcgggagccacggggtcgcccggatcatccccgtccgcctcaactggcacaggccctggtgcttcccctggaacgtccagcacaggctcccccggttccagcccttccgcttcgactgggactggacccggaaccccgggatcggggacagcgtcaagctcgcccggaagctccacgccttcgggggcaaccgggtcagcctcgagcgaacaaaaactcatctcagaagaggatctgtcacctgcaaccggtcatcatcaccatcaccattga

SEQ ID NO: 845 - protein, 2047 aa, synthetic construct
  REGION 1..2047: note = Description of Artificial Sequence: Synthetic polypeptide
ATRRYYLGAVELSWDYMQSDLGELPVDARFPPRVPKSFPFNTSVVYKKTLFVEFTDHLFNIAKPRPPWMGLLGPTIQAEVYDTVVITLKNMASHPVSLHAVGVSYWKASEGAEYDDQTSQREKEDDKVFPGGSHTYVWQVLKENGPMASDPLCLTYSYLSHVDLVKDLNSGLIGALLVCREGSLAKEKTQTLHKFILLFAVFDEGKSWHSETKNSLMQDRDAASARAWPKMHTVNGYVNRSLPGLIGCHRKSVYWHVIGMGTTPEVHSIFLEGHTFLVRNHRQASLEISPITFLTAQTLLMDLGQFLLFCHISSHQHDGMEAYVKVDSCPEEPQLRMKNNEEAEDYDDDLTDSEMDVVRFDDDNSPSFIQIRSVAKKHPKTWVHYIAAEEEDWDYAPLVLAPDDRSYKSQYLNNGPQRIGRKYKKVRFMAYTDETFKTREAIQHESGILGPLLYGEVGDTLLIIFKNQASRPYNIYPHGITDVRPLYSRRLPKGVKHLKDFPILPGEIFKYKWTVTVEDGPTKSDPRCLTRYYSSFVNMERDLASGLIGPLLICYKESVDQRGNQIMSDKRNVILFSVFDENRSWYLTENIQRFLPNPAGVQLEDPEFQASNIMHSINGYVFDSLQLSVCLHEVAYWYILSIGAQTDFLSVFFSGYTFKHKMVYEDTLTLFPFSGETVFMSMENPGLWILGCHNSDFRNRGMTALLKVSSCDKNTGDYYEDSYEDISAYLLSKNNAIEPRSFSQNGAPGTSESATPESGPGSEPATSGSETPGTSESATPESGPGSEPATSGSETPGTSESATPESGPGTSTEPSEGSAPGSPAGSPTSTEEGTSESATPESGPGSEPATSGSETPGTSESATPESGPGSPAGSPTSTEEGSPAGSPTSTEEGTSTEPSEGSAPGTSESATPESGPGTSESATPESGPGTSESATPESGPGSEPATSGSETPGSEPATSGSETPGSPAGSPTSTEEGTSTEPSEGSAPGTSTEPSEGSAPGSEPATSGSETPGTSESATPESGPGTSTEPSEGSAPASSPPVLKRHQAEITRTTLQSDQEEIDYDDTISVEMKKEDFDIYDEDENQSPRSFQKKTRHYFIAAVERLWDYGMSSSPHVLRNRAQSGSVPQFKKVVFQEFTDGSFTQPLYRGELNEHLGLLGPYIRAEVEDNIMVTFRNQASRPYSFYSSLISYEEDQRQGAEPRKNFVKPNETKTYFWKVQHHMAPTKDEFDCKAWAYFSDVDLEKDVHSGLIGPLLVCHTNTLNPAHGRQVTVQEFALFFTIFDETKSWYFTENMERNCRAPCNIQMEDPTFKENYRFHAINGYIMDTLPGLVMAQDQRIRWYLLSMGSNENIHSIHFSGHVFTVRKKEEYKMALYNLYPGVFETVEMLPSKAGIWRVECLIGEHLHAGMSTLFLVYSNKCQTPLGMASGHIRDFQITASGQYGQWAPKLARLHYSGSINAWSTKEPFSWIKVDLLAPMIIHGIKTQGARQKFSSLYISQFIIMYSLDGKKWQTYRGNSTGTLMVFFGNVDSSGIKHNIFNPPIIARYIRLHPTHYSIRSTLRMELMGCDLNSCSMPLGMESKAISDAQITASSYFTNMFATWSPSKARLHLQGRSNAWRPQVNNPKEWLQVDFQKTMKVTGVTTQGVKSLLTSMYVKEFLISSSQDGHQWTLFFQNGKVKVFQGNQDSFTPVVNSLDPPLLTRYLRIHPQSWVHQIALRMEVLGCEAQDLYGAPPGASPGTSSTGSPGASPGTSSTGSPGTPGSGTASSSPGSSTPSGATGSPGTPGSGTASSSPGSSTPSGATGSPGTPGSGTASSSPGSSTPSGATGSPGSSTPSGATGSPGSSPSASTGTGPGSSPSASTGTGPGASPGTSSTGSPGTPGSGTASSSPGSSTPSGATGSPGSSPSASTGTGPGSSPSASTGTGPGASPGTSSTGSPGASPGTSSTGSPGSSTPSGATGSPGSSPSASTGTGPGASPGTSSTGSPGSSPSASTGTGPGTPGSGTASSSPGSSTPSGATGSASSEQKLISEEDLSPATGHHHHHH

SEQ ID NO: 846 - DNA, 6144 bp, synthetic construct
  misc_feature 1..6144: note = Description of Artificial Sequence: Synthetic polynucleotide
  source 1..6144: mol_type = other DNA
gccaccagaagatactacctgggtgcagtggaactgtcatgggactatatgcaaagtgatctcggtgagctgcctgtggacgcaagatttcctcctagagtgccaaaatcttttccattcaacacctcagtcgtgtacaaaaagactctgtttgtagaattcacggatcaccttttcaacatcgctaagccaaggccaccctggatgggtctgctaggtcctaccatccaggctgaggtttatgatacagtggtcattacacttaagaacatggcttcccatcctgtcagtcttcatgctgttggtgtatcctactggaaagcttctgagggagctgaatatgatgatcagaccagtcaaagggagaaagaagatgataaagtcttccctggtggaagccatacatatgtctggcaggtcctgaaagagaatggtccaatggcctctgacccactgtgccttacctactcatatctttctcatgtggacctggtaaaagacttgaattcaggcctcattggagccctactagtatgtagagaagggagtctggccaaggaaaagacacagaccttgcacaaatttatactactttttgctgtatttgatgaagggaaaagttggcactcagaaacaaagaactccttgatgcaggatagggatgctgcatctgctcgggcctggcctaaaatgcacacagtcaatggttatgtaaacaggtctctgccaggtctgattggatgccacaggaaatcagtctattggcatgtgattggaatgggcaccactcctgaagtgcactcaatattcctcgaaggtcacacatttcttgtgaggaaccatcgccaggctagcttggaaatctcgccaataactttccttactgctcaaacactcttgatggaccttggacagtttctactgttttgtcatatctcttcccaccaacatgatggcatggaagcttatgtcaaagtagacagctgtccagaggaaccccaactacgaatgaaaaataatgaagaagcggaagactatgatgatgatcttactgattctgaaatggatgtggtcaggtttgatgatgacaactctccttcctttatccaaattcgctcagttgccaagaagcatcctaaaacttgggtacattacattgctgctgaagaggaggactgggactatgctcccttagtcctcgcccccgatgacagaagttataaaagtcaatatttgaacaatggccctcagcggattggtaggaagtacaaaaaagtccgatttatggcatacacagatgaaacctttaagactcgtgaagctattcagcatgaatcaggaatcttgggacctttactttatggggaagttggagacacactgttgattatatttaagaatcaagcaagcagaccatataacatctaccctcacggaatcactgatgtccgtcctttgtattcaaggagattaccaaaaggtgtaaaacatttgaaggattttccaattctgccaggagaaatattcaaatataaatggacagtgactgtagaagatgggccaactaaatcagatcctcggtgcctgacccgctattactctagtttcgttaatatggagagagatctagcttcaggactcattggccctctcctcatctgctacaaagaatctgtagatcaaagaggaaaccagataatgtcagacaagaggaatgtcatcctgttttctgtatttgatgagaaccgaagctggtacctcacagagaatatacaacgctttctccccaatccagctggagtgcagcttgaggatccagagttccaagcctccaacatcatgcacagcatcaatggctatgtttttgatagtttgcagttgtcagtttgtttgcatgaggtggcatactggtacattctaagcattggagcacagactgacttcctttctgtcttcttctctggatataccttcaaacacaaaatggtctatgaagacacactcaccctattcccattctcaggagaaactgtcttcatgtcgatggaaaacccaggtctatggattctggggtgccacaactcagactttcggaacagaggcatgaccgccttactgaaggtttctagttgtgacaagaacactggtgattattacgaggacagttatgaagatatttcagcatacttgctgagtaaaaacaatgccattgaaccaagaagcttctctcaaaacggcgcgccaggtacctcagagtctgctacccccgagtcagggccaggatcagagccagccacctccgggtctgagacacccgggacttccgagagtgccacccctgagtccggacccgggtccgagcccgccacttccggctccgaaactcccggcacaagcgagagcgctaccccagagtcaggaccaggaacatctacagagccctctgaaggctccgctccagggtccccagccggcagtcccactagcaccgaggagggaacctctgaaagcgccacacccgaatcagggccagggtctgagcctgctaccagcggcagcgagacaccaggcacctctgagtccgccacaccagagtccggacccggatctcccgctgggagccccacctccactgaggagggatctcctgctggctctccaacatctactgaggaaggtacctcaaccgagccatccgagggatcagctcccggcacctcagagtcggcaaccccggagtctggacccggaacttccgaaagtgccacaccagagtccggtcccgggacttcagaatcagcaacacccgagtccggccctgggtctgaacccgccacaagtggtagtgagacaccaggatcagaacctgctacctcagggtcagagacacccggatctccggcaggctcaccaacctccactgaggagggcaccagcacagaaccaagcgagggctccgcacccggaacaagcactgaacccagtgagggttcagcacccggctctgagccggccacaagtggcagtgagacacccggcacttcagagagtgccacccccgagagtggcccaggcactagtaccgagccctctgaaggcagtgcgccagcctcgagcccaccagtcttgaaacgccatcaagctgaaataactcgtactactcttcagtcagatcaagaggaaatcgattatgatgataccatatcagttgaaatgaagaaggaagattttgacatttatgatgaggatgaaaatcagagcccccgcagctttcaaaagaaaacacgacactattttattgctgcagtggagaggctctgggattatgggatgagtagctccccacatgttctaagaaacagggctcagagtggcagtgtccctcagttcaagaaagttgttttccaggaatttactgatggctcctttactcagcccttataccgtggagaactaaatgaacatttgggactcctggggccatatataagagcagaagttgaagataatatcatggtaactttcagaaatcaggcctctcgtccctattccttctattctagccttatttcttatgaggaagatcagaggcaaggagcagaacctagaaaaaactttgtcaagcctaatgaaaccaaaacttacttttggaaagtgcaacatcatatggcacccactaaagatgagtttgactgcaaagcctgggcttatttctctgatgttgacctggaaaaagatgtgcactcaggcctgattggaccccttctggtctgccacactaacacactgaaccctgctcatgggagacaagtgacagtacaggaatttgctctgtttttcaccatctttgatgagaccaaaagctggtacttcactgaaaatatggaaagaaactgcagggctccctgcaatatccagatggaagatcccacttttaaagagaattatcgcttccatgcaatcaatggctacataatggatacactacctggcttagtaatggctcaggatcaaaggattcgatggtatctgctcagcatgggcagcaatgaaaacatccattctattcatttcagtggacatgtgttcactgtacgaaaaaaagaggagtataaaatggcactgtacaatctctatccaggtgtttttgagacagtggaaatgttaccatccaaagctggaatttggcgggtggaatgccttattggcgagcatctacatgctgggatgagcacactttttctggtgtacagcaataagtgtcagactcccctgggaatggcttctggacacattagagattttcagattacagcttcaggacaatatggacagtgggccccaaagctggccagacttcattattccggatcaatcaatgcctggagcaccaaggagcccttttcttggatcaaggtggatctgttggcaccaatgattattcacggcatcaagacccagggtgcccgtcagaagttctccagcctctacatctctcagtttatcatcatgtatagtcttgatgggaagaagtggcagacttatcgaggaaattccactggaaccttaatggtcttctttggcaatgtggattcatctgggataaaacacaatatttttaaccctccaattattgctcgatacatccgtttgcacccaactcattatagcattcgcagcactcttcgcatggagttgatgggctgtgatttaaatagttgcagcatgccattgggaatggagagtaaagcaatatcagatgcacagattactgcttcatcctactttaccaatatgtttgccacctggtctccttcaaaagctcgacttcacctccaagggaggagtaatgcctggagacctcaggtgaataatccaaaagagtggctgcaagtggacttccagaagacaatgaaagtcacaggagtaactactcagggagtaaaatctctgcttaccagcatgtatgtgaaggagttcctcatctccagcagtcaagatggccatcagtggactctcttttttcagaatggcaaagtaaaggtttttcagggaaatcaagactccttcacacctgtggtgaactctctagacccaccgttactgactcgctaccttcgaattcacccccagagttgggtgcaccagattgccctgaggatggaggttctgggctgcgaggcacaggacctctacggcgcgccaccgggagcgtcacccggtacgtcctcaacggggagccctggggcatcacccggcacgtcctcgacagggtcccccggaacaccgggttcggggactgcgtcgtcgtcacccggttcgtcaacacccagcggtgcgacgggttccccgggaacccccggatcaggaacagcgtcgtcgagccccggaagctcgaccccgtcaggagcgaccgggtcgccaggaacgcctgggtcgggtactgcctcatcgtcgccgggttcatcgacgccctccggagcaacaggttcacccgggtcgtccacccccagcggagcgactggatcaccgggatcgagcccgtcggcatcgacaggaacaggtcccggtagctccccatcggcctccacggggacggggcctggtgcgtcaccggggacaagcagcacgggttcgccgggaacgccagggtcagggaccgcgtcgtcgagcccagggtcgtccaccccaagcggggctactgggtccccgggtagctcgccgagcgcatcaacgggaaccggaccgggcagctccccctcagcgtcgacagggacaggccctggcgcgagcccgggaacatcgtcgacggggtcacccggagcatcgccagggacctcgtcaactggctcgcctggatcgtcaacgccctcgggagccacggggtcgcccggatcatccccgtccgcctcaactggcacaggccctggtgcttcccctggaacgtccagcacaggctcccccggttccagcccttccgcttcgactgggactggacccggaaccccgggatcggggacagcgtcaagctcgcccggaagctccacgccttcgggggcaaccgggtcagcctcgagcgaacaaaaactcatctcagaagaggatctgtcacctgcaaccggtcatcatcaccatcaccattga

SEQ ID NO: 847 - protein, 2047 aa, synthetic construct
  REGION 1..2047: note = Description of Artificial Sequence: Synthetic polypeptide
ATRRYYLGAVELSWDYMQSDLGELPVDARFPPRVPKSFPFNTSVVYKKTLFVEFTDHLFNIAKPRPPWMGLLGPTIQAEVYDTVVITLKNMASHPVSLHAVGVSYWKASEGAEYDDQTSQREKEDDKVFPGGSHTYVWQVLKENGPMASDPLCLTYSYLSHVDLVKDLNSGLIGALLVCREGSLAKEKTQTLHKFILLFAVFDEGKSWHSETKNSLMQDRDAASARAWPKMHTVNGYVNRSLPGLIGCHRKSVYWHVIGMGTTPEVHSIFLEGHTFLVRNHRQASLEISPITFLTAQTLLMDLGQFLLFCHISSHQHDGMEAYVKVDSCPEEPQLRMKNNEEAEDYDDDLTDSEMDVVRFDDDNSPSFIQIRSVAKKHPKTWVHYIAAEEEDWDYAPLVLAPDDRSYKSQYLNNGPQRIGRKYKKVRFMAYTDETFKTREAIQHESGILGPLLYGEVGDTLLIIFKNQASRPYNIYPHGITDVRPLYSRRLPKGVKHLKDFPILPGEIFKYKWTVTVEDGPTKSDPRCLTRYYSSFVNMERDLASGLIGPLLICYKESVDQRGNQIMSDKRNVILFSVFDENRSWYLTENIQRFLPNPAGVQLEDPEFQASNIMHSINGYVFDSLQLSVCLHEVAYWYILSIGAQTDFLSVFFSGYTFKHKMVYEDTLTLFPFSGETVFMSMENPGLWILGCHNSDFRNRGMTALLKVSSCDKNTGDYYEDSYEDISAYLLSKNNAIEPRSFSQNGAPPGASPGTSSTGSPGASPGTSSTGSPGTPGSGTASSSPGSSTPSGATGSPGTPGSGTASSSPGSSTPSGATGSPGTPGSGTASSSPGSSTPSGATGSPGSSTPSGATGSPGSSPSASTGTGPGSSPSASTGTGPGASPGTSSTGSPGTPGSGTASSSPGSSTPSGATGSPGSSPSASTGTGPGSSPSASTGTGPGASPGTSSTGSPGASPGTSSTGSPGSSTPSGATGSPGSSPSASTGTGPGASPGTSSTGSPGSSPSASTGTGPGTPGSGTASSSPGSSTPSGATGSASSPPVLKRHQREITRTTLQSDQEEIDYDDTISVEMKKEDFDIYDEDENQSPRSFQKKTRHYFIAAVERLWDYGMSSSPHVLRNRAQSGSVPQFKKVVFQEFTDGSFTQPLYRGELNEHLGLLGPYIRAEVEDNIMVTFRNQASRPYSFYSSLISYEEDQRQGAEPRKNFVKPNETKTYFWKVQHHMAPTKDEFDCKAWAYFSDVDLEKDVHSGLIGPLLVCHTNTLNPAHGRQVTVQEFALFFTIFDETKSWYFTENMERNCRAPCNIQMEDPTFKENYRFHAINGYIMDTLPGLVMAQDQRIRWYLLSMGSNENIHSIHFSGHVFTVRKKEEYKMALYNLYPGVFETVEMLPSKAGIWRVECLIGEHLHAGMSTLFLVYSNKCQTPLGMASGHIRDFQITASGQYGQWAPKLARLHYSGSINAWSTKEPFSWIKVDLLAPMIIHGIKTQGARQKFSSLYISQFIIMYSLDGKKWQTYRGNSTGTLMVFFGNVDSSGIKHNIFNPPIIARYIRLHPTHYSIRSTLRMELMGCDLNSCSMPLGMESKAISDAQITASSYFTNMFATWSPSKARLHLQGRSNAWRPQVNNPKEWLQVDFQKTMKVTGVTTQGVKSLLTSMYVKEFLISSSQDGHQWTLFFQNGKVKVFQGNQDSFTPVVNSLDPPLLTRYLRIHPQSWVHQIALRMEVLGCEAQDLYGAPPGASPGTSSTGSPGASPGTSSTGSPGTPGSGTASSSPGSSTPSGATGSPGTPGSGTASSSPGSSTPSGATGSPGTPGSGTASSSPGSSTPSGATGSPGSSTPSGATGSPGSSPSASTGTGPGSSPSASTGTGPGASPGTSSTGSPGTPGSGTASSSPGSSTPSGATGSPGSSPSASTGTGPGSSPSASTGTGPGASPGTSSTGSPGASPGTSSTGSPGSSTPSGATGSPGSSPSASTGTGPGASPGTSSTGSPGSSPSASTGTGPGTPGSGTASSSPGSSTPSGATGSASSEQKLISEEDLSPATGHHHHHH

SEQ ID NO: 848 - DNA, 6144 bp, synthetic construct
  misc_feature 1..6144: note = Description of Artificial Sequence: Synthetic polynucleotide
  source 1..6144: mol_type = other DNA
gccaccagaagatactacctgggtgcagtggaactgtcatgggactatatgcaaagtgatctcggtgagctgcctgtggacgcaagatttcctcctagagtgccaaaatcttttccattcaacacctcagtcgtgtacaaaaagactctgtttgtagaattcacggatcaccttttcaacatcgctaagccaaggccaccctggatgggtctgctaggtcctaccatccaggctgaggtttatgatacagtggtcattacacttaagaacatggcttcccatcctgtcagtcttcatgctgttggtgtatcctactggaaagcttctgagggagctgaatatgatgatcagaccagtcaaagggagaaagaagatgataaagtcttccctggtggaagccatacatatgtctggcaggtcctgaaagagaatggtccaatggcctctgacccactgtgccttacctactcatatctttctcatgtggacctggtaaaagacttgaattcaggcctcattggagccctactagtatgtagagaagggagtctggccaaggaaaagacacagaccttgcacaaatttatactactttttgctgtatttgatgaagggaaaagttggcactcagaaacaaagaactccttgatgcaggatagggatgctgcatctgctcgggcctggcctaaaatgcacacagtcaatggttatgtaaacaggtctctgccaggtctgattggatgccacaggaaatcagtctattggcatgtgattggaatgggcaccactcctgaagtgcactcaatattcctcgaaggtcacacatttcttgtgaggaaccatcgccaggctagcttggaaatctcgccaataactttccttactgctcaaacactcttgatggaccttggacagtttctactgttttgtcatatctcttcccaccaacatgatggcatggaagcttatgtcaaagtagacagctgtccagaggaaccccaactacgaatgaaaaataatgaagaagcggaagactatgatgatgatcttactgattctgaaatggatgtggtcaggtttgatgatgacaactctccttcctttatccaaattcgctcagttgccaagaagcatcctaaaacttgggtacattacattgctgctgaagaggaggactgggactatgctcccttagtcctcgcccccgatgacagaagttataaaagtcaatatttgaacaatggccctcagcggattggtaggaagtacaaaaaagtccgatttatggcatacacagatgaaacctttaagactcgtgaagctattcagcatgaatcaggaatcttgggacctttactttatggggaagttggagacacactgttgattatatttaagaatcaagcaagcagaccatataacatctaccctcacggaatcactgatgtccgtcctttgtattcaaggagattaccaaaaggtgtaaaacatttgaaggattttccaattctgccaggagaaatattcaaatataaatggacagtgactgtagaagatgggccaactaaatcagatcctcggtgcctgacccgctattactctagtttcgttaatatggagagagatctagcttcaggactcattggccctctcctcatctgctacaaagaatctgtagatcaaagaggaaaccagataatgtcagacaagaggaatgtcatcctgttttctgtatttgatgagaaccgaagctggtacctcacagagaatatacaacgctttctccccaatccagctggagtgcagcttgaggatccagagttccaagcctccaacatcatgcacagcatcaatggctatgtttttgatagtttgcagttgtcagtttgtttgcatgaggtggcatactggtacattctaagcattggagcacagactgacttcctttctgtcttcttctctggatataccttcaaacacaaaatggtctatgaagacacactcaccctattcccattctcaggagaaactgtcttcatgtcgatggaaaacccaggtctatggattctggggtgccacaactcagactttcggaacagaggcatgaccgccttactgaaggtttctagttgtgacaagaacactggtgattattacgaggacagttatgaagatatttcagcatacttgctgagtaaaaacaatgccattgaaccaagaagcttctctcaaaacggcgcgccaccgggagcgtcacccggtacgtcctcaacggggagccctggggcatcacccggcacgtcctcgacagggtcccccggaacaccgggttcggggactgcgtcgtcgtcacccggttcgtcaacacccagcggtgcgacgggttccccgggaacccccggatcaggaacagcgtcgtcgagccccggaagctcgaccccgtcaggagcgaccgggtcgccaggaacgcctgggtcgggtactgcctcatcgtcgccgggttcatcgacgccctccggagcaacaggttcacccgggtcgtccacccccagcggagcgactggatcaccgggatcgagcccgtcggcatcgacaggaacaggtcccggtagctccccatcggcctccacggggacggggcctggtgcgtcaccggggacaagcagcacgggttcgccgggaacgccagggtcagggaccgcgtcgtcgagcccagggtcgtccaccccaagcggggctactgggtccccgggtagctcgccgagcgcatcaacgggaaccggaccgggcagctccccctcagcgtcgacagggacaggccctggcgcgagcccgggaacatcgtcgacggggtcacccggagcatcgccagggacctcgtcaactggctcgcctggatcgtcaacgccctcgggagccacggggtcgcccggatcatccccgtccgcctcaactggcacaggccctggtgcttcccctggaacgtccagcacaggctcccccggttccagcccttccgcttcgactgggactggacccggaaccccgggatcggggacagcgtcaagctcgcccggaagctccacgccttcgggggcaaccgggtcagcctcgagcccaccagtcttgaaacgccatcaacgggaaataactcgtactactcttcagtcagatcaagaggaaatcgattatgatgataccatatcagttgaaatgaagaaggaagattttgacatttatgatgaggatgaaaatcagagcccccgcagctttcaaaagaaaacacgacactattttattgctgcagtggagaggctctgggattatgggatgagtagctccccacatgttctaagaaacagggctcagagtggcagtgtccctcagttcaagaaagttgttttccaggaatttactgatggctcctttactcagcccttataccgtggagaactaaatgaacatttgggactcctggggccatatataagagcagaagttgaagataatatcatggtaactttcagaaatcaggcctctcgtccctattccttctattctagccttatttcttatgaggaagatcagaggcaaggagcagaacctagaaaaaactttgtcaagcctaatgaaaccaaaacttacttttggaaagtgcaacatcatatggcacccactaaagatgagtttgactgcaaagcctgggcttatttctctgatgttgacctggaaaaagatgtgcactcaggcctgattggaccccttctggtctgccacactaacacactgaaccctgctcatgggagacaagtgacagtacaggaatttgctctgtttttcaccatctttgatgagaccaaaagctggtacttcactgaaaatatggaaagaaactgcagggctccctgcaatatccagatggaagatcccacttttaaagagaattatcgcttccatgcaatcaatggctacataatggatacactacctggcttagtaatggctcaggatcaaaggattcgatggtatctgctcagcatgggcagcaatgaaaacatccattctattcatttcagtggacatgtgttcactgtacgaaaaaaagaggagtataaaatggcactgtacaatctctatccaggtgtttttgagacagtggaaatgttaccatccaaagctggaatttggcgggtggaatgccttattggcgagcatctacatgctgggatgagcacactttttctggtgtacagcaataagtgtcagactcccctgggaatggcttctggacacattagagattttcagattacagcttcaggacaatatggacagtgggccccaaagctggccagacttcattattccggatcaatcaatgcctggagcaccaaggagcccttttcttggatcaaggtggatctgttggcaccaatgattattcacggcatcaagacccagggtgcccgtcagaagttctccagcctctacatctctcagtttatcatcatgtatagtcttgatgggaagaagtggcagacttatcgaggaaattccactggaaccttaatggtcttctttggcaatgtggattcatctgggataaaacacaatatttttaaccctccaattattgctcgatacatccgtttgcacccaactcattatagcattcgcagcactcttcgcatggagttgatgggctgtgatttaaatagttgcagcatgccattgggaatggagagtaaagcaatatcagatgcacagattactgcttcatcctactttaccaatatgtttgccacctggtctccttcaaaagctcgacttcacctccaagggaggagtaatgcctggagacctcaggtgaataatccaaaagagtggctgcaagtggacttccagaagacaatgaaagtcacaggagtaactactcagggagtaaaatctctgcttaccagcatgtatgtgaaggagttcctcatctccagcagtcaagatggccatcagtggactctcttttttcagaatggcaaagtaaaggtttttcagggaaatcaagactccttcacacctgtggtgaactctctagacccaccgttactgactcgctaccttcgaattcacccccagagttgggtgcaccagattgccctgaggatggaggttctgggctgcgaggcacaggacctctacggcgcgccaccgggagcgtcacccggtacgtcctcaacggggagccctggggcatcacccggcacgtcctcgacagggtcccccggaacaccgggttcggggactgcgtcgtcgtcacccggttcgtcaacacccagcggtgcgacgggttccccgggaacccccggatcaggaacagcgtcgtcgagccccggaagctcgaccccgtcaggagcgaccgggtcgccaggaacgcctgggtcgggtactgcctcatcgtcgccgggttcatcgacgccctccggagcaacaggttcacccgggtcgtccacccccagcggagcgactggatcaccgggatcgagcccgtcggcatcgacaggaacaggtcccggtagctccccatcggcctccacggggacggggcctggtgcgtcaccggggacaagcagcacgggttcgccgggaacgccagggtcagggaccgcgtcgtcgagcccagggtcgtccaccccaagcggggctactgggtccccgggtagctcgccgagcgcatcaacgggaaccggaccgggcagctccccctcagcgtcgacagggacaggccctggcgcgagcccgggaacatcgtcgacggggtcacccggagcatcgccagggacctcgtcaactggctcgcctggatcgtcaacgccctcgggagccacggggtcgcccggatcatccccgtccgcctcaactggcacaggccctggtgcttcccctggaacgtccagcacaggctcccccggttccagcccttccgcttcgactgggactggacccggaaccccgggatcggggacagcgtcaagctcgcccggaagctccacgccttcgggggcaaccgggtcagcctcgagcgaacaaaaactcatctcagaagaggatctgtcacctgcaaccggtcatcatcaccatcaccattga

SEQ ID NO: 849 - protein, 1903 aa, synthetic construct
  REGION 1..1903: note = Description of Artificial Sequence: Synthetic polypeptide
ATRRYYLGAVELSWDYMQSDLGELPVDARFPPRVPKSFPFNTSVVYKKTLFVEFTDHLFNIAKPRPPWMGLLGPTIQAEVYDTVVITLKNMASHPVSLHAVGVSYWKASEGAEYDDQTSQREKEDDKVFPGGSHTYVWQVLKENGPMASDPLCLTYSYLSHVDLVKDLNSGLIGALLVCREGSLAKEKTQTLHKFILLFAVFDEGKSWHSETKNSLMQDRDAASARAWPKMHTVNGYVNRSLPGLIGCHRKSVYWHVIGMGTTPEVHSIFLEGHTFLVRNHRQASLEISPITFLTAQTLLMDLGQFLLFCHISSHQHDGMEAYVKVDSCPEEPQLRMKNNEEAEDYDDDLTDSEMDVVRFDDDNSPSFIQIRSVAKKHPKTWVHYIAAEEEDWDYAPLVLAPDDRSYKSQYLNNGPQRIGRKYKKVRFMAYTDETFKTREAIQHESGILGPLLYGEVGDTLLIIFKNQASRPYNIYPHGITDVRPLYSRRLPKGVKHLKDFPILPGEIFKYKWTVTVEDGPTKSDPRCLTRYYSSFVNMERDLASGLIGPLLICYKESVDQRGNQIMSDKRNVILFSVFDENRSWYLTENIQRFLPNPAGVQLEDPEFQASNIMHSINGYVFDSLQLSVCLHEVAYWYILSIGAQTDFLSVFFSGYTFKHKMVYEDTLTLFPFSGETVFMSMENPGLWILGCHNSDFRNRGMTALLKVSSCDKNTGDYYEDSYEDISAYLLSKNNAIEPRSFSQNGAPGTPGSGTASSSPGSSTPSGATGSPGASPGTSSTGSPGTPGSGTASSSPGSSTPSGATGSPGSSPSASTGTGPGSSPSASTGTGPGSSTPSGATGSPGSSTPSGATGSPGASPGTSSTGSPGASPGTSSTGSPGASPGTSSTGSPASSPPVLKRHQREITRTTLQSDQEEIDYDDTISVEMKKEDFDIYDEDENQSPRSFQKKTRHYFIAAVERLWDYGMSSSPHVLRNRAQSGSVPQFKKVVFQEFTDGSFTQPLYRGELNEHLGLLGPYIRAEVEDNIMVTFRNQASRPYSFYSSLISYEEDQRQGAEPRKNFVKPNETKTYFWKVQHHMAPTKDEFDCKAWAYFSDVDLEKDVHSGLIGPLLVCHTNTLNPAHGRQVTVQEFALFFTIFDETKSWYFTENMERNCRAPCNIQMEDPTFKENYRFHAINGYIMDTLPGLVMAQDQRIRWYLLSMGSNENIHSIHFSGHVFTVRKKEEYKMALYNLYPGVFETVEMLPSKAGIWRVECLIGEHLHAGMSTLFLVYSNKCQTPLGMASGHIRDFQITASGQYGQWAPKLARLHYSGSINAWSTKEPFSWIKVDLLAPMIIHGIKTQGARQKFSSLYISQFIIMYSLDGKKWQTYRGNSTGTLMVFFGNVDSSGIKHNIFNPPIIARYIRLHPTHYSIRSTLRMELMGCDLNSCSMPLGMESKAISDAQITASSYFTNMFATWSPSKARLHLQGRSNAWRPQVNNPKEWLQVDFQKTMKVTGVTTQGVKSLLTSMYVKEFLISSSQDGHQWTLFFQNGKVKVFQGNQDSFTPVVNSLDPPLLTRYLRIHPQSWVHQIALRMEVLGCEAQDLYGAPGTSESATPESGPGSEPATSGSETPGTSESATPESGPGSEPATSGSETPGTSESATPESGPGTSTEPSEGSAPGSPAGSPTSTEEGTSESATPESGPGSEPATSGSETPGTSESATPESGPGSPAGSPTSTEEGSPAGSPTSTEEGTSTEPSEGSAPGTSESATPESGPGTSESATPESGPGTSESATPESGPGSEPATSGSETPGSEPATSGSETPGSPAGSPTSTEEGTSTEPSEGSAPGTSTEPSEGSAPGSEPATSGSETPGTSESATPESGPGTSTEPSEGSAPASSEQKLISEEDLSPATGHHHHHH

SEQ ID NO: 850 - DNA, 5712 bp, synthetic construct
  misc_feature 1..5712: note = Description of Artificial Sequence: Synthetic polynucleotide
  source 1..5712: mol_type = other DNA
gccaccagaagatactacctgggtgcagtggaactgtcatgggactatatgcaaagtgatctcggtgagctgcctgtggacgcaagatttcctcctagagtgccaaaatcttttccattcaacacctcagtcgtgtacaaaaagactctgtttgtagaattcacggatcaccttttcaacatcgctaagccaaggccaccctggatgggtctgctaggtcctaccatccaggctgaggtttatgatacagtggtcattacacttaagaacatggcttcccatcctgtcagtcttcatgctgttggtgtatcctactggaaagcttctgagggagctgaatatgatgatcagaccagtcaaagggagaaagaagatgataaagtcttccctggtggaagccatacatatgtctggcaggtcctgaaagagaatggtccaatggcctctgacccactgtgccttacctactcatatctttctcatgtggacctggtaaaagacttgaattcaggcctcattggagccctactagtatgtagagaagggagtctggccaaggaaaagacacagaccttgcacaaatttatactactttttgctgtatttgatgaagggaaaagttggcactcagaaacaaagaactccttgatgcaggatagggatgctgcatctgctcgggcctggcctaaaatgcacacagtcaatggttatgtaaacaggtctctgccaggtctgattggatgccacaggaaatcagtctattggcatgtgattggaatgggcaccactcctgaagtgcactcaatattcctcgaaggtcacacatttcttgtgaggaaccatcgccaggctagcttggaaatctcgccaataactttccttactgctcaaacactcttgatggaccttggacagtttctactgttttgtcatatctcttcccaccaacatgatggcatggaagcttatgtcaaagtagacagctgtccagaggaaccccaactacgaatgaaaaataatgaagaagcggaagactatgatgatgatcttactgattctgaaatggatgtggtcaggtttgatgatgacaactctccttcctttatccaaattcgctcagttgccaagaagcatcctaaaacttgggtacattacattgctgctgaagaggaggactgggactatgctcccttagtcctcgcccccgatgacagaagttataaaagtcaatatttgaacaatggccctcagcggattggtaggaagtacaaaaaagtccgatttatggcatacacagatgaaacctttaagactcgtgaagctattcagcatgaatcaggaatcttgggacctttactttatggggaagttggagacacactgttgattatatttaagaatcaagcaagcagaccatataacatctaccctcacggaatcactgatgtccgtcctttgtattcaaggagattaccaaaaggtgtaaaacatttgaaggattttccaattctgccaggagaaatattcaaatataaatggacagtgactgtagaagatgggccaactaaatcagatcctcggtgcctgacccgctattactctagtttcgttaatatggagagagatctagcttcaggactcattggccctctcctcatctgctacaaagaatctgtagatcaaagaggaaaccagataatgtcagacaagaggaatgtcatcctgttttctgtatttgatgagaaccgaagctggtacctcacagagaatatacaacgctttctccccaatccagctggagtgcagcttgaggatccagagttccaagcctccaacatcatgcacagcatcaatggctatgtttttgatagtttgcagttgtcagtttgtttgcatgaggtggcatactggtacattctaagcattggagcacagactgacttcctttctgtcttcttctctggatataccttcaaacacaaaatggtctatgaagacacactcaccctattcccattctcaggagaaactgtcttcatgtcgatggaaaacccaggtctatggattctggggtgccacaactcagactttcggaacagaggcatgaccgccttactgaaggtttctagttgtgacaagaacactggtgattattacgaggacagttatgaagatatttcagcatacttgctgagtaaaaacaatgccattgaaccaagaagcttctctcaaaacggcgcgccaggtacaccgggcagcggcacggcttcgtcgtcacccggctcgtccacaccgtcgggagctacgggaagcccaggagcgtcaccgggaacgtcgtcaacggggtcaccgggtacgccaggtagcggcacggccagcagctcgccaggttcatcgaccccgtcgggagcgactgggtcgcccggatcaagcccgtcagcttccactggaacaggacccgggtcgtcgccgtcagcctcaacggggacaggacctggttcatcgacgccgtcaggggcgacaggctcgcccggatcgtcaacaccctcgggggcaacggggagccctggtgcgtcgcctggaacctcatccaccggaagcccgggggcctcgccgggtacgagctccacgggatcgcccggagcgtcccccggaacttcaagcacagggagccctgcctcgagcccaccagtcttgaaacgccatcaacgggaaataactcgtactactcttcagtcagatcaagaggaaatcgattatgatgataccatatcagttgaaatgaagaaggaagattttgacatttatgatgaggatgaaaatcagagcccccgcagctttcaaaagaaaacacgacactattttattgctgcagtggagaggctctgggattatgggatgagtagctccccacatgttctaagaaacagggctcagagtggcagtgtccctcagttcaagaaagttgttttccaggaatttactgatggctcctttactcagcccttataccgtggagaactaaatgaacatttgggactcctggggccatatataagagcagaagttgaagataatatcatggtaactttcagaaatcaggcctctcgtccctattccttctattctagccttatttcttatgaggaagatcagaggcaaggagcagaacctagaaaaaactttgtcaagcctaatgaaaccaaaacttacttttggaaagtgcaacatcatatggcacccactaaagatgagtttgactgcaaagcctgggcttatttctctgatgttgacctggaaaaagatgtgcactcaggcctgattggaccccttctggtctgccacactaacacactgaaccctgctcatgggagacaagtgacagtacaggaatttgctctgtttttcaccatctttgatgagaccaaaagctggtacttcactgaaaatatggaaagaaactgcagggctccctgcaatatccagatggaagatcccacttttaaagagaattatcgcttccatgcaatcaatggctacataatggatacactacctggcttagtaatggctcaggatcaaaggattcgatggtatctgctcagcatgggcagcaatgaaaacatccattctattcatttcagtggacatgtgttcactgtacgaaaaaaagaggagtataaaatggcactgtacaatctctatccaggtgtttttgagacagtggaaatgttaccatccaaagctggaatttggcgggtggaatgccttattggcgagcatctacatgctgggatgagcacactttttctggtgtacagcaataagtgtcagactcccctgggaatggcttctggacacattagagattttcagattacagcttcaggacaatatggacagtgggccccaaagctggccagacttcattattccggatcaatcaatgcctggagcaccaaggagcccttttcttggatcaaggtggatctgttggcaccaatgattattcacggcatcaagacccagggtgcccgtcagaagttctccagcctctacatctctcagtttatcatcatgtatagtcttgatgggaagaagtggcagacttatcgaggaaattccactggaaccttaatggtcttctttggcaatgtggattcatctgggataaaacacaatatttttaaccctccaattattgctcgatacatccgtttgcacccaactcattatagcattcgcagcactcttcgcatggagttgatgggctgtgatttaaatagttgcagcatgccattgggaatggagagtaaagcaatatcagatgcacagattactgcttcatcctactttaccaatatgtttgccacctggtctccttcaaaagctcgacttcacctccaagggaggagtaatgcctggagacctcaggtgaataatccaaaagagtggctgcaagtggacttccagaagacaatgaaagtcacaggagtaactactcagggagtaaaatctctgcttaccagcatgtatgtgaaggagttcctcatctccagcagtcaagatggccatcagtggactctcttttttcagaatggcaaagtaaaggtttttcagggaaatcaagactccttcacacctgtggtgaactctctagacccaccgttactgactcgctaccttcgaattcacccccagagttgggtgcaccagattgccctgaggatggaggttctgggctgcgaggcacaggacctctacggcgcgccaggtacctcagagtctgctacccccgagtcagggccaggatcagagccagccacctccgggtctgagacacccgggacttccgagagtgccacccctgagtccggacccgggtccgagcccgccacttccggctccgaaactcccggcacaagcgagagcgctaccccagagtcaggaccaggaacatctacagagccctctgaaggctccgctccagggtccccagccggcagtcccactagcaccgaggagggaacctctgaaagcgccacacccgaatcagggccagggtctgagcctgctaccagcggcagcgagacaccaggcacctctgagtccgccacaccagagtccggacccggatctcccgctgggagccccacctccactgaggagggatctcctgctggctctccaacatctactgaggaaggtacctcaaccgagccatccgagggatcagctcccggcacctcagagtcggcaaccccggagtctggacccggaacttccgaaagtgccacaccagagtccggtcccgggacttcagaatcagcaacacccgagtccggccctgggtctgaacccgccacaagtggtagtgagacaccaggatcagaacctgctacctcagggtcagagacacccggatctccggcaggctcaccaacctccactgaggagggcaccagcacagaaccaagcgagggctccgcacccggaacaagcactgaacccagtgagggttcagcacccggctctgagccggccacaagtggcagtgagacacccggcacttcagagagtgccacccccgagagtggcccaggcactagtaccgagccctctgaaggcagtgcgccagcctcgagcgaacaaaaactcatctcagaagaggatctgtcacctgcaaccggtcatcatcaccatcaccattga

SEQ ID NO: 851 - protein, 1769 aa, synthetic construct
  REGION 1..1769: note = Description of Artificial Sequence: Synthetic polypeptide
ATRRYYLGAVELSWDYMQSDLGELPVGAPGSSPSASTGTGPGSSPSASTGTGPGASPGTSSTGSPGASPGTSSTGSPGSSTPSGATGSPGSSPSASTGTGPGASPGTSSTGSPGSSPSASTGTGPGTPGSGTASSSPGSSTPSGATGSPGSSTPSGATGSPGASPGTSSTGSPASSDARFPPRVPKSFPFNTSVVYKKTLFVEFTDHLFNIAKPRPPWMGLLGPTIQAEVYDTVVITLKNMASHPVSLHAVGVSYWKASEGAEYDDQTSQREKEDDKVFPGGSHTYVWQVLKENGPMASDPLCLTYSYLSHVDLVKDLNSGLIGALLVCREGSLAKEKTQTLHKFILLFAVFDEGKSWHSETKNSLMQDRDAASARAWPKMHTVNGYVNRSLPGLIGCHRKSVYWHVIGMGTTPEVHSIFLEGHTFLVRNHRQASLEISPITFLTAQTLLMDLGQFLLFCHISSHQHDGMEAYVKVDSCPEEPQLRMKNNEEAEDYDDDLTDSEMDVVRFDDDNSPSFIQIRSVAKKHPKTWVHYIAAEEEDWDYAPLVLAPDGAPTSTEPSEGSAPGSPAGSPTSTEEGTSTEPSEGSAPGTSTEPSEGSAPGTSESATPESGPGTSTEPSEGSAPGTSESATPESGPGSEPATSGSETPGTSTEPSEGSAPGTSTEPSEGSAPGTSESATPESGPGTSESATPESGPGASSDRSYKSQYLNNGPQRIGRKYKKVRFMAYTDETFKTREAIQHESGILGPLLYGEVGDTLLIIFKNQASRPYNIYPHGITDVRPLYSRRLPKGVKHLKDFPILPGEIFKYKWTVTVEDGPTKSDPRCLTRYYSSFVNMERDLASGLIGPLLICYKESVDQRGNQIMSDKRNVILFSVFDENRSWYLTENIQRFLPNPAGVQLEDPEFQASNIMHSINGYVFDSLQLSVCLHEVAYWYILSIGAQTDFLSVFFSGYTFKHKMVYEDTLTLFPFSGETVFMSMENPGLWILGCHNSDFRNRGMTALLKVSSCDKNTGDYYEDSYEDISAYLLSKNNAIEPRSFSQNPPVLKRHQREITRTTLQSDQEEIDYDDTISVEMKKEDFDIYDEDENQSPRSFQKKTRHYFIAAVERLWDYGMSSSPHVLRNRAQSGSVPQFKKVVFQEFTDGSFTQPLYRGELNEHLGLLGPYIRAEVEDNIMVTFRNQASRPYSFYSSLISYEEDQRQGAEPRKNFVKPNETKTYFWKVQHHMAPTKDEFDCKAWAYFSDVDLEKDVHSGLIGPLLVCHTNTLNPAHGRQVTVQEFALFFTIFDETKSWYFTENMERNCRAPCNIQMEDPTFKENYRFHAINGYIMDTLPGLVMAQDQRIRWYLLSMGSNENIHSIHFSGHVFTVRKKEEYKMALYNLYPGVFETVEMLPSKAGIWRVECLIGEHLHAGMSTLFLVYSNKCQTPLGMASGHIRDFQITASGQYGQWAPKLARLHYSGSINAWSTKEPFSWIKVDLLAPMIIHGIKTQGARQKFSSLYISQFIIMYSLDGKKWQTYRGNSTGTLMVFFGNVDSSGIKHNIFNPPIIARYIRLHPTHYSIRSTLRMELMGCDLNSCSMPLGMESKAISDAQITASSYFTNMFATWSPSKARLHLQGRSNAWRPQVNNPKEWLQVDFQKTMKVTGVTTQGVKSLLTSMYVKEFLISSSQDGHQWTLFFQNGKVKVFQGNQDSFTPVVNSLDPPLLTRYLRIHPQSWVHQIALRMEVLGCEAQDLYGAGSPGAETAEQKLISEEDLSPATGHHHHHH

SEQ ID NO: 852 - DNA, 5310 bp, synthetic construct
  misc_feature 1..5310: note = Description of Artificial Sequence: Synthetic polynucleotide
  source 1..5310: mol_type = other DNA
gccaccagaagatactacctgggtgcagtggaactgtcatgggactatatgcaaagtgatctcggtgagctgcctgtgggcgcgccaggctccagcccctccgcgagcacgggaaccggaccaggttcgtcaccctcagcatcaacggggacgggaccgggggcgtcaccaggaacgtcctccaccggctcgccgggtgcatcacccggaacgtcatcgaccggatcgccagggagctcgacgccatcaggcgcaacaggatcacctggctcaagccctagcgcgtcaaccggcacgggtccgggtgcctcccctggcacgtccagcaccggatcacccggatcgagcccatccgcctcaaccggaaccggacccggtacaccagggtcgggaacagcctcctcgtcaccaggctcctcaaccccctcgggagccacgggttcgcccggttcgtcaacgccttccggagcaactggtagccccggagcatcgccaggaacttcgagcacggggtcgcccgcctcgagcgacgcaagatttcctcctagagtgccaaaatcttttccattcaacacctcagtcgtgtacaaaaagactctgtttgtagaattcacggatcaccttttcaacatcgctaagccaaggccaccctggatgggtctgctaggtcctaccatccaggctgaggtttatgatacagtggtcattacacttaagaacatggcttcccatcctgtcagtcttcatgctgttggtgtatcctactggaaagcttctgagggagctgaatatgatgatcagaccagtcaaagggagaaagaagatgataaagtcttccctggtggaagccatacatatgtctggcaggtcctgaaagagaatggtccaatggcctctgacccactgtgccttacctactcatatctttctcatgtggacctggtaaaagacttgaattcaggcctcattggagccctactagtatgtagagaagggagtctggccaaggaaaagacacagaccttgcacaaatttatactactttttgctgtatttgatgaagggaaaagttggcactcagaaacaaagaactccttgatgcaggatagggatgctgcatctgctcgggcctggcctaaaatgcacacagtcaatggttatgtaaacaggtctctgccaggtctgattggatgccacaggaaatcagtctattggcatgtgattggaatgggcaccactcctgaagtgcactcaatattcctcgaaggtcacacatttcttgtgaggaaccatcgccaggctagcttggaaatctcgccaataactttccttactgctcaaacactcttgatggaccttggacagtttctactgttttgtcatatctcttcccaccaacatgatggcatggaagcttatgtcaaagtagacagctgtccagaggaaccccaactacgaatgaaaaataatgaagaagcggaagactatgatgatgatcttactgattctgaaatggatgtggtcaggtttgatgatgacaactctccttcctttatccaaattcgctcagttgccaagaagcatcctaaaacttgggtacattacattgctgctgaagaggaggactgggactatgctcccttagtcctcgcccccgatggcgcgccaaccagtacggagccgtccgaggggagcgcaccaggaagcccggctgggagcccgacttctaccgaagagggtacatctaccgaaccaagtgaaggttcagcaccaggcacctcaacagaaccctctgagggctcggcgcctggtacaagtgagtccgccaccccagaatccgggcctgggacaagcacagaaccttcggaagggagtgcccctggaacatccgaatcggcaaccccagaatcagggccaggatctgagcccgcgacttcgggctccgagacgcctgggacatccaccgagccctccgaaggatcagccccaggcaccagcacggagccctctgagggaagcgcacctggtaccagcgaaagcgcaactcccgaatcaggtcccggtacgagcgagtcggcgaccccggagagcgggccaggtgcctcgagcgacagaagttataaaagtcaatatttgaacaatggccctcagcggattggtaggaagtacaaaaaagtccgatttatggcatacacagatgaaacctttaagactcgtgaagctattcagcatgaatcaggaatcttgggacctttactttatggggaagttggagacacactgttgattatatttaagaatcaagcaagcagaccatataacatctaccctcacggaatcactgatgtccgtcctttgtattcaaggagattaccaaaaggtgtaaaacatttgaaggattttccaattctgccaggagaaatattcaaatataaatggacagtgactgtagaagatgggccaactaaatcagatcctcggtgcctgacccgctattactctagtttcgttaatatggagagagatctagcttcaggactcattggccctctcctcatctgctacaaagaatctgtagatcaaagaggaaaccagataatgtcagacaagaggaatgtcatcctgttttctgtatttgatgagaaccgaagctggtacctcacagagaatatacaacgctttctccccaatccagctggagtgcagcttgaggatccagagttccaagcctccaacatcatgcacagcatcaatggctatgtttttgatagtttgcagttgtcagtttgtttgcatgaggtggcatactggtacattctaagcattggagcacagactgacttcctttctgtcttcttctctggatataccttcaaacacaaaatggtctatgaagacacactcaccctattcccattctcaggagaaactgtcttcatgtcgatggaaaacccaggtctatggattctggggtgccacaactcagactttcggaacagaggcatgaccgccttactgaaggtttctagttgtgacaagaacactggtgattattacgaggacagttatgaagatatttcagcatacttgctgagtaaaaacaatgccattgaaccaagaagcttctctcaaaacccaccagtcttgaaacgccatcaacgggaaataactcgtactactcttcagtcagatcaagaggaaatcgattatgatgataccatatcagttgaaatgaagaaggaagattttgacatttatgatgaggatgaaaatcagagcccccgcagctttcaaaagaaaacacgacactattttattgctgcagtggagaggctctgggattatgggatgagtagctccccacatgttctaagaaacagggctcagagtggcagtgtccctcagttcaagaaagttgttttccaggaatttactgatggctcctttactcagcccttataccgtggagaactaaatgaacatttgggactcctggggccatatataagagcagaagttgaagataatatcatggtaactttcagaaatcaggcctctcgtccctattccttctattctagccttatttcttatgaggaagatcagaggcaaggagcagaacctagaaaaaactttgtcaagcctaatgaaaccaaaacttacttttggaaagtgcaacatcatatggcacccactaaagatgagtttgactgcaaagcctgggcttatttctctgatgttgacctggaaaaagatgtgcactcaggcctgattggaccccttctggtctgccacactaacacactgaaccctgctcatgggagacaagtgacagtacaggaatttgctctgtttttcaccatctttgatgagaccaaaagctggtacttcactgaaaatatggaaagaaactgcagggctccctgcaatatccagatggaagatcccacttttaaagagaattatcgcttccatgcaatcaatggctacataatggatacactacctggcttagtaatggctcaggatcaaaggattcgatggtatctgctcagcatgggcagcaatgaaaacatccattctattcatttcagtggacatgtgttcactgtacgaaaaaaagaggagtataaaatggcactgtacaatctctatccaggtgtttttgagacagtggaaatgttaccatccaaagctggaatttggcgggtggaatgccttattggcgagcatctacatgctgggatgagcacactttttctggtgtacagcaataagtgtcagactcccctgggaatggcttctggacacattagagattttcagattacagcttcaggacaatatggacagtgggccccaaagctggccagacttcattattccggatcaatcaatgcctggagcaccaaggagcccttttcttggatcaaggtggatctgttggcaccaatgattattcacggcatcaagacccagggtgcccgtcagaagttctccagcctctacatctctcagtttatcatcatgtatagtcttgatgggaagaagtggcagacttatcgaggaaattccactggaaccttaatggtcttctttggcaatgtggattcatctgggataaaacacaatatttttaaccctccaattattgctcgatacatccgtttgcacccaactcattatagcattcgcagcactcttcgcatggagttgatgggctgtgatttaaatagttgcagcatgccattgggaatggagagtaaagcaatatcagatgcacagattactgcttcatcctactttaccaatatgtttgccacctggtctccttcaaaagctcgacttcacctccaagggaggagtaatgcctggagacctcaggtgaataatccaaaagagtggctgcaagtggacttccagaagacaatgaaagtcacaggagtaactactcagggagtaaaatctctgcttaccagcatgtatgtgaaggagttcctcatctccagcagtcaagatggccatcagtggactctcttttttcagaatggcaaagtaaaggtttttcagggaaatcaagactccttcacacctgtggtgaactctctagacccaccgttactgactcgctaccttcgaattcacccccagagttgggtgcaccagattgccctgaggatggaggttctgggctgcgaggcacaggacctctacggcgccggatcacctggggccgaaacggccgaacaaaaactcatctcagaagaggatctgtcacctgcaaccggtcatcatcaccatcaccattga

SEQ ID NO: 853 - protein, 1769 aa, synthetic construct
  REGION 1..1769: note = Description of Artificial Sequence: Synthetic polypeptide
ATRRYYLGAVELSWDYMQSDLGELPVGAPTSESATPESGPGSEPATSGSETPGTSESATPESGPGSEPATSGSETPGTSESATPESGPGTSTEPSEGSAPGSPAGSPTSTEEGTSESATPESGPGSEPATSGSETPGTSESATPESGPGSPAGSPTSTEEGSPAGSPTSTEEGASSDARFPPRVPKSFPFNTSVVYKKTLFVEFTDHLFNIAKPRPPWMGLLGPTIQAEVYDTVVITLKNMASHPVSLHAVGVSYWKASEGAEYDDQTSQREKEDDKVFPGGSHTYVWQVLKENGPMASDPLCLTYSYLSHVDLVKDLNSGLIGALLVCREGSLAKEKTQTLHKFILLFAVFDEGKSWHSETKNSLMQDRDAASARAWPKMHTVNGYVNRSLPGLIGCHRKSVYWHVIGMGTTPEVHSIFLEGHTFLVRNHRQASLEISPITFLTAQTLLMDLGQFLLFCHISSHQHDGMEAYVKVDSCPEEPQLRMKNNEEAEDYDDDLTDSEMDVVRFDDDNSPSFIQIRSVAKKHPKTWVHYIAAEEEDWDYAPLVLAPDGAPTSTEPSEGSAPGSPAGSPTSTEEGTSTEPSEGSAPGTSTEPSEGSAPGTSESATPESGPGTSTEPSEGSAPGTSESATPESGPGSEPATSGSETPGTSTEPSEGSAPGTSTEPSEGSAPGTSESATPESGPGTSESATPESGPGASSDRSYKSQYLNNGPQRIGRKYKKVRFMAYTDETFKTREAIQHESGILGPLLYGEVGDTLLIIFKNQASRPYNIYPHGITDVRPLYSRRLPKGVKHLKDFPILPGEIFKYKWTVTVEDGPTKSDPRCLTRYYSSFVNMERDLASGLIGPLLICYKESVDQRGNQIMSDKRNVILFSVFDENRSWYLTENIQRFLPNPAGVQLEDPEFQASNIMHSINGYVFDSLQLSVCLHEVAYWYILSIGAQTDFLSVFFSGYTFKHKMVYEDTLTLFPFSGETVFMSMENPGLWILGCHNSDFRNRGMTALLKVSSCDKNTGDYYEDSYEDISAYLLSKNNAIEPRSFSQNPPVLKRHQREITRTTLQSDQEEIDYDDTISVEMKKEDFDIYDEDENQSPRSFQKKTRHYFIAAVERLWDYGMSSSPHVLRNRAQSGSVPQFKKVVFQEFTDGSFTQPLYRGELNEHLGLLGPYIRAEVEDNIMVTFRNQASRPYSFYSSLISYEEDQRQGAEPRKNFVKPNETKTYFWKVQHHMAPTKDEFDCKAWAYFSDVDLEKDVHSGLIGPLLVCHTNTLNPAHGRQVTVQEFALFFTIFDETKSWYFTENMERNCRAPCNIQMEDPTFKENYRFHAINGYIMDTLPGLVMAQDQRIRWYLLSMGSNENIHSIHFSGHVFTVRKKEEYKMALYNLYPGVFETVEMLPSKAGIWRVECLIGEHLHAGMSTLFLVYSNKCQTPLGMASGHIRDFQITASGQYGQWAPKLARLHYSGSINAWSTKEPFSWIKVDLLAPMIIHGIKTQGARQKFSSLYISQFIIMYSLDGKKWQTYRGNSTGTLMVFFGNVDSSGIKHNIFNPPIIARYIRLHPTHYSIRSTLRMELMGCDLNSCSMPLGMESKAISDAQITASSYFTNMFATWSPSKARLHLQGRSNAWRPQVNNPKEWLQVDFQKTMKVTGVTTQGVKSLLTSMYVKEFLISSSQDGHQWTLFFQNGKVKVFQGNQDSFTPVVNSLDPPLLTRYLRIHPQSWVHQIALRMEVLGCEAQDLYGAGSPGAETAEQKLISEEDLSPATGHHHHHH

SEQ ID NO: 854 - DNA, 5310 bp, synthetic construct
  misc_feature 1..5310: note = Description of Artificial Sequence: Synthetic polynucleotide
  source 1..5310: mol_type = other DNA
gccaccagaagatactacctgggtgcagtggaactgtcatgggactatatgcaaagtgatctcggtgagctgcctgtgggcgcgccaacatcagagagcgccacccctgaaagtggtcccgggagcgagccagccacatctgggtcggaaacgccaggcacaagtgagtctgcaactcccgagtccggacctggctccgagcctgccactagcggctccgagactccgggaacttccgagagcgctacaccagaaagcggacccggaaccagtaccgaacctagcgagggctctgctccgggcagcccagccggctctcctacatccacggaggagggcacttccgaatccgccaccccggagtcagggccaggatctgaacccgctacctcaggcagtgagacgccaggaacgagcgagtccgctacaccggagagtgggccagggagccctgctggatctcctacgtccactgaggaagggtcaccagcgggctcgcccaccagcactgaagaaggtgcctcgagcgacgcaagatttcctcctagagtgccaaaatcttttccattcaacacctcagtcgtgtacaaaaagactctgtttgtagaattcacggatcaccttttcaacatcgctaagccaaggccaccctggatgggtctgctaggtcctaccatccaggctgaggtttatgatacagtggtcattacacttaagaacatggcttcccatcctgtcagtcttcatgctgttggtgtatcctactggaaagcttctgagggagctgaatatgatgatcagaccagtcaaagggagaaagaagatgataaagtcttccctggtggaagccatacatatgtctggcaggtcctgaaagagaatggtccaatggcctctgacccactgtgccttacctactcatatctttctcatgtggacctggtaaaagacttgaattcaggcctcattggagccctactagtatgtagagaagggagtctggccaaggaaaagacacagaccttgcacaaatttatactactttttgctgtatttgatgaagggaaaagttggcactcagaaacaaagaactccttgatgcaggatagggatgctgcatctgctcgggcctggcctaaaatgcacacagtcaatggttatgtaaacaggtctctgccaggtctgattggatgccacaggaaatcagtctattggcatgtgattggaatgggcaccactcctgaagtgcactcaatattcctcgaaggtcacacatttcttgtgaggaaccatcgccaggctagcttggaaatctcgccaataactttccttactgctcaaacactcttgatggaccttggacagtttctactgttttgtcatatctcttcccaccaacatgatggcatggaagcttatgtcaaagtagacagctgtccagaggaaccccaactacgaatgaaaaataatgaagaagcggaagactatgatgatgatcttactgattctgaaatggatgtggtcaggtttgatgatgacaactctccttcctttatccaaattcgctcagttgccaagaagcatcctaaaacttgggtacattacattgctgctgaagaggaggactgggactatgctcccttagtcctcgcccccgatggcgcgccaaccagtacggagccgtccgaggggagcgcaccaggaagcccggctgggagcccgacttctaccgaagagggtacatctaccgaaccaagtgaaggttcagcaccaggcacctcaacagaaccctctgagggctcggcgcctggtacaagtgagtccgccaccccagaatccgggcctgggacaagcacagaaccttcggaagggagtgcccctggaacatccgaatcggcaaccccagaatcagggccaggatctgagcccgcgacttcgggctccgagacgcctgggacatccaccgagccctccgaaggatcagccccaggcaccagcacggagccctctgagggaagcgcacctggtaccagcgaaagcgcaactcccgaatcaggtcccggtacgagcgagtcggcgaccccggagagcgggccaggtgcctcgagcgacagaagttataaaagtcaatatttgaacaatggccctcagcggattggtaggaagtacaaaaaagtccgatttatggcatacacagatgaaacctttaagactcgtgaagctattcagcatgaatcaggaatcttgggacctttactttatggggaagttggagacacactgttgattatatttaagaatcaagcaagcagaccatataacatctaccctcacggaatcactgatgtccgtcctttgtattcaaggagattaccaaaaggtgtaaaacatttgaaggattttccaattctgccaggagaaatattcaaatataaatggacagtgactgtagaagatgggccaactaaatcagatcctcggtgcctgacccgctattactctagtttcgttaatatggagagagatctagcttcaggactcattggccctctcctcatctgctacaaagaatctgtagatcaaagaggaaaccagataatgtcagacaagaggaatgtcatcctgttttctgtatttgatgagaaccgaagctggtacctcacagagaatatacaacgctttctccccaatccagctggagtgcagcttgaggatccagagttccaagcctccaacatcatgcacagcatcaatggctatgtttttgatagtttgcagttgtcagtttgtttgcatgaggtggcatactggtacattctaagcattggagcacagactgacttcctttctgtcttcttctctggatataccttcaaacacaaaatggtctatgaagacacactcaccctattcccattctcaggagaaactgtcttcatgtcgatggaaaacccaggtctatggattctggggtgccacaactcagactttcggaacagaggcatgaccgccttactgaaggtttctagttgtgacaagaacactggtgattattacgaggacagttatgaagatatttcagcatacttgctgagtaaaaacaatgccattgaaccaagaagcttctctcaaaacccaccagtcttgaaacgccatcaacgggaaataactcgtactactcttcagtcagatcaagaggaaatcgattatgatgataccatatcagttgaaatgaagaaggaagattttgacatttatgatgaggatgaaaatcagagcccccgcagctttcaaaagaaaacacgacactattttattgctgcagtggagaggctctgggattatgggatgagtagctccccacatgttctaagaaacagggctcagagtggcagtgtccctcagttcaagaaagttgttttccaggaatttactgatggctcctttactcagcccttataccgtggagaactaaatgaacatttgggactcctggggccatatataagagcagaagttgaagataatatcatggtaactttcagaaatcaggcctctcgtccctattccttctattctagccttatttcttatgaggaagatcagaggcaaggagcagaacctagaaaaaactttgtcaagcctaatgaaaccaaaacttacttttggaaagtgcaacatcatatggcacccactaaagatgagtttgactgcaaagcctgggcttatttctctgatgttgacctggaaaaagatgtgcactcaggcctgattggaccccttctggtctgccacactaacacactgaaccctgctcatgggagacaagtgacagtacaggaatttgctctgtttttcaccatctttgatgagaccaaaagctggtacttcactgaaaatatggaaagaaactgcagggctccctgcaatatccagatggaagatcccacttttaaagagaattatcgcttccatgcaatcaatggctacataatggatacactacctggcttagtaatggctcaggatcaaaggattcgatggtatctgctcagcatgggcagcaatgaaaacatccattctattcatttcagtggacatgtgttcactgtacgaaaaaaagaggagtataaaatggcactgtacaatctctatccaggtgtttttgagacagtggaaatgttaccatccaaagctggaatttggcgggtggaatgccttattggcgagcatctacatgctgggatgagcacactttttctggtgtacagcaataagtgtcagactcccctgggaatggcttctggacacattagagattttcagattacagcttcaggacaatatggacagtgggccccaaagctggccagacttcattattccggatcaatcaatgcctggagcaccaaggagcccttttcttggatcaaggtggatctgttggcaccaatgattattcacggcatcaagacccagggtgcccgtcagaagttctccagcctctacatctctcagtttatcatcatgtatagtcttgatgggaagaagtggcagacttatcgaggaaattccactggaaccttaatggtcttctttggcaatgtggattcatctgggataaaacacaatatttttaaccctccaattattgctcgatacatccgtttgcacccaactcattatagcattcgcagcactcttcgcatggagttgatgggctgtgatttaaatagttgcagcatgccattgggaatggagagtaaagcaatatcagatgcacagattactgcttcatcctactttaccaatatgtttgccacctggtctccttcaaaagctcgacttcacctccaagggaggagtaatgcctggagacctcaggtgaataatccaaaagagtggctgcaagtggacttccagaagacaatgaaagtcacaggagtaactactcagggagtaaaatctctgcttaccagcatgtatgtgaaggagttcctcatctccagcagtcaagatggccatcagtggactctcttttttcagaatggcaaagtaaaggtttttcagggaaatcaagactccttcacacctgtggtgaactctctagacccaccgttactgactcgctaccttcgaattcacccccagagttgggtgcaccagattgccctgaggatggaggttctgggctgcgaggcacaggacctctacggcgccggatcacctggggccgaaacggccgaacaaaaactcatctcagaagaggatctgtcacctgcaaccggtcatcatcaccatcaccattga

SEQ ID NO: 855 - protein, 1769 aa, synthetic construct
  REGION 1..1769: note = Description of Artificial Sequence: Synthetic polypeptide
ATRRYYLGAVELSWDYMQSDLGELPVDARFPPRVPKSFPFGAPGSSPSASTGTGPGSSPSASTGTGPGASPGTSSTGSPGASPGTSSTGSPGSSTPSGATGSPGSSPSASTGTGPGASPGTSSTGSPGSSPSASTGTGPGTPGSGTASSSPGSSTPSGATGSPGSSTPSGATGSPGASPGTSSTGSPASSNTSVVYKKTLFVEFTDHLFNIAKPRPPWMGLLGPTIQAEVYDTVVITLKNMASHPVSLHAVGVSYWKASEGAEYDDQTSQREKEDDKVFPGGSHTYVWQVLKENGPMASDPLCLTYSYLSHVDLVKDLNSGLIGALLVCREGSLAKEKTQTLHKFILLFAVFDEGKSWHSETKNSLMQDRDAASARAWPKMHTVNGYVNRSLPGLIGCHRKSVYWHVIGMGTTPEVHSIFLEGHTFLVRNHRQASLEISPITFLTAQTLLMDLGQFLLFCHISSHQHDGMEAYVKVDSCPEEPQLRMKNNEEAEDYDDDLTDSEMDVVRFDDDNSPSFIQIRSVAKKHPKTWVHYIAAEEEDWDYAPLVLAPDGAPTSTEPSEGSAPGSPAGSPTSTEEGTSTEPSEGSAPGTSTEPSEGSAPGTSESATPESGPGTSTEPSEGSAPGTSESATPESGPGSEPATSGSETPGTSTEPSEGSAPGTSTEPSEGSAPGTSESATPESGPGTSESATPESGPGASSDRSYKSQYLNNGPQRIGRKYKKVRFMAYTDETFKTREAIQHESGILGPLLYGEVGDTLLIIFKNQASRPYNIYPHGITDVRPLYSRRLPKGVKHLKDFPILPGEIFKYKWTVTVEDGPTKSDPRCLTRYYSSFVNMERDLASGLIGPLLICYKESVDQRGNQIMSDKRNVILFSVFDENRSWYLTENIQRFLPNPAGVQLEDPEFQASNIMHSINGYVFDSLQLSVCLHEVAYWYILSIGAQTDFLSVFFSGYTFKHKMVYEDTLTLFPFSGETVFMSMENPGLWILGCHNSDFRNRGMTALLKVSSCDKNTGDYYEDSYEDISAYLLSKNNAIEPRSFSQNPPVLKRHQREITRTTLQSDQEEIDYDDTISVEMKKEDFDIYDEDENQSPRSFQKKTRHYFIAAVERLWDYGMSSSPHVLRNRAQSGSVPQFKKVVFQEFTDGSFTQPLYRGELNEHLGLLGPYIRAEVEDNIMVTFRNQASRPYSFYSSLISYEEDQRQGAEPRKNFVKPNETKTYFWKVQHHMAPTKDEFDCKAWAYFSDVDLEKDVHSGLIGPLLVCHTNTLNPAHGRQVTVQEFALFFTIFDETKSWYFTENMERNCRAPCNIQMEDPTFKENYRFHAINGYIMDTLPGLVMAQDQRIRWYLLSMGSNENIHSIHFSGHVFTVRKKEEYKMALYNLYPGVFETVEMLPSKAGIWRVECLIGEHLHAGMSTLFLVYSNKCQTPLGMASGHIRDFQITASGQYGQWAPKLARLHYSGSINAWSTKEPFSWIKVDLLAPMIIHGIKTQGARQKFSSLYISQFIIMYSLDGKKWQTYRGNSTGTLMVFFGNVDSSGIKHNIFNPPIIARYIRLHPTHYSIRSTLRMELMGCDLNSCSMPLGMESKAISDAQITASSYFTNMFATWSPSKARLHLQGRSNAWRPQVNNPKEWLQVDFQKTMKVTGVTTQGVKSLLTSMYVKEFLISSSQDGHQWTLFFQNGKVKVFQGNQDSFTPVVNSLDPPLLTRYLRIHPQSWVHQIALRMEVLGCEAQDLYGAGSPGAETAEQKLISEEDLSPATGHHHHHH

SEQ ID NO: 856 - DNA, 5310 bp, synthetic construct
  misc_feature 1..5310: note = Description of Artificial Sequence: Synthetic polynucleotide
  source 1..5310: mol_type = other DNA
gccaccagaagatactacctgggtgcagtggaactgtcatgggactatatgcaaagtgatctcggtgagctgcctgtggacgcaagatttcctcctagagtgccaaaatcttttccattcggcgcgccaggctccagcccctccgcgagcacgggaaccggaccaggttcgtcaccctcagcatcaacggggacgggaccgggggcgtcaccaggaacgtcctccaccggctcgccgggtgcatcacccggaacgtcatcgaccggatcgccagggagctcgacgccatcaggcgcaacaggatcacctggctcaagccctagcgcgtcaaccggcacgggtccgggtgcctcccctggcacgtccagcaccggatcacccggatcgagcccatccgcctcaaccggaaccggacccggtacaccagggtcgggaacagcctcctcgtcaccaggctcctcaaccccctcgggagccacgggttcgcccggttcgtcaacgccttccggagcaactggtagccccggagcatcgccaggaacttcgagcacggggtcgcccgcctcgagcaacacctcagtcgtgtacaaaaagactctgtttgtagaattcacggatcaccttttcaacatcgctaagccaaggccaccctggatgggtctgctaggtcctaccatccaggctgaggtttatgatacagtggtcattacacttaagaacatggcttcccatcctgtcagtcttcatgctgttggtgtatcctactggaaagcttctgagggagctgaatatgatgatcagaccagtcaaagggagaaagaagatgataaagtcttccctggtggaagccatacatatgtctggcaggtcctgaaagagaatggtccaatggcctctgacccactgtgccttacctactcatatctttctcatgtggacctggtaaaagacttgaattcaggcctcattggagccctactagtatgtagagaagggagtctggccaaggaaaagacacagaccttgcacaaatttatactactttttgctgtatttgatgaagggaaaagttggcactcagaaacaaagaactccttgatgcaggatagggatgctgcatctgctcgggcctggcctaaaatgcacacagtcaatggttatgtaaacaggtctctgccaggtctgattggatgccacaggaaatcagtctattggcatgtgattggaatgggcaccactcctgaagtgcactcaatattcctcgaaggtcacacatttcttgtgaggaaccatcgccaggctagcttggaaatctcgccaataactttccttactgctcaaacactcttgatggaccttggacagtttctactgttttgtcatatctcttcccaccaacatgatggcatggaagcttatgtcaaagtagacagctgtccagaggaaccccaactacgaatgaaaaataatgaagaagcggaagactatgatgatgatcttactgattctgaaatggatgtggtcaggtttgatgatgacaactctccttcctttatccaaattcgctcagttgccaagaagcatcctaaaacttgggtacattacattgctgctgaagaggaggactgggactatgctcccttagtcctcgcccccgatggcgcgccaaccagtacggagccgtccgaggggagcgcaccaggaagcccggctgggagcccgacttctaccgaagagggtacatctaccgaaccaagtgaaggttcagcaccaggcacctcaacagaaccctctgagggctcggcgcctggtacaagtgagtccgccaccccagaatccgggcctgggacaagcacagaaccttcggaagggagtgcccctggaacatccgaatcggcaaccccagaatcagggccaggatctgagcccgcgacttcgggctccgagacgcctgggacatccaccgagccctccgaaggatcagccccaggcaccagcacggagccctctgagggaagcgcacctggtaccagcgaaagcgcaactcccgaatcaggtcccggtacgagcgagtcggcgaccccggagagcgggccaggtgcctcgagcgacagaagttataaaagtcaatatttgaacaatggccctcagcggattggtaggaagtacaaaaaagtccgatttatggcatacacagatgaaacctttaagactcgtgaagctattcagcatgaatcaggaatcttgggacctttactttatggggaagttggagacacactgttgattatatttaagaatcaagcaagcagaccatataacatctaccctcacggaatcactgatgtccgtcctttgtattcaaggagattaccaaaaggtgtaaaacatttgaaggattttccaattctgccaggagaaatattcaaatataaatggacagtgactgtagaagatgggccaactaaatcagatcctcggtgcctgacccgctattactctagtttcgttaatatggagagagatctagcttcaggactcattggccctctcctcatctgctacaaagaatctgtagatcaaagaggaaaccagataatgtcagacaagaggaatgtcatcctgttttctgtatttgatgagaaccgaagctggtacctcacagagaatatacaacgctttctccccaatccagctggagtgcagcttgaggatccagagttccaagcctccaacatcatgcacagcatcaatggctatgtttttgatagtttgcagttgtcagtttgtttgcatgaggtggcatactggtacattctaagcattggagcacagactgacttcctttctgtcttcttctctggatataccttcaaacacaaaatggtctatgaagacacactcaccctattcccattctcaggagaaactgtcttcatgtcgatggaaaacccaggtctatggattctggggtgccacaactcagactttcggaacagaggcatgaccgccttactgaaggtttctagttgtgacaagaacactggtgattattacgaggacagttatgaagatatttcagcatacttgctgagtaaaaacaatgccattgaaccaagaagcttctctcaaaacccaccagtcttgaaacgccatcaacgggaaataactcgtactactcttcagtcagatcaagaggaaatcgattatgatgataccatatcagttgaaatgaagaaggaagattttgacatttatgatgaggatgaaaatcagagcccccgcagctttcaaaagaaaacacgacactattttattgctgcagtggagaggctctgggattatgggatgagtagctccccacatgttctaagaaacagggctcagagtggcagtgtccctcagttcaagaaagttgttttccaggaatttactgatggctcctttactcagcccttataccgtggagaactaaatgaacatttgggactcctggggccatatataagagcagaagttgaagataatatcatggtaactttcagaaatcaggcctctcgtccctattccttctattctagccttatttcttatgaggaagatcagaggcaaggagcagaacctagaaaaaactttgtcaagcctaatgaaaccaaaacttacttttggaaagtgcaacatcatatggcacccactaaagatgagtttgactgcaaagcctgggcttatttctctgatgttgacctggaaaaagatgtgcactcaggcctgattggaccccttctggtctgccacactaacacactgaaccctgctcatgggagacaagtgacagtacaggaatttgctctgtttttcaccatctttgatgagaccaaaagctggtacttcactgaaaatatggaaagaaactgcagggctccctgcaatatccagatggaagatcccacttttaaagagaattatcgcttccatgcaatcaatggctacataatggatacactacctggcttagtaatggctcaggatcaaaggattcgatggtatctgctcagcatgggcagcaatgaaaacatccattctattcatttcagtggacatgtgttcactgtacgaaaaaaagaggagtataaaatggcactgtacaatctctatccaggtgtttttgagacagtggaaatgttaccatccaaagctggaatttggcgggtggaatgccttattggcgagcatctacatgctgggatgagcacactttttctggtgtacagcaataagtgtcagactcccctgggaatggcttctggacacattagagattttcagattacagcttcaggacaatatggacagtgggccccaaagctggccagacttcattattccggatcaatcaatgcctggagcaccaaggagcccttttcttggatcaaggtggatctgttggcaccaatgattattcacggcatcaagacccagggtgcccgtcagaagttctccagcctctacatctctcagtttatcatcatgtatagtcttgatgggaagaagtggcagacttatcgaggaaattccactggaaccttaatggtcttctttggcaatgtggattcatctgggataaaacacaatatttttaaccctccaattattgctcgatacatccgtttgcacccaactcattatagcattcgcagcactcttcgcatggagttgatgggctgtgatttaaatagttgcagcatgccattgggaatggagagtaaagcaatatcagatgcacagattactgcttcatcctactttaccaatatgtttgccacctggtctccttcaaaagctcgacttcacctccaagggaggagtaatgcctggagacctcaggtgaataatccaaaagagtggctgcaagtggacttccagaagacaatgaaagtcacaggagtaactactcagggagtaaaatctctgcttaccagcatgtatgtgaaggagttcctcatctccagcagtcaagatggccatcagtggactctcttttttcagaatggcaaagtaaaggtttttcagggaaatcaagactccttcacacctgtggtgaactctctagacccaccgttactgactcgctaccttcgaattcacccccagagttgggtgcaccagattgccctgaggatggaggttctgggctgcgaggcacaggacctctacggcgccggatcacctggggccgaaacggccgaacaaaaactcatctcagaagaggatctgtcacctgcaaccggtcatcatcaccatcaccattga

SEQ ID NO: 857 - protein, 1769 aa, synthetic construct
  REGION 1..1769: note = Description of Artificial Sequence: Synthetic polypeptide
ATRRYYLGAVELSWDYMQSDLGELPVDARFPPRVPKSFPFGAPTSESATPESGPGSEPATSGSETPGTSESATPESGPGSEPATSGSETPGTSESATPESGPGTSTEPSEGSAPGSPAGSPTSTEEGTSESATPESGPGSEPATSGSETPGTSESATPESGPGSPAGSPTSTEEGSPAGSPTSTEEGASSNTSVVYKKTLFVEFTDHLFNIAKPRPPWMGLLGPTIQAEVYDTVVITLKNMASHPVSLHAVGVSYWKASEGAEYDDQTSQREKEDDKVFPGGSHTYVWQVLKENGPMASDPLCLTYSYLSHVDLVKDLNSGLIGALLVCREGSLAKEKTQTLHKFILLFAVFDEGKSWHSETKNSLMQDRDAASARAWPKMHTVNGYVNRSLPGLIGCHRKSVYWHVIGMGTTPEVHSIFLEGHTFLVRNHRQASLEISPITFLTAQTLLMDLGQFLLFCHISSHQHDGMEAYVKVDSCPEEPQLRMKNNEEAEDYDDDLTDSEMDVVRFDDDNSPSFIQIRSVAKKHPKTWVHYIAAEEEDWDYAPLVLAPDGAPTSTEPSEGSAPGSPAGSPTSTEEGTSTEPSEGSAPGTSTEPSEGSAPGTSESATPESGPGTSTEPSEGSAPGTSESATPESGPGSEPATSGSETPGTSTEPSEGSAPGTSTEPSEGSAPGTSESATPESGPGTSESATPESGPGASSDRSYKSQYLNNGPQRIGRKYKKVRFMAYTDETFKTREAIQHESGILGPLLYGEVGDTLLIIFKNQASRPYNIYPHGITDVRPLYSRRLPKGVKHLKDFPILPGEIFKYKWTVTVEDGPTKSDPRCLTRYYSSFVNMERDLASGLIGPLLICYKESVDQRGNQIMSDKRNVILFSVFDENRSWYLTENIQRFLPNPAGVQLEDPEFQASNIMHSINGYVFDSLQLSVCLHEVAYWYILSIGAQTDFLSVFFSGYTFKHKMVYEDTLTLFPFSGETVFMSMENPGLWILGCHNSDFRNRGMTALLKVSSCDKNTGDYYEDSYEDISAYLLSKNNAIEPRSFSQNPPVLKRHQREITRTTLQSDQEEIDYDDTISVEMKKEDFDIYDEDENQSPRSFQKKTRHYFIAAVERLWDYGMSSSPHVLRNRAQSGSVPQFKKVVFQEFTDGSFTQPLYRGELNEHLGLLGPYIRAEVEDNIMVTFRNQASRPYSFYSSLISYEEDQRQGAEPRKNFVKPNETKTYFWKVQHHMAPTKDEFDCKAWAYFSDVDLEKDVHSGLIGPLLVCHTNTLNPAHGRQVTVQEFALFFTIFDETKSWYFTENMERNCRAPCNIQMEDPTFKENYRFHAINGYIMDTLPGLVMAQDQRIRWYLLSMGSNENIHSIHFSGHVFTVRKKEEYKMALYNLYPGVFETVEMLPSKAGIWRVECLIGEHLHAGMSTLFLVYSNKCQTPLGMASGHIRDFQITASGQYGQWAPKLARLHYSGSINAWSTKEPFSWIKVDLLAPMIIHGIKTQGARQKFSSLYISQFIIMYSLDGKKWQTYRGNSTGTLMVFFGNVDSSGIKHNIFNPPIIARYIRLHPTHYSIRSTLRMELMGCDLNSCSMPLGMESKAISDAQITASSYFTNMFATWSPSKARLHLQGRSNAWRPQVNNPKEWLQVDFQKTMKVTGVTTQGVKSLLTSMYVKEFLISSSQDGHQWTLFFQNGKVKVFQGNQDSFTPVVNSLDPPLLTRYLRIHPQSWVHQIALRMEVLGCEAQDLYGAGSPGAETAEQKLISEEDLSPATGHHHHHH

SEQ ID NO: 858 - DNA, 5310 bp, synthetic construct
  misc_feature 1..5310: note = Description of Artificial Sequence: Synthetic polynucleotide
  source 1..5310: mol_type = other DNA
gccaccagaagatactacctgggtgcagtggaactgtcatgggactatatgcaaagtgatctcggtgagctgcctgtggacgcaagatttcctcctagagtgccaaaatcttttccattcggcgcgccaacatcagagagcgccacccctgaaagtggtcccgggagcgagccagccacatctgggtcggaaacgccaggcacaagtgagtctgcaactcccgagtccggacctggctccgagcctgccactagcggctccgagactccgggaacttccgagagcgctacaccagaaagcggacccggaaccagtaccgaacctagcgagggctctgctccgggcagcccagccggctctcctacatccacggaggagggcacttccgaatccgccaccccggagtcagggccaggatctgaacccgctacctcaggcagtgagacgccaggaacgagcgagtccgctacaccggagagtgggccagggagccctgctggatctcctacgtccactgaggaagggtcaccagcgggctcgcccaccagcactgaagaaggtgcctcgagcaacacctcagtcgtgtacaaaaagactctgtttgtagaattcacggatcaccttttcaacatcgctaagccaaggccaccctggatgggtctgctaggtcctaccatccaggctgaggtttatgatacagtggtcattacacttaagaacatggcttcccatcctgtcagtcttcatgctgttggtgtatcctactggaaagcttctgagggagctgaatatgatgatcagaccagtcaaagggagaaagaagatgataaagtcttccctggtggaagccatacatatgtctggcaggtcctgaaagagaatggtccaatggcctctgacccactgtgccttacctactcatatctttctcatgtggacctggtaaaagacttgaattcaggcctcattggagccctactagtatgtagagaagggagtctggccaaggaaaagacacagaccttgcacaaatttatactactttttgctgtatttgatgaagggaaaagttggcactcagaaacaaagaactccttgatgcaggatagggatgctgcatctgctcgggcctggcctaaaatgcacacagtcaatggttatgtaaacaggtctctgccaggtctgattggatgccacaggaaatcagtctattggcatgtgattggaatgggcaccactcctgaagtgcactcaatattcctcgaaggtcacacatttcttgtgaggaaccatcgccaggctagcttggaaatctcgccaataactttccttactgctcaaacactcttgatggaccttggacagtttctactgttttgtcatatctcttcccaccaacatgatggcatggaagcttatgtcaaagtagacagctgtccagaggaaccccaactacgaatgaaaaataatgaagaagcggaagactatgatgatgatcttactgattctgaaatggatgtggtcaggtttgatgatgacaactctccttcctttatccaaattcgctcagttgccaagaagcatcctaaaacttgggtacattacattgctgctgaagaggaggactgggactatgctcccttagtcctcgcccccgatggcgcgccaaccagtacggagccgtccgaggggagcgcaccaggaagcccggctgggagcccgacttctaccgaagagggtacatctaccgaaccaagtgaaggttcagcaccaggcacctcaacagaaccctctgagggctcggcgcctggtacaagtgagtccgccaccccagaatccgggcctgggacaagcacagaaccttcggaagggagtgcccctggaacatccgaatcggcaaccccagaatcagggccaggatctgagcccgcgacttcgggctccgagacgcctgggacatccaccgagccctccgaaggatcagccccaggcaccagcacggagccctctgagggaagcgcacctggtaccagcgaaagcgcaactcccgaatcaggtcccggtacgagcgagtcggcgaccccggagagcgggccaggtgcctcgagcgacagaagttataaaagtcaatatttgaacaatggccctcagcggattggtaggaagtacaaaaaagtccgatttatggcatacacagatgaaacctttaagactcgtgaagctattcagcatgaatcaggaatcttgggacctttactttatggggaagttggagacacactgttgattatatttaagaatcaagcaagcagaccatataacatctaccctcacggaatcactgatgtccgtcctttgtattcaaggagattaccaaaaggtgtaaaacatttgaaggattttccaattctgccaggagaaatattcaaatataaatggacagtgactgtagaagatgggccaactaaatcagatcctcggtgcctgacccgctattactctagtttcgttaatatggagagagatctagcttcaggactcattggccctctcctcatctgctacaaagaatctgtagatcaaagaggaaaccagataatgtcagacaagaggaatgtcatcctgttttctgtatttgatgagaaccgaagctggtacctcacagagaatatacaacgctttctccccaatccagctggagtgcagcttgaggatccagagttccaagcctccaacatcatgcacagcatcaatggctatgtttttgatagtttgcagttgtcagtttgtttgcatgaggtggcatactggtacattctaagcattggagcacagactgacttcctttctgtcttcttctctggatataccttcaaacacaaaatggtctatgaagacacactcaccctattcccattctcaggagaaactgtcttcatgtcgatggaaaacccaggtctatggattctggggtgccacaactcagactttcggaacagaggcatgaccgccttactgaaggtttctagttgtgacaagaacactggtgattattacgaggacagttatgaagatatttcagcatacttgctgagtaaaaacaatgccattgaaccaagaagcttctctcaaaacccaccagtcttgaaacgccatcaacgggaaataactcgtactactcttcagtcagatcaagaggaaatcgattatgatgataccatatcagttgaaatgaagaaggaagattttgacatttatgatgaggatgaaaatcagagcccccgcagctttcaaaagaaaacacgacactattttattgctgcagtggagaggctctgggattatgggatgagtagctccccacatgttctaagaaacagggctcagagtggcagtgtccctcagttcaagaaagttgttttccaggaatttactgatggctcctttactcagcccttataccgtggagaactaaatgaacatttgggactcctggggccatatataagagcagaagttgaagataatatcatggtaactttcagaaatcaggcctctcgtccctattccttctattctagccttatttcttatgaggaagatcagaggcaaggagcagaacctagaaaaaactttgtcaagcctaatgaaaccaaaacttacttttggaaagtgcaacatcatatggcacccactaaagatgagtttgactgcaaagcctgggcttatttctctgatgttgacctggaaaaagatgtgcactcaggcctgattggaccccttctggtctgccacactaacacactgaaccctgctcatgggagacaagtgacagtacaggaatttgctctgtttttcaccatctttgatgagaccaaaagctggtacttcactgaaaatatggaaagaaactgcagggctccctgcaatatccagatggaagatcccacttttaaagagaattatcgcttccatgcaatcaatggctacataatggatacactacctggcttagtaatggctcaggatcaaaggattcgatggtatctgctcagcatgggcagcaatgaaaacatccattctattcatttcagtggacatgtgttcactgtacgaaaaaaagaggagtataaaatggcactgtacaatctctatccaggtgtttttgagacagtggaaatgttaccatccaaagctggaatttggcgggtggaatgccttattggcgagcatctacatgctgggatgagcacactttttctggtgtacagcaataagtgtcagactcccctgggaatggcttctggacacattagagattttcagattacagcttcaggacaatatggacagtgggccccaaagctggccagacttcattattccggatcaatcaatgcctggagcaccaaggagcccttttcttggatcaaggtggatctgttggcaccaatgattattcacggcatcaagacccagggtgcccgtcagaagttctccagcctctacatctctcagtttatcatcatgtatagtcttgatgggaagaagtggcagacttatcgaggaaattccactggaaccttaatggtcttctttggcaatgtggattcatctgggataaaacacaatatttttaaccctccaattattgctcgatacatccgtttgcacccaactcattatagcattcgcagcactcttcgcatggagttgatgggctgtgatttaaatagttgcagcatgccattgggaatggagagtaaagcaatatcagatgcacagattactgcttcatcctactttaccaatatgtttgccacctggtctccttcaaaagctcgacttcacctccaagggaggagtaatgcctggagacctcaggtgaataatccaaaagagtggctgcaagtggacttccagaagacaatgaaagtcacaggagtaactactcagggagtaaaatctctgcttaccagcatgtatgtgaaggagttcctcatctccagcagtcaagatggccatcagtggactctcttttttcagaatggcaaagtaaaggtttttcagggaaatcaagactccttcacacctgtggtgaactctctagacccaccgttactgactcgctaccttcgaattcacccccagagttgggtgcaccagattgccctgaggatggaggttctgggctgcgaggcacaggacctctacggcgccggatcacctggggccgaaacggccgaacaaaaactcatctcagaagaggatctgtcacctgcaaccggtcatcatcaccatcaccattga

SEQ ID NO: 859 - protein, 1769 aa, synthetic construct
  REGION 1..1769: note = Description of Artificial Sequence: Synthetic polypeptide
ATRRYYLGAVELSWDYMQGAPTSESATPESGPGSEPATSGSETPGTSESATPESGPGSEPATSGSETPGTSESATPESGPGTSTEPSEGSAPGSPAGSPTSTEEGTSESATPESGPGSEPATSGSETPGTSESATPESGPGSPAGSPTSTEEGSPAGSPTSTEEGASSSDLGELPVDARFPPRVPKSFPFNTSVVYKKTLFVEFTDHLFNIAKPRPPWMGLLGPTIQAEVYDTVVITLKNMASHPVSLHAVGVSYWKASEGAEYDDQTSQREKEDDKVFPGGSHTYVWQVLKENGPMASDPLCLTYSYLSHVDLVKDLNSGLIGALLVCREGSLAKEKTQTLHKFILLFAVFDEGKSWHSETKNSLMQDRDAASARAWPKMHTVNGYVNRSLPGLIGCHRKSVYWHVIGMGTTPEVHSIFLEGHTFLVRNHRQASLEISPITFLTAQTLLMDLGQFLLFCHISSHQHDGMEAYVKVDSCPEEPQLRMKNNEEAEDYDDDLTDSEMDVVRFDDDNSPSFIQIRSVAKKHPKTWVHYIAAEEEDWDYAPLVLAPDGAPTSTEPSEGSAPGSPAGSPTSTEEGTSTEPSEGSAPGTSTEPSEGSAPGTSESATPESGPGTSTEPSEGSAPGTSESATPESGPGSEPATSGSETPGTSTEPSEGSAPGTSTEPSEGSAPGTSESATPESGPGTSESATPESGPGASSDRSYKSQYLNNGPQRIGRKYKKVRFMAYTDETFKTREAIQHESGILGPLLYGEVGDTLLIIFKNQASRPYNIYPHGITDVRPLYSRRLPKGVKHLKDFPILPGEIFKYKWTVTVEDGPTKSDPRCLTRYYSSFVNMERDLASGLIGPLLICYKESVDQRGNQIMSDKRNVILFSVFDENRSWYLTENIQRFLPNPAGVQLEDPEFQASNIMHSINGYVFDSLQLSVCLHEVAYWYILSIGAQTDFLSVFFSGYTFKHKMVYEDTLTLFPFSGETVFMSMENPGLWILGCHNSDFRNRGMTALLKVSSCDKNTGDYYEDSYEDISAYLLSKNNAIEPRSFSQNPPVLKRHQREITRTTLQSDQEEIDYDDTISVEMKKEDFDIYDEDENQSPRSFQKKTRHYFIAAVERLWDYGMSSSPHVLRNRAQSGSVPQFKKVVFQEFTDGSFTQPLYRGELNEHLGLLGPYIRAEVEDNIMVTFRNQASRPYSFYSSLISYEEDQRQGAEPRKNFVKPNETKTYFWKVQHHMAPTKDEFDCKAWAYFSDVDLEKDVHSGLIGPLLVCHTNTLNPAHGRQVTVQEFALFFTIFDETKSWYFTENMERNCRAPCNIQMEDPTFKENYRFHAINGYIMDTLPGLVMAQDQRIRWYLLSMGSNENIHSIHFSGHVFTVRKKEEYKMALYNLYPGVFETVEMLPSKAGIWRVECLIGEHLHAGMSTLFLVYSNKCQTPLGMASGHIRDFQITASGQYGQWAPKLARLHYSGSINAWSTKEPFSWIKVDLLAPMIIHGIKTQGARQKFSSLYISQFIIMYSLDGKKWQTYRGNSTGTLMVFFGNVDSSGIKHNIFNPPIIARYIRLHPTHYSIRSTLRMELMGCDLNSCSMPLGMESKAISDAQITASSYFTNMFATWSPSKARLHLQGRSNAWRPQVNNPKEWLQVDFQKTMKVTGVTTQGVKSLLTSMYVKEFLISSSQDGHQWTLFFQNGKVKVFQGNQDSFTPVVNSLDPPLLTRYLRIHPQSWVHQIALRMEVLGCEAQDLYGAGSPGAETAEQKLISEEDLSPATGHHHHHH

SEQ ID NO: 860 - DNA, 5310 bp, synthetic construct
  misc_feature 1..5310: note = Description of Artificial Sequence: Synthetic polynucleotide
  source 1..5310: mol_type = other DNA
gccaccagaagatactacctgggtgcagtggaactgtcatgggactatatgcaaggcgcgccaacatcagagagcgccacccctgaaagtggtcccgggagcgagccagccacatctgggtcggaaacgccaggcacaagtgagtctgcaactcccgagtccggacctggctccgagcctgccactagcggctccgagactccgggaacttccgagagcgctacaccagaaagcggacccggaaccagtaccgaacctagcgagggctctgctccgggcagcccagccggctctcctacatccacggaggagggcacttccgaatccgccaccccggagtcagggccaggatctgaacccgctacctcaggcagtgagacgccaggaacgagcgagtccgctacaccggagagtgggccagggagccctgctggatctcctacgtccactgaggaagggtcaccagcgggctcgcccaccagcactgaagaaggtgcctcgagcagtgatctcggtgagctgcctgtggacgcaagatttcctcctagagtgccaaaatcttttccattcaacacctcagtcgtgtacaaaaagactctgtttgtagaattcacggatcaccttttcaacatcgctaagccaaggccaccctggatgggtctgctaggtcctaccatccaggctgaggtttatgatacagtggtcattacacttaagaacatggcttcccatcctgtcagtcttcatgctgttggtgtatcctactggaaagcttctgagggagctgaatatgatgatcagaccagtcaaagggagaaagaagatgataaagtcttccctggtggaagccatacatatgtctggcaggtcctgaaagagaatggtccaatggcctctgacccactgtgccttacctactcatatctttctcatgtggacctggtaaaagacttgaattcaggcctcattggagccctactagtatgtagagaagggagtctggccaaggaaaagacacagaccttgcacaaatttatactactttttgctgtatttgatgaagggaaaagttggcactcagaaacaaagaactccttgatgcaggatagggatgctgcatctgctcgggcctggcctaaaatgcacacagtcaatggttatgtaaacaggtctctgccaggtctgattggatgccacaggaaatcagtctattggcatgtgattggaatgggcaccactcctgaagtgcactcaatattcctcgaaggtcacacatttcttgtgaggaaccatcgccaggctagcttggaaatctcgccaataactttccttactgctcaaacactcttgatggaccttggacagtttctactgttttgtcatatctcttcccaccaacatgatggcatggaagcttatgtcaaagtagacagctgtccagaggaaccccaactacgaatgaaaaataatgaagaagcggaagactatgatgatgatcttactgattctgaaatggatgtggtcaggtttgatgatgacaactctccttcctttatccaaattcgctcagttgccaagaagcatcctaaaacttgggtacattacattgctgctgaagaggaggactgggactatgctcccttagtcctcgcccccgatggcgcgccaaccagtacggagccgtccgaggggagcgcaccaggaagcccggctgggagcccgacttctaccgaagagggtacatctaccgaaccaagtgaaggttcagcaccaggcacctcaacagaaccctctgagggctcggcgcctggtacaagtgagtccgccaccccagaatccgggcctgggacaagcacagaaccttcggaagggagtgcccctggaacatccgaatcggcaaccccagaatcagggccaggatctgagcccgcgacttcgggctccgagacgcctgggacatccaccgagccctccgaaggatcagccccaggcaccagcacggagccctctgagggaagcgcacctggtaccagcgaaagcgcaactcccgaatcaggtcccggtacgagcgagtcggcgaccccggagagcgggccaggtgcctcgagcgacagaagttataaaagtcaatatttgaacaatggccctcagcggattggtaggaagtacaaaaaagtccgatttatggcatacacagatgaaacctttaagactcgtgaagctattcagcatgaatcaggaatcttgggacctttactttatggggaagttggagacacactgttgattatatttaagaatcaagcaagcagaccatataacatctaccctcacggaatcactgatgtccgtcctttgtattcaaggagattaccaaaaggtgtaaaacatttgaaggattttccaattctgccaggagaaatattcaaatataaatggacagtgactgtagaagatgggccaactaaatcagatcctcggtgcctgacccgctattactctagtttcgttaatatggagagagatctagcttcaggactcattggccctctcctcatctgctacaaagaatctgtagatcaaagaggaaaccagataatgtcagacaagaggaatgtcatcctgttttctgtatttgatgagaaccgaagctggtacctcacagagaatatacaacgctttctccccaatccagctggagtgcagcttgaggatccagagttccaagcctccaacatcatgcacagcatcaatggctatgtttttgatagtttgcagttgtcagtttgtttgcatgaggtggcatactggtacattctaagcattggagcacagactgacttcctttctgtcttcttctctggatataccttcaaacacaaaatggtctatgaagacacactcaccctattcccattctcaggagaaactgtcttcatgtcgatggaaaacccaggtctatggattctggggtgccacaactcagactttcggaacagaggcatgaccgccttactgaaggtttctagttgtgacaagaacactggtgattattacgaggacagttatgaagatatttcagcatacttgctgagtaaaaacaatgccattgaaccaagaagcttctctcaaaacccaccagtcttgaaacgccatcaacgggaaataactcgtactactcttcagtcagatcaagaggaaatcgattatgatgataccatatcagttgaaatgaagaaggaagattttgacatttatgatgaggatgaaaatcagagcccccgcagctttcaaaagaaaacacgacactattttattgctgcagtggagaggctctgggattatgggatgagtagctccccacatgttctaagaaacagggctcagagtggcagtgtccctcagttcaagaaagttgttttccaggaatttactgatggctcctttactcagcccttataccgtggagaactaaatgaacatttgggactcctggggccatatataagagcagaagttgaagataatatcatggtaactttcagaaatcaggcctctcgtccctattccttctattctagccttatttcttatgaggaagatcagaggcaaggagcagaacctagaaaaaactttgtcaagcctaatgaaaccaaaacttacttttggaaagtgcaacatcatatggcacccactaaagatgagtttgactgcaaagcctgggcttatttctctgatgttgacctggaaaaagatgtgcactcaggcctgattggaccccttctggtctgccacactaacacactgaaccctgctcatgggagacaagtgacagtacaggaatttgctctgtttttcaccatctttgatgagaccaaaagctggtacttcactgaaaatatggaaagaaactgcagggctccctgcaatatccagatggaagatcccacttttaaagagaattatcgcttccatgcaatcaatggctacataatggatacactacctggcttagtaatggctcaggatcaaaggattcgatggtatctgctcagcatgggcagcaatgaaaacatccattctattcatttcagtggacatgtgttcactgtacgaaaaaaagaggagtataaaatggcactgtacaatctctatccaggtgtttttgagacagtggaaatgttaccatccaaagctggaatttggcgggtggaatgccttattggcgagcatctacatgctgggatgagcacactttttctggtgtacagcaataagtgtcagactcccctgggaatggcttctggacacattagagattttcagattacagcttcaggacaatatggacagtgggccccaaagctggccagacttcattattccggatcaatcaatgcctggagcaccaaggagcccttttcttggatcaaggtggatctgttggcaccaatgattattcacggcatcaagacccagggtgcccgtcagaagttctccagcctctacatctctcagtttatcatcatgtatagtcttgatgggaagaagtggcagacttatcgaggaaattccactggaaccttaatggtcttctttggcaatgtggattcatctgggataaaacacaatatttttaaccctccaattattgctcgatacatccgtttgcacccaactcattatagcattcgcagcactcttcgcatggagttgatgggctgtgatttaaatagttgcagcatgccattgggaatggagagtaaagcaatatcagatgcacagattactgcttcatcctactttaccaatatgtttgccacctggtctccttcaaaagctcgacttcacctccaagggaggagtaatgcctggagacctcaggtgaataatccaaaagagtggctgcaagtggacttccagaagacaatgaaagtcacaggagtaactactcagggagtaaaatctctgcttaccagcatgtatgtgaaggagttcctcatctccagcagtcaagatggccatcagtggactctcttttttcagaatggcaaagtaaaggtttttcagggaaatcaagactccttcacacctgtggtgaactctctagacccaccgttactgactcgctaccttcgaattcacccccagagttgggtgcaccagattgccctgaggatggaggttctgggctgcgaggcacaggacctctacggcgccggatcacctggggccgaaacggccgaacaaaaactcatctcagaagaggatctgtcacctgcaaccggtcatcatcaccatcaccattga

SEQ ID NO: 861 - protein, 1769 aa, synthetic construct
  REGION 1..1769: note = Description of Artificial Sequence: Synthetic polypeptide
ATRRYYLGAVELSWDYMQSDLGELPVGAPTSESATPESGPGSEPATSGSETPGTSESATPESGPGSEPATSGSETPGTSESATPESGPGTSTEPSEGSAPGSPAGSPTSTEEGTSESATPESGPGSEPATSGSETPGTSESATPESGPGSPAGSPTSTEEGSPAGSPTSTEEGASSDARFPPRVPKSFPFNTSVVYKKTLFVEFTDHLFNIAKPRPPWMGLLGPTIQAEVYDTVVITLKNMASHPVSLHAVGVSYWKASEGAEYDDQTSQREKEDDKVFPGGSHTYVWQVLKENGPMASDPLCLTYSYLSHVDLVKDLNSGLIGALLVCREGSLAKEKTQTLHKFILLFAVFDEGKSWHSETKNSLMQDRDAASARAWPKMHTVNGYVNRSLPGLIGCHRKSVYWHVIGMGTTPEVHSIFLEGHTFLVRNHRQASLEISPITFLTAQTLLMDLGQFLLFCHISSHQHDGMEAYVKVDSCPEEPQLRMKNNEEAEDYDDDLTDSEMDVVRFDDDNSPSFIQIRSVAKKHPKTWVHYIAAEEEDWDYAPLVLAPDDRSYKSQYLNNGPQRIGRKYKKVRFMAYTDETFKTREAIQHESGILGPLLYGEVGDTLLIIFKNQASRPYNIYPHGITDVRPLYSRRLPKGVKHLKDFPILPGEIFKYKWTVTVEDGPTKSDPRCLTRYYSSFVNMERDLASGLIGPLLICYKESVDQRGNQIMSDKRNVILFSVFDENRSWYLTENIQRFLPNPAGAPTSTEPSEGSAPGSPAGSPTSTEEGTSTEPSEGSAPGTSTEPSEGSAPGTSESATPESGPGTSTEPSEGSAPGTSESATPESGPGSEPATSGSETPGTSTEPSEGSAPGTSTEPSEGSAPGTSESATPESGPGTSESATPESGPGASSGVQLEDPEFQASNIMHSINGYVFDSLQLSVCLHEVAYWYILSIGAQTDFLSVFFSGYTFKHKMVYEDTLTLFPFSGETVFMSMENPGLWILGCHNSDFRNRGMTALLKVSSCDKNTGDYYEDSYEDISAYLLSKNNAIEPRSFSQNPPVLKRHQREITRTTLQSDQEEIDYDDTISVEMKKEDFDIYDEDENQSPRSFQKKTRHYFIAAVERLWDYGMSSSPHVLRNRAQSGSVPQFKKVVFQEFTDGSFTQPLYRGELNEHLGLLGPYIRAEVEDNIMVTFRNQASRPYSFYSSLISYEEDQRQGAEPRKNFVKPNETKTYFWKVQHHMAPTKDEFDCKAWAYFSDVDLEKDVHSGLIGPLLVCHTNTLNPAHGRQVTVQEFALFFTIFDETKSWYFTENMERNCRAPCNIQMEDPTFKENYRFHAINGYIMDTLPGLVMAQDQRIRWYLLSMGSNENIHSIHFSGHVFTVRKKEEYKMALYNLYPGVFETVEMLPSKAGIWRVECLIGEHLHAGMSTLFLVYSNKCQTPLGMASGHIRDFQITASGQYGQWAPKLARLHYSGSINAWSTKEPFSWIKVDLLAPMIIHGIKTQGARQKFSSLYISQFIIMYSLDGKKWQTYRGNSTGTLMVFFGNVDSSGIKHNIFNPPIIARYIRLHPTHYSIRSTLRMELMGCDLNSCSMPLGMESKAISDAQITASSYFTNMFATWSPSKARLHLQGRSNAWRPQVNNPKEWLQVDFQKTMKVTGVTTQGVKSLLTSMYVKEFLISSSQDGHQWTLFFQNGKVKVFQGNQDSFTPVVNSLDPPLLTRYLRIHPQSWVHQIALRMEVLGCEAQDLYGAGSPGAETAEQKLISEEDLSPATGHHHHHH

SEQ ID NO: 862 - DNA, 5310 bp, synthetic construct
  misc_feature 1..5310: note = Description of Artificial Sequence: Synthetic polynucleotide
  source 1..5310: mol_type = other DNA
gccaccagaagatactacctgggtgcagtggaactgtcatgggactatatgcaaagtgatctcggtgagctgcctgtgggcgcgccaacatcagagagcgccacccctgaaagtggtcccgggagcgagccagccacatctgggtcggaaacgccaggcacaagtgagtctgcaactcccgagtccggacctggctccgagcctgccactagcggctccgagactccgggaacttccgagagcgctacaccagaaagcggacccggaaccagtaccgaacctagcgagggctctgctccgggcagcccagccggctctcctacatccacggaggagggcacttccgaatccgccaccccggagtcagggccaggatctgaacccgctacctcaggcagtgagacgccaggaacgagcgagtccgctacaccggagagtgggccagggagccctgctggatctcctacgtccactgaggaagggtcaccagcgggctcgcccaccagcactgaagaaggtgcctcgagcgacgcaagatttcctcctagagtgccaaaatcttttccattcaacacctcagtcgtgtacaaaaagactctgtttgtagaattcacggatcaccttttcaacatcgctaagccaaggccaccctggatgggtctgctaggtcctaccatccaggctgaggtttatgatacagtggtcattacacttaagaacatggcttcccatcctgtcagtcttcatgctgttggtgtatcctactggaaagcttctgagggagctgaatatgatgatcagaccagtcaaagggagaaagaagatgataaagtcttccctggtggaagccatacatatgtctggcaggtcctgaaagagaatggtccaatggcctctgacccactgtgccttacctactcatatctttctcatgtggacctggtaaaagacttgaattcaggcctcattggagccctactagtatgtagagaagggagtctggccaaggaaaagacacagaccttgcacaaatttatactactttttgctgtatttgatgaagggaaaagttggcactcagaaacaaagaactccttgatgcaggatagggatgctgcatctgctcgggcctggcctaaaatgcacacagtcaatggttatgtaaacaggtctctgccaggtctgattggatgccacaggaaatcagtctattggcatgtgattggaatgggcaccactcctgaagtgcactcaatattcctcgaaggtcacacatttcttgtgaggaaccatcgccaggctagcttggaaatctcgccaataactttccttactgctcaaacactcttgatggaccttggacagtttctactgttttgtcatatctcttcccaccaacatgatggcatggaagcttatgtcaaagtagacagctgtccagaggaaccccaactacgaatgaaaaataatgaagaagcggaagactatgatgatgatcttactgattctgaaatggatgtggtcaggtttgatgatgacaactctccttcctttatccaaattcgctcagttgccaagaagcatcctaaaacttgggtacattacattgctgctgaagaggaggactgggactatgctcccttagtcctcgcccccgatgacagaagttataaaagtcaatatttgaacaatggccctcagcggattggtaggaagtacaaaaaagtccgatttatggcatacacagatgaaacctttaagactcgtgaagctattcagcatgaatcaggaatcttgggacctttactttatggggaagttggagacacactgttgattatatttaagaatcaagcaagcagaccatataacatctaccctcacggaatcactgatgtccgtcctttgtattcaaggagattaccaaaaggtgtaaaacatttgaaggattttccaattctgccaggagaaatattcaaatataaatggacagtgactgtagaagatgggccaactaaatcagatcctcggtgcctgacccgctattactctagtttcgttaatatggagagagatctagcttcaggactcattggccctctcctcatctgctacaaagaatctgtagatcaaagaggaaaccagataatgtcagacaagaggaatgtcatcctgttttctgtatttgatgagaaccgaagctggtacctcacagagaatatacaacgctttctccccaatccagctggcgcgccaaccagtacggagccgtccgaggggagcgcaccaggaagcccggctgggagcccgacttctaccgaagagggtacatctaccgaaccaagtgaaggttcagcaccaggcacctcaacagaaccctctgagggctcggcgcctggtacaagtgagtccgccaccccagaatccgggcctgggacaagcacagaaccttcggaagggagtgcccctggaacatccgaatcggcaaccccagaatcagggccaggatctgagcccgcgacttcgggctccgagacgcctgggacatccaccgagccctccgaaggatcagccccaggcaccagcacggagccctctgagggaagcgcacctggtaccagcgaaagcgcaactcccgaatcaggtcccggtacgagcgagtcggcgaccccggagagcgggccaggtgcctcgagcggagtgcagcttgaggatccagagttccaagcctccaacatcatgcacagcatcaatggctatgtttttgatagtttgcagttgtcagtttgtttgcatgaggtggcatactggtacattctaagcattggagcacagactgacttcctttctgtcttcttctctggatataccttcaaacacaaaatggtctatgaagacacactcaccctattcccattctcaggagaaactgtcttcatgtcgatggaaaacccaggtctatggattctggggtgccacaactcagactttcggaacagaggcatgaccgccttactgaaggtttctagttgtgacaagaacactggtgattattacgaggacagttatgaagatatttcagcatacttgctgagtaaaaacaatgccattgaaccaagaagcttctctcaaaacccaccagtcttgaaacgccatcaacgggaaataactcgtactactcttcagtcagatcaagaggaaatcgattatgatgataccatatcagttgaaatgaagaaggaagattttgacatttatgatgaggatgaaaatcagagcccccgcagctttcaaaagaaaacacgacactattttattgctgcagtggagaggctctgggattatgggatgagtagctccccacatgttctaagaaacagggctcagagtggcagtgtccctcagttcaagaaagttgttttccaggaatttactgatggctcctttactcagcccttataccgtggagaactaaatgaacatttgggactcctggggccatatataagagcagaagttgaagataatatcatggtaactttcagaaatcaggcctctcgtccctattccttctattctagccttatttcttatgaggaagatcagaggcaaggagcagaacctagaaaaaactttgtcaagcctaatgaaaccaaaacttacttttggaaagtgcaacatcatatggcacccactaaagatgagtttgactgcaaagcctgggcttatttctctgatgttgacctggaaaaagatgtgcactcaggcctgattggaccccttctggtctgccacactaacacactgaaccctgctcatgggagacaagtgacagtacaggaatttgctctgtttttcaccatctttgatgagaccaaaagctggtacttcactgaaaatatggaaagaaactgcagggctccctgcaatatccagatggaagatcccacttttaaagagaattatcgcttccatgcaatcaatggctacataatggatacactacctggcttagtaatggctcaggatcaaaggattcgatggtatctgctcagcatgggcagcaatgaaaacatccattctattcatttcagtggacatgtgttcactgtacgaaaaaaagaggagtataaaatggcactgtacaatctctatccaggtgtttttgagacagtggaaatgttaccatccaaagctggaatttggcgggtggaatgccttattggcgagcatctacatgctgggatgagcacactttttctggtgtacagcaataagtgtcagactcccctgggaatggcttctggacacattagagattttcagattacagcttcaggacaatatggacagtgggccccaaagctggccagacttcattattccggatcaatcaatgcctggagcaccaaggagcccttttcttggatcaaggtggatctgttggcaccaatgattattcacggcatcaagacccagggtgcccgtcagaagttctccagcctctacatctctcagtttatcatcatgtatagtcttgatgggaagaagtggcagacttatcgaggaaattccactggaaccttaatggtcttctttggcaatgtggattcatctgggataaaacacaatatttttaaccctccaattattgctcgatacatccgtttgcacccaactcattatagcattcgcagcactcttcgcatggagttgatgggctgtgatttaaatagttgcagcatgccattgggaatggagagtaaagcaatatcagatgcacagattactgcttcatcctactttaccaatatgtttgccacctggtctccttcaaaagctcgacttcacctccaagggaggagtaatgcctggagacctcaggtgaataatccaaaagagtggctgcaagtggacttccagaagacaatgaaagtcacaggagtaactactcagggagtaaaatctctgcttaccagcatgtatgtgaaggagttcctcatctccagcagtcaagatggccatcagtggactctcttttttcagaatggcaaagtaaaggtttttcagggaaatcaagactccttcacacctgtggtgaactctctagacccaccgttactgactcgctaccttcgaattcacccccagagttgggtgcaccagattgccctgaggatggaggttctgggctgcgaggcacaggacctctacggcgccggatcacctggggccgaaacggccgaacaaaaactcatctcagaagaggatctgtcacctgcaaccggtcatcatcaccatcaccattga

SEQ ID NO: 863 - protein, 1769 aa, synthetic construct
  REGION 1..1769: note = Description of Artificial Sequence: Synthetic polypeptide
ATRRYYLGAVELSWDYMQSDLGELPVDARFPPRVPKSFPFGAPGSSPSASTGTGPGSSPSASTGTGPGASPGTSSTGSPGASPGTSSTGSPGSSTPSGATGSPGSSPSASTGTGPGASPGTSSTGSPGSSPSASTGTGPGTPGSGTASSSPGSSTPSGATGSPGSSTPSGATGSPGASPGTSSTGSPASSNTSVVYKKTLFVEFTDHLFNIAKPRPPWMGLLGPTIQAEVYDTVVITLKNMASHPVSLHAVGVSYWKASEGAEYDDQTSQREKEDDKVFPGGSHTYVWQVLKENGPMASDPLCLTYSYLSHVDLVKDLNSGLIGALLVCREGSLAKEKTQTLHKFILLFAVFDEGKSWHSETKNSLMQDRDAASARAWPKMHTVNGYVNRSLPGLIGCHRKSVYWHVIGMGTTPEVHSIFLEGHTFLVRNHRQASLEISPITFLTAQTLLMDLGQFLLFCHISSHQHDGMEAYVKVDSCPEEPQLRMKNNEEAEDYDDDLTDSEMDVVRFDDDNSPSFIQIRSVAKKHPKTWVHYIAAEEEDWDYAPLVLAPDDRSYKSQYLNNGPQRIGRKYKKVRFMAYTDETFKTREAIQHESGILGPLLYGEVGDTLLIIFKNQASRPYNIYPHGITDVRPLYSRRLPKGVKHLKDFPILPGEIFKYKWTVTVEDGPTKSDPRCLTRYYSSFVNMERDLASGLIGPLLICYKESVDQRGNQIMSDKRNVILFSVFDENRSWYLTENIQRFLPNPAGAPTSTEPSEGSAPGSPAGSPTSTEEGTSTEPSEGSAPGTSTEPSEGSAPGTSESATPESGPGTSTEPSEGSAPGTSESATPESGPGSEPATSGSETPGTSTEPSEGSAPGTSTEPSEGSAPGTSESATPESGPGTSESATPESGPGASSGVQLEDPEFQASNIMHSINGYVFDSLQLSVCLHEVAYWYILSIGAQTDFLSVFFSGYTFKHKMVYEDTLTLFPFSGETVFMSMENPGLWILGCHNSDFRNRGMTALLKVSSCDKNTGDYYEDSYEDISAYLLSKNNAIEPRSFSQNPPVLKRHQREITRTTLQSDQEEIDYDDTISVEMKKEDFDIYDEDENQSPRSFQKKTRHYFIAAVERLWDYGMSSSPHVLRNRAQSGSVPQFKKVVFQEFTDGSFTQPLYRGELNEHLGLLGPYIRAEVEDNIMVTFRNQASRPYSFYSSLISYEEDQRQGAEPRKNFVKPNETKTYFWKVQHHMAPTKDEFDCKAWAYFSDVDLEKDVHSGLIGPLLVCHTNTLNPAHGRQVTVQEFALFFTIFDETKSWYFTENMERNCRAPCNIQMEDPTFKENYRFHAINGYIMDTLPGLVMAQDQRIRWYLLSMGSNENIHSIHFSGHVFTVRKKEEYKMALYNLYPGVFETVEMLPSKAGIWRVECLIGEHLHAGMSTLFLVYSNKCQTPLGMASGHIRDFQITASGQYGQWAPKLARLHYSGSINAWSTKEPFSWIKVDLLAPMIIHGIKTQGARQKFSSLYISQFIIMYSLDGKKWQTYRGNSTGTLMVFFGNVDSSGIKHNIFNPPIIARYIRLHPTHYSIRSTLRMELMGCDLNSCSMPLGMESKAISDAQITASSYFTNMFATWSPSKARLHLQGRSNAWRPQVNNPKEWLQVDFQKTMKVTGVTTQGVKSLLTSMYVKEFLISSSQDGHQWTLFFQNGKVKVFQGNQDSFTPVVNSLDPPLLTRYLRIHPQSWVHQIALRMEVLGCEAQDLYGAGSPGAETAEQKLISEEDLSPATGHHHHHH

SEQ ID NO: 864 - DNA, 5310 bp, synthetic construct
  misc_feature 1..5310: note = Description of Artificial Sequence: Synthetic polynucleotide
  source 1..5310: mol_type = other DNA
gccaccagaagatactacctgggtgcagtggaactgtcatgggactatatgcaaagtgatctcggtgagctgcctgtggacgcaagatttcctcctagagtgccaaaatcttttccattcggcgcgccaggctccagcccctccgcgagcacgggaaccggaccaggttcgtcaccctcagcatcaacggggacgggaccgggggcgtcaccaggaacgtcctccaccggctcgccgggtgcatcacccggaacgtcatcgaccggatcgccagggagctcgacgccatcaggcgcaacaggatcacctggctcaagccctagcgcgtcaaccggcacgggtccgggtgcctcccctggcacgtccagcaccggatcacccggatcgagcccatccgcctcaaccggaaccggacccggtacaccagggtcgggaacagcctcctcgtcaccaggctcctcaaccccctcgggagccacgggttcgcccggttcgtcaacgccttccggagcaactggtagccccggagcatcgccaggaacttcgagcacggggtcgcccgcctcgagcaacacctcagtcgtgtacaaaaagactctgtttgtagaattcacggatcaccttttcaacatcgctaagccaaggccaccctggatgggtctgctaggtcctaccatccaggctgaggtttatgatacagtggtcattacacttaagaacatggcttcccatcctgtcagtcttcatgctgttggtgtatcctactggaaagcttctgagggagctgaatatgatgatcagaccagtcaaagggagaaagaagatgataaagtcttccctggtggaagccatacatatgtctggcaggtcctgaaagagaatggtccaatggcctctgacccactgtgccttacctactcatatctttctcatgtggacctggtaaaagacttgaattcaggcctcattggagccctactagtatgtagagaagggagtctggccaaggaaaagacacagaccttgcacaaatttatactactttttgctgtatttgatgaagggaaaagttggcactcagaaacaaagaactccttgatgcaggatagggatgctgcatctgctcgggcctggcctaaaatgcacacagtcaatggttatgtaaacaggtctctgccaggtctgattggatgccacaggaaatcagtctattggcatgtgattggaatgggcaccactcctgaagtgcactcaatattcctcgaaggtcacacatttcttgtgaggaaccatcgccaggctagcttggaaatctcgccaataactttccttactgctcaaacactcttgatggaccttggacagtttctactgttttgtcatatctcttcccaccaacatgatggcatggaagcttatgtcaaagtagacagctgtccagaggaaccccaactacgaatgaaaaataatgaagaagcggaagactatgatgatgatcttactgattctgaaatggatgtggtcaggtttgatgatgacaactctccttcctttatccaaattcgctcagttgccaagaagcatcctaaaacttgggtacattacattgctgctgaagaggaggactgggactatgctcccttagtcctcgcccccgatgacagaagttataaaagtcaatatttgaacaatggccctcagcggattggtaggaagtacaaaaaagtccgatttatggcatacacagatgaaacctttaagactcgtgaagctattcagcatgaatcaggaatcttgggacctttactttatggggaagttggagacacactgttgattatatttaagaatcaagcaagcagaccatataacatctaccctcacggaatcactgatgtccgtcctttgtattcaaggagattaccaaaaggtgtaaaacatttgaaggattttccaattctgccaggagaaatattcaaatataaatggacagtgactgtagaagatgggccaactaaatcagatcctcggtgcctgacccgctattactctagtttcgttaatatggagagagatctagcttcaggactcattggccctctcctcatctgctacaaagaatctgtagatcaaagaggaaaccagataatgtcagacaagaggaatgtcatcctgttttctgtatttgatgagaaccgaagctggtacctcacagagaatatacaacgctttctccccaatccagctggcgcgccaaccagtacggagccgtccgaggggagcgcaccaggaagcccggctgggagcccgacttctaccgaagagggtacatctaccgaaccaagtgaaggttcagcaccaggcacctcaacagaaccctctgagggctcggcgcctggtacaagtgagtccgccaccccagaatccgggcctgggacaagcacagaaccttcggaagggagtgcccctggaacatccgaatcggcaaccccagaatcagggccaggatctgagcccgcgacttcgggctccgagacgcctgggacatccaccgagccctccgaaggatcagccccaggcaccagcacggagccctctgagggaagcgcacctggtaccagcgaaagcgcaactcccgaatcaggtcccggtacgagcgagtcggcgaccccggagagcgggccaggtgcctcgagcggagtgcagcttgaggatccagagttccaagcctccaacatcatgcacagcatcaatggctatgtttttgatagtttgcagttgtcagtttgtttgcatgaggtggcatactggtacattctaagcattggagcacagactgacttcctttctgtcttcttctctggatataccttcaaacacaaaatggtctatgaagacacactcaccctattcccattctcaggagaaactgtcttcatgtcgatggaaaacccaggtctatggattctggggtgccacaactcagactttcggaacagaggcatgaccgccttactgaaggtttctagttgtgacaagaacactggtgattattacgaggacagttatgaagatatttcagcatacttgctgagtaaaaacaatgccattgaaccaagaagcttctctcaaaacccaccagtcttgaaacgccatcaacgggaaataactcgtactactcttcagtcagatcaagaggaaatcgattatgatgataccatatcagttgaaatgaagaaggaagattttgacatttatgatgaggatgaaaatcagagcccccgcagctttcaaaagaaaacacgacactattttattgctgcagtggagaggctctgggattatgggatgagtagctccccacatgttctaagaaacagggctcagagtggcagtgtccctcagttcaagaaagttgttttccaggaatttactgatggctcctttactcagcccttataccgtggagaactaaatgaacatttgggactcctggggccatatataagagcagaagttgaagataatatcatggtaactttcagaaatcaggcctctcgtccctattccttctattctagccttatttcttatgaggaagatcagaggcaaggagcagaacctagaaaaaactttgtcaagcctaatgaaaccaaaacttacttttggaaagtgcaacatcatatggcacccactaaagatgagtttgactgcaaagcctgggcttatttctctgatgttgacctggaaaaagatgtgcactcaggcctgattggaccccttctggtctgccacactaacacactgaaccctgctcatgggagacaagtgacagtacaggaatttgctctgtttttcaccatctttgatgagaccaaaagctggtacttcactgaaaatatggaaagaaactgcagggctccctgcaatatccagatggaagatcccacttttaaagagaattatcgcttccatgcaatcaatggctacataatggatacactacctggcttagtaatggctcaggatcaaaggattcgatggtatctgctcagcatgggcagcaatgaaaacatccattctattcatttcagtggacatgtgttcactgtacgaaaaaaagaggagtataaaatggcactgtacaatctctatccaggtgtttttgagacagtggaaatgttaccatccaaagctggaatttggcgggtggaatgccttattggcgagcatctacatgctgggatgagcacactttttctggtgtacagcaataagtgtcagactcccctgggaatggcttctggacacattagagattttcagattacagcttcaggacaatatggacagtgggccccaaagctggccagacttcattattccggatcaatcaatgcctggagcaccaaggagcccttttcttggatcaaggtggatctgttggcaccaatgattattcacggcatcaagacccagggtgcccgtcagaagttctccagcctctacatctctcagtttatcatcatgtatagtcttgatgggaagaagtggcagacttatcgaggaaattccactggaaccttaatggtcttctttggcaatgtggattcatctgggataaaacacaatatttttaaccctccaattattgctcgatacatccgtttgcacccaactcattatagcattcgcagcactcttcgcatggagttgatgggctgtgatttaaatagttgcagcatgccattgggaatggagagtaaagcaatatcagatgcacagattactgcttcatcctactttaccaatatgtttgccacctggtctccttcaaaagctcgacttcacctccaagggaggagtaatgcctggagacctcaggtgaataatccaaaagagtggctgcaagtggacttccagaagacaatgaaagtcacaggagtaactactcagggagtaaaatctctgcttaccagcatgtatgtgaaggagttcctcatctccagcagtcaagatggccatcagtggactctcttttttcagaatggcaaagtaaaggtttttcagggaaatcaagactccttcacacctgtggtgaactctctagacccaccgttactgactcgctaccttcgaattcacccccagagttgggtgcaccagattgccctgaggatggaggttctgggctgcgaggcacaggacctctacggcgccggatcacctggggccgaaacggccgaacaaaaactcatctcagaagaggatctgtcacctgcaaccggtcatcatcaccatcaccattga

SEQ ID NO: 865 - protein, 1769 aa, synthetic construct
  REGION 1..1769: note = Description of Artificial Sequence: Synthetic polypeptide
ATRRYYLGAVELSWDYMQSDLGELPVGAPGSSPSASTGTGPGSSPSASTGTGPGASPGTSSTGSPGASPGTSSTGSPGSSTPSGATGSPGSSPSASTGTGPGASPGTSSTGSPGSSPSASTGTGPGTPGSGTASSSPGSSTPSGATGSPGSSTPSGATGSPGASPGTSSTGSPASSDARFPPRVPKSFPFNTSVVYKKTLFVEFTDHLFNIAKPRPPWMGLLGPTIQAEVYDTVVITLKNMASHPVSLHAVGVSYWKASEGAEYDDQTSQREKEDDKVFPGGSHTYVWQVLKENGPMASDPLCLTYSYLSHVDLVKDLNSGLIGALLVCREGSLAKEKTQTLHKFILLFAVFDEGKSWHSETKNSLMQDRDAASARAWPKMHTVNGYVNRSLPGLIGCHRKSVYWHVIGMGTTPEVHSIFLEGHTFLVRNHRQASLEISPITFLTAQTLLMDLGQFLLFCHISSHQHDGMEAYVKVDSCPEEPQLRMKNNEEAEDYDDDLTDSEMDVVRFDDDNSPSFIQIRSVAKKHPKTWVHYIAAEEEDWDYAPLVLAPDDRSYKSQYLNNGPQRIGRKYKKVRFMAYTDETFKTREAIQHESGILGPLLYGEVGDTLLIIFKNQASRPYNIYPHGITDVRPLYSRRLPKGVKHLKDFPILPGEIFKYKWTVTVEDGPTKSDPRCLTRYYSSFVNMERDLASGLIGPLLICYKESVDQRGNQIMSDKRNVILFSVFDENRSWYLTENIQRFLPNPAGAPTSTEPSEGSAPGSPAGSPTSTEEGTSTEPSEGSAPGTSTEPSEGSAPGTSESATPESGPGTSTEPSEGSAPGTSESATPESGPGSEPATSGSETPGTSTEPSEGSAPGTSTEPSEGSAPGTSESATPESGPGTSESATPESGPGASSGVQLEDPEFQASNIMHSINGYVFDSLQLSVCLHEVAYWYILSIGAQTDFLSVFFSGYTFKHKMVYEDTLTLFPFSGETVFMSMENPGLWILGCHNSDFRNRGMTALLKVSSCDKNTGDYYEDSYEDISAYLLSKNNAIEPRSFSQNPPVLKRHQREITRTTLQSDQEEIDYDDTISVEMKKEDFDIYDEDENQSPRSFQKKTRHYFIAAVERLWDYGMSSSPHVLRNRAQSGSVPQFKKVVFQEFTDGSFTQPLYRGELNEHLGLLGPYIRAEVEDNIMVTFRNQASRPYSFYSSLISYEEDQRQGAEPRKNFVKPNETKTYFWKVQHHMAPTKDEFDCKAWAYFSDVDLEKDVHSGLIGPLLVCHTNTLNPAHGRQVTVQEFALFFTIFDETKSWYFTENMERNCRAPCNIQMEDPTFKENYRFHAINGYIMDTLPGLVMAQDQRIRWYLLSMGSNENIHSIHFSGHVFTVRKKEEYKMALYNLYPGVFETVEMLPSKAGIWRVECLIGEHLHAGMSTLFLVYSNKCQTPLGMASGHIRDFQITASGQYGQWAPKLARLHYSGSINAWSTKEPFSWIKVDLLAPMIIHGIKTQGARQKFSSLYISQFIIMYSLDGKKWQTYRGNSTGTLMVFFGNVDSSGIKHNIFNPPIIARYIRLHPTHYSIRSTLRMELMGCDLNSCSMPLGMESKAISDAQITASSYFTNMFATWSPSKARLHLQGRSNAWRPQVNNPKEWLQVDFQKTMKVTGVTTQGVKSLLTSMYVKEFLISSSQDGHQWTLFFQNGKVKVFQGNQDSFTPVVNSLDPPLLTRYLRIHPQSWVHQIALRMEVLGCEAQDLYGAGSPGAETAEQKLISEEDLSPATGHHHHHH

SEQ ID NO: 866 - DNA, 5310 bp, synthetic construct
  misc_feature 1..5310: note = Description of Artificial Sequence: Synthetic polynucleotide
  source 1..5310: mol_type = other DNA
gccaccagaagatactacctgggtgcagtggaactgtcatgggactatatgcaaagtgatctcggtgagctgcctgtgggcgcgccaggctccagcccctccgcgagcacgggaaccggaccaggttcgtcaccctcagcatcaacggggacgggaccgggggcgtcaccaggaacgtcctccaccggctcgccgggtgcatcacccggaacgtcatcgaccggatcgccagggagctcgacgccatcaggcgcaacaggatcacctggctcaagccctagcgcgtcaaccggcacgggtccgggtgcctcccctggcacgtccagcaccggatcacccggatcgagcccatccgcctcaaccggaaccggacccggtacaccagggtcgggaacagcctcctcgtcaccaggctcctcaaccccctcgggagccacgggttcgcccggttcgtcaacgccttccggagcaactggtagccccggagcatcgccaggaacttcgagcacggggtcgcccgcctcgagcgacgcaagatttcctcctagagtgccaaaatcttttccattcaacacctcagtcgtgtacaaaaagactctgtttgtagaattcacggatcaccttttcaacatcgctaagccaaggccaccctggatgggtctgctaggtcctaccatccaggctgaggtttatgatacagtggtcattacacttaagaacatggcttcccatcctgtcagtcttcatgctgttggtgtatcctactggaaagcttctgagggagctgaatatgatgatcagaccagtcaaagggagaaagaagatgataaagtcttccctggtggaagccatacatatgtctggcaggtcctgaaagagaatggtccaatggcctctgacccactgtgccttacctactcatatctttctcatgtggacctggtaaaagacttgaattcaggcctcattggagccctactagtatgtagagaagggagtctggccaaggaaaagacacagaccttgcacaaatttatactactttttgctgtatttgatgaagggaaaagttggcactcagaaacaaagaactccttgatgcaggatagggatgctgcatctgctcgggcctggcctaaaatgcacacagtcaatggttatgtaaacaggtctctgccaggtctgattggatgccacaggaaatcagtctattggcatgtgattggaatgggcaccactcctgaagtgcactcaatattcctcgaaggtcacacatttcttgtgaggaaccatcgccaggctagcttggaaatctcgccaataactttccttactgctcaaacactcttgatggaccttggacagtttctactgttttgtcatatctcttcccaccaacatgatggcatggaagcttatgtcaaagtagacagctgtccagaggaaccccaactacgaatgaaaaataatgaagaagcggaagactatgatgatgatcttactgattctgaaatggatgtggtcaggtttgatgatgacaactctccttcctttatccaaattcgctcagttgccaagaagcatcctaaaacttgggtacattacattgctgctgaagaggaggactgggactatgctcccttagtcctcgcccccgatgacagaagttataaaagtcaatatttgaacaatggccctcagcggattggtaggaagtacaaaaaagtccgatttatggcatacacagatgaaacctttaagactcgtgaagctattcagcatgaatcaggaatcttgggacctttactttatggggaagttggagacacactgttgattatatttaagaatcaagcaagcagaccatataacatctaccctcacggaatcactgatgtccgtcctttgtattcaaggagattaccaaaaggtgtaaaacatttgaaggattttccaattctgccaggagaaatattcaaatataaatggacagtgactgtagaagatgggccaactaaatcagatcctcggtgcctgacccgctattactctagtttcgttaatatggagagagatctagcttcaggactcattggccctctcctcatctgctacaaagaatctgtagatcaaagaggaaaccagataatgtcagacaagaggaatgtcatcctgttttctgtatttgatgagaaccgaagctggtacctcacagagaatatacaacgctttctccccaatccagctggcgcgccaaccagtacggagccgtccgaggggagcgcaccaggaagcccggctgggagcccgacttctaccgaagagggtacatctaccgaaccaagtgaaggttcagcaccaggcacctcaacagaaccctctgagggctcggcgcctggtacaagtgagtccgccaccccagaatccgggcctgggacaagcacagaaccttcggaagggagtgcccctggaacatccgaatcggcaaccccagaatcagggccaggatctgagcccgcgacttcgggctccgagacgcctgggacatccaccgagccctccgaaggatcagccccaggcaccagcacggagccctctgagggaagcgcacctggtaccagcgaaagcgcaactcccgaatcaggtcccggtacgagcgagtcggcgaccccggagagcgggccaggtgcctcgagcggagtgcagcttgaggatccagagttccaagcctccaacatcatgcacagcatcaatggctatgtttttgatagtttgcagttgtcagtttgtttgcatgaggtggcatactggtacattctaagcattggagcacagactgacttcctttctgtcttcttctctggatataccttcaaacacaaaatggtctatgaagacacactcaccctattcccattctcaggagaaactgtcttcatgtcgatggaaaacccaggtctatggattctggggtgccacaactcagactttcggaacagaggcatgaccgccttactgaaggtttctagttgtgacaagaacactggtgattattacgaggacagttatgaagatatttcagcatacttgctgagtaaaaacaatgccattgaaccaagaagcttctctcaaaacccaccagtcttgaaacgccatcaacgggaaataactcgtactactcttcagtcagatcaagaggaaatcgattatgatgataccatatcagttgaaatgaagaaggaagattttgacatttatgatgaggatgaaaatcagagcccccgcagctttcaaaagaaaacacgacactattttattgctgcagtggagaggctctgggattatgggatgagtagctccccacatgttctaagaaacagggctcagagtggcagtgtccctcagttcaagaaagttgttttccaggaatttactgatggctcctttactcagcccttataccgtggagaactaaatgaacatttgggactcctggggccatatataagagcagaagttgaagataatatcatggtaactttcagaaatcaggcctctcgtccctattccttctattctagccttatttcttatgaggaagatcagaggcaaggagcagaacctagaaaaaactttgtcaagcctaatgaaaccaaaacttacttttggaaagtgcaacatcatatggcacccactaaagatgagtttgactgcaaagcctgggcttatttctctgatgttgacctggaaaaagatgtgcactcaggcctgattggaccccttctggtctgccacactaacacactgaaccctgctcatgggagacaagtgacagtacaggaatttgctctgtttttcaccatctttgatgagaccaaaagctggtacttcactgaaaatatggaaagaaactgcagggctccctgcaatatccagatggaagatcccacttttaaagagaattatcgcttccatgcaatcaatggctacataatggatacactacctggcttagtaatggctcaggatcaaaggattcgatggtatctgctcagcatgggcagcaatgaaaacatccattctattcatttcagtggacatgtgttcactgtacgaaaaaaagaggagtataaaatggcactgtacaatctctatccaggtgtttttgagacagtggaaatgttaccatccaaagctggaatttggcgggtggaatgccttattggcgagcatctacatgctgggatgagcacactttttctggtgtacagcaataagtgtcagactcccctgggaatggcttctggacacattagagattttcagattacagcttcaggacaatatggacagtgggccccaaagctggccagacttcattattccggatcaatcaatgcctggagcaccaaggagcccttttcttggatcaaggtggatctgttggcaccaatgattattcacggcatcaagacccagggtgcccgtcagaagttctccagcctctacatctctcagtttatcatcatgtatagtcttgatgggaagaagtggcagacttatcgaggaaattccactggaaccttaatggtcttctttggcaatgtggattcatctgggataaaacacaatatttttaaccctccaattattgctcgatacatccgtttgcacccaactcattatagcattcgcagcactcttcgcatggagttgatgggctgtgatttaaatagttgcagcatgccattgggaatggagagtaaagcaatatcagatgcacagattactgcttcatcctactttaccaatatgtttgccacctggtctccttcaaaagctcgacttcacctccaagggaggagtaatgcctggagacctcaggtgaataatccaaaagagtggctgcaagtggacttccagaagacaatgaaagtcacaggagtaactactcagggagtaaaatctctgcttaccagcatgtatgtgaaggagttcctcatctccagcagtcaagatggccatcagtggactctcttttttcagaatggcaaagtaaaggtttttcagggaaatcaagactccttcacacctgtggtgaactctctagacccaccgttactgactcgctaccttcgaattcacccccagagttgggtgcaccagattgccctgaggatggaggttctgggctgcgaggcacaggacctctacggcgccggatcacctggggccgaaacggccgaacaaaaactcatctcagaagaggatctgtcacctgcaaccggtcatcatcaccatcaccattga

SEQ ID NO: 867 - protein, 1769 aa, synthetic construct
  REGION 1..1769: note = Description of Artificial Sequence: Synthetic polypeptide
ATRRYYLGAVELSWDYMQGAPGSSPSASTGTGPGSSPSASTGTGPGASPGTSSTGSPGASPGTSSTGSPGSSTPSGATGSPGSSPSASTGTGPGASPGTSSTGSPGSSPSASTGTGPGTPGSGTASSSPGSSTPSGATGSPGSSTPSGATGSPGASPGTSSTGSPASSSDLGELPVDARFPPRVPKSFPFNTSVVYKKTLFVEFTDHLFNIAKPRPPWMGLLGPTIQAEVYDTVVITLKNMASHPVSLHAVGVSYWKASEGAEYDDQTSQREKEDDKVFPGGSHTYVWQVLKENGPMASDPLCLTYSYLSHVDLVKDLNSGLIGALLVCREGSLAKEKTQTLHKFILLFAVFDEGKSWHSETKNSLMQDRDAASARAWPKMHTVNGYVNRSLPGLIGCHRKSVYWHVIGMGTTPEVHSIFLEGHTFLVRNHRQASLEISPITFLTAQTLLMDLGQFLLFCHISSHQHDGMEAYVKVDSCPEEPQLRMKNNEEAEDYDDDLTDSEMDVVRFDDDNSPSFIQIRSVAKKHPKTWVHYIAAEEEDWDYAPLVLAPDDRSYKSQYLNNGPQRIGRKYKKVRFMAYTDETFKTREAIQHESGILGPLLYGEVGDTLLIIFKNQASRPYNIYPHGITDVRPLYSRRLPKGVKHLKDFPILPGEIFKYKWTVTVEDGPTKSDPRCLTRYYSSFVNMERDLASGLIGPLLICYKESVDQRGNQIMSDKRNVILFSVFDENRSWYLTENIQRFLPNPAGAPTSTEPSEGSAPGSPAGSPTSTEEGTSTEPSEGSAPGTSTEPSEGSAPGTSESATPESGPGTSTEPSEGSAPGTSESATPESGPGSEPATSGSETPGTSTEPSEGSAPGTSTEPSEGSAPGTSESATPESGPGTSESATPESGPGASSGVQLEDPEFQASNIMHSINGYVFDSLQLSVCLHEVAYWYILSIGAQTDFLSVFFSGYTFKHKMVYEDTLTLFPFSGETVFMSMENPGLWILGCHNSDFRNRGMTALLKVSSCDKNTGDYYEDSYEDISAYLLSKNNAIEPRSFSQNPPVLKRHQREITRTTLQSDQEEIDYDDTISVEMKKEDFDIYDEDENQSPRSFQKKTRHYFIAAVERLWDYGMSSSPHVLRNRAQSGSVPQFKKVVFQEFTDGSFTQPLYRGELNEHLGLLGPYIRAEVEDNIMVTFRNQASRPYSFYSSLISYEEDQRQGAEPRKNFVKPNETKTYFWKVQHHMAPTKDEFDCKAWAYFSDVDLEKDVHSGLIGPLLVCHTNTLNPAHGRQVTVQEFALFFTIFDETKSWYFTENMERNCRAPCNIQMEDPTFKENYRFHAINGYIMDTLPGLVMAQDQRIRWYLLSMGSNENIHSIHFSGHVFTVRKKEEYKMALYNLYPGVFETVEMLPSKAGIWRVECLIGEHLHAGMSTLFLVYSNKCQTPLGMASGHIRDFQITASGQYGQWAPKLARLHYSGSINAWSTKEPFSWIKVDLLAPMIIHGIKTQGARQKFSSLYISQFIIMYSLDGKKWQTYRGNSTGTLMVFFGNVDSSGIKHNIFNPPIIARYIRLHPTHYSIRSTLRMELMGCDLNSCSMPLGMESKAISDAQITASSYFTNMFATWSPSKARLHLQGRSNAWRPQVNNPKEWLQVDFQKTMKVTGVTTQGVKSLLTSMYVKEFLISSSQDGHQWTLFFQNGKVKVFQGNQDSFTPVVNSLDPPLLTRYLRIHPQSWVHQIALRMEVLGCEAQDLYGAGSPGAETAEQKLISEEDLSPATGHHHHHH

SEQ ID NO: 868 - DNA, 5310 bp, synthetic construct
  misc_feature 1..5310: note = Description of Artificial Sequence: Synthetic polynucleotide
  source 1..5310: mol_type = other DNA
gccaccagaagatactacctgggtgcagtggaactgtcatgggactatatgcaaggcgcgccaggctccagcccctccgcgagcacgggaaccggaccaggttcgtcaccctcagcatcaacggggacgggaccgggggcgtcaccaggaacgtcctccaccggctcgccgggtgcatcacccggaacgtcatcgaccggatcgccagggagctcgacgccatcaggcgcaacaggatcacctggctcaagccctagcgcgtcaaccggcacgggtccgggtgcctcccctggcacgtccagcaccggatcacccggatcgagcccatccgcctcaaccggaaccggacccggtacaccagggtcgggaacagcctcctcgtcaccaggctcctcaaccccctcgggagccacgggttcgcccggttcgtcaacgccttccggagcaactggtagccccggagcatcgccaggaacttcgagcacggggtcgcccgcctcgagcagtgatctcggtgagctgcctgtggacgcaagatttcctcctagagtgccaaaatcttttccattcaacacctcagtcgtgtacaaaaagactctgtttgtagaattcacggatcaccttttcaacatcgctaagccaaggccaccctggatgggtctgctaggtcctaccatccaggctgaggtttatgatacagtggtcattacacttaagaacatggcttcccatcctgtcagtcttcatgctgttggtgtatcctactggaaagcttctgagggagctgaatatgatgatcagaccagtcaaagggagaaagaagatgataaagtcttccctggtggaagccatacatatgtctggcaggtcctgaaagagaatggtccaatggcctctgacccactgtgccttacctactcatatctttctcatgtggacctggtaaaagacttgaattcaggcctcattggagccctactagtatgtagagaagggagtctggccaaggaaaagacacagaccttgcacaaatttatactactttttgctgtatttgatgaagggaaaagttggcactcagaaacaaagaactccttgatgcaggatagggatgctgcatctgctcgggcctggcctaaaatgcacacagtcaatggttatgtaaacaggtctctgccaggtctgattggatgccacaggaaatcagtctattggcatgtgattggaatgggcaccactcctgaagtgcactcaatattcctcgaaggtcacacatttcttgtgaggaaccatcgccaggctagcttggaaatctcgccaataactttccttactgctcaaacactcttgatggaccttggacagtttctactgttttgtcatatctcttcccaccaacatgatggcatggaagcttatgtcaaagtagacagctgtccagaggaaccccaactacgaatgaaaaataatgaagaagcggaagactatgatgatgatcttactgattctgaaatggatgtggtcaggtttgatgatgacaactctccttcctttatccaaattcgctcagttgccaagaagcatcctaaaacttgggtacattacattgctgctgaagaggaggactgggactatgctcccttagtcctcgcccccgatgacagaagttataaaagtcaatatttgaacaatggccctcagcggattggtaggaagtacaaaaaagtccgatttatggcatacacagatgaaacctttaagactcgtgaagctattcagcatgaatcaggaatcttgggacctttactttatggggaagttggagacacactgttgattatatttaagaatcaagcaagcagaccatataacatctaccctcacggaatcactgatgtccgtcctttgtattcaaggagattaccaaaaggtgtaaaacatttgaaggattttccaattctgccaggagaaatattcaaatataaatggacagtgactgtagaagatgggccaactaaatcagatcctcggtgcctgacccgctattactctagtttcgttaatatggagagagatctagcttcaggactcattggccctctcctcatctgctacaaagaatctgtagatcaaagaggaaaccagataatgtcagacaagaggaatgtcatcctgttttctgtatttgatgagaaccgaagctggtacctcacagagaatatacaacgctttctccccaatccagctggcgcgccaaccagtacggagccgtccgaggggagcgcaccaggaagcccggctgggagcccgacttctaccgaagagggtacatctaccgaaccaagtgaaggttcagcaccaggcacctcaacagaaccctctgagggctcggcgcctggtacaagtgagtccgccaccccagaatccgggcctgggacaagcacagaaccttcggaagggagtgcccctggaacatccgaatcggcaaccccagaatcagggccaggatctgagcccgcgacttcgggctccgagacgcctgggacatccaccgagccctccgaaggatcagccccaggcaccagcacggagccctctgagggaagcgcacctggtaccagcgaaagcgcaactcccgaatcaggtcccggtacgagcgagtcggcgaccccggagagcgggccaggtgcctcgagcggagtgcagcttgaggatccagagttccaagcctccaacatcatgcacagcatcaatggctatgtttttgatagtttgcagttgtcagtttgtttgcatgaggtggcatactggtacattctaagcattggagcacagactgacttcctttctgtcttcttctctggatataccttcaaacacaaaatggtctatgaagacacactcaccctattcccattctcaggagaaactgtcttcatgtcgatggaaaacccaggtctatggattctggggtgccacaactcagactttcggaacagaggcatgaccgccttactgaaggtttctagttgtgacaagaacactggtgattattacgaggacagttatgaagatatttcagcatacttgctgagtaaaaacaatgccattgaaccaagaagcttctctcaaaacccaccagtcttgaaacgccatcaacgggaaataactcgtactactcttcagtcagatcaagaggaaatcgattatgatgataccatatcagttgaaatgaagaaggaagattttgacatttatgatgaggatgaaaatcagagcccccgcagctttcaaaagaaaacacgacactattttattgctgcagtggagaggctctgggattatgggatgagtagctccccacatgttctaagaaacagggctcagagtggcagtgtccctcagttcaagaaagttgttttccaggaatttactgatggctcctttactcagcccttataccgtggagaactaaatgaacatttgggactcctggggccatatataagagcagaagttgaagataatatcatggtaactttcagaaatcaggcctctcgtccctattccttctattctagccttatttcttatgaggaagatcagaggcaaggagcagaacctagaaaaaactttgtcaagcctaatgaaaccaaaacttacttttggaaagtgcaacatcatatggcacccactaaagatgagtttgactgcaaagcctgggcttatttctctgatgttgacctggaaaaagatgtgcactcaggcctgattggaccccttctggtctgccacactaacacactgaaccctgctcatgggagacaagtgacagtacaggaatttgctctgtttttcaccatctttgatgagaccaaaagctggtacttcactgaaaatatggaaagaaactgcagggctccctgcaatatccagatggaagatcccacttttaaagagaattatcgcttccatgcaatcaatggctacataatggatacactacctggcttagtaatggctcaggatcaaaggattcgatggtatctgctcagcatgggcagcaatgaaaacatccattctattcatttcagtggacatgtgttcactgtacgaaaaaaagaggagtataaaatggcactgtacaatctctatccaggtgtttttgagacagtggaaatgttaccatccaaagctggaatttggcgggtggaatgccttattggcgagcatctacatgctgggatgagcacactttttctggtgtacagcaataagtgtcagactcccctgggaatggcttctggacacattagagattttcagattacagcttcaggacaatatggacagtgggccccaaagctggccagacttcattattccggatcaatcaatgcctggagcaccaaggagcccttttcttggatcaaggtggatctgttggcaccaatgattattcacggcatcaagacccagggtgcccgtcagaagttctccagcctctacatctctcagtttatcatcatgtatagtcttgatgggaagaagtggcagacttatcgaggaaattccactggaaccttaatggtcttctttggcaatgtggattcatctgggataaaacacaatatttttaaccctccaattattgctcgatacatccgtttgcacccaactcattatagcattcgcagcactcttcgcatggagttgatgggctgtgatttaaatagttgcagcatgccattgggaatggagagtaaagcaatatcagatgcacagattactgcttcatcctactttaccaatatgtttgccacctggtctccttcaaaagctcgacttcacctccaagggaggagtaatgcctggagacctcaggtgaataatccaaaagagtggctgcaagtggacttccagaagacaatgaaagtcacaggagtaactactcagggagtaaaatctctgcttaccagcatgtatgtgaaggagttcctcatctccagcagtcaagatggccatcagtggactctcttttttcagaatggcaaagtaaaggtttttcagggaaatcaagactccttcacacctgtggtgaactctctagacccaccgttactgactcgctaccttcgaattcacccccagagttgggtgcaccagattgccctgaggatggaggttctgggctgcgaggcacaggacctctacggcgccggatcacctggggccgaaacggccgaacaaaaactcatctcagaagaggatctgtcacctgcaaccggtcatcatcaccatcaccattga

SEQ ID NO: 869 - protein, 1769 aa, synthetic construct
  REGION 1..1769: note = Description of Artificial Sequence: Synthetic polypeptide
ATRRYYLGAVELSWDYMQSDLGELPVDARFPPRVPKSFPFGAPGSSPSASTGTGPGSSPSASTGTGPGASPGTSSTGSPGASPGTSSTGSPGSSTPSGATGSPGSSPSASTGTGPGASPGTSSTGSPGSSPSASTGTGPGTPGSGTASSSPGSSTPSGATGSPGSSTPSGATGSPGASPGTSSTGSPASSNTSVVYKKTLFVEFTDHLFNIAKPRPPWMGLLGPTIQAEVYDTVVITLKNMASHPVSLHAVGVSYWKASEGAEYDDQTSQREKEDDKVFPGGSHTYVWQVLKENGPMASDPLCLTYSYLSHVDLVKDLNSGLIGALLVCREGSLAKEKTQTLHKFILLFAVFDEGKSWHSETKNSLMQDRDAASARAWPKMHTVNGYVNRSLPGLIGCHRKSVYWHVIGMGTTPEVHSIFLEGHTFLVRNHRQASLEISPITFLTAQTLLMDLGQFLLFCHISSHQHDGMEAYVKVDSCPEEPQLRMKNNEEAEDYDDDLTDSEMDVVRFDDDNSPSFIQIRSVAKKHPKTWVHYIAAEEEDWDYAPLVLAPDGAPGASPGTSSTGSPGSSPSASTGTGPGSSPSASTGTGPGTPGSGTASSSPGSSTPSGATGSPGSSPSASTGTGPGASPGTSSTGSPGTPGSGTASSSPGSSTPSGATGSPGTPGSGTASSSPGASPGTSSTGSPGASPGTSSTGSPASSDRSYKSQYLNNGPQRIGRKYKKVRFMAYTDETFKTREAIQHESGILGPLLYGEVGDTLLIIFKNQASRPYNIYPHGITDVRPLYSRRLPKGVKHLKDFPILPGEIFKYKWTVTVEDGPTKSDPRCLTRYYSSFVNMERDLASGLIGPLLICYKESVDQRGNQIMSDKRNVILFSVFDENRSWYLTENIQRFLPNPAGVQLEDPEFQASNIMHSINGYVFDSLQLSVCLHEVAYWYILSIGAQTDFLSVFFSGYTFKHKMVYEDTLTLFPFSGETVFMSMENPGLWILGCHNSDFRNRGMTALLKVSSCDKNTGDYYEDSYEDISAYLLSKNNAIEPRSFSQNPPVLKRHQREITRTTLQSDQEEIDYDDTISVEMKKEDFDIYDEDENQSPRSFQKKTRHYFIAAVERLWDYGMSSSPHVLRNRAQSGSVPQFKKVVFQEFTDGSFTQPLYRGELNEHLGLLGPYIRAEVEDNIMVTFRNQASRPYSFYSSLISYEEDQRQGAEPRKNFVKPNETKTYFWKVQHHMAPTKDEFDCKAWAYFSDVDLEKDVHSGLIGPLLVCHTNTLNPAHGRQVTVQEFALFFTIFDETKSWYFTENMERNCRAPCNIQMEDPTFKENYRFHAINGYIMDTLPGLVMAQDQRIRWYLLSMGSNENIHSIHFSGHVFTVRKKEEYKMALYNLYPGVFETVEMLPSKAGIWRVECLIGEHLHAGMSTLFLVYSNKCQTPLGMASGHIRDFQITASGQYGQWAPKLARLHYSGSINAWSTKEPFSWIKVDLLAPMIIHGIKTQGARQKFSSLYISQFIIMYSLDGKKWQTYRGNSTGTLMVFFGNVDSSGIKHNIFNPPIIARYIRLHPTHYSIRSTLRMELMGCDLNSCSMPLGMESKAISDAQITASSYFTNMFATWSPSKARLHLQGRSNAWRPQVNNPKEWLQVDFQKTMKVTGVTTQGVKSLLTSMYVKEFLISSSQDGHQWTLFFQNGKVKVFQGNQDSFTPVVNSLDPPLLTRYLRIHPQSWVHQIALRMEVLGCEAQDLYGAGSPGAETAEQKLISEEDLSPATGHHHHHH

SEQ ID NO: 870 - DNA, 5310 bp, synthetic construct
  misc_feature 1..5310: note = Description of Artificial Sequence: Synthetic polynucleotide
  source 1..5310: mol_type = other DNA
gccaccagaagatactacctgggtgcagtggaactgtcatgggactatatgcaaagtgatctcggtgagctgcctgtggacgcaagatttcctcctagagtgccaaaatcttttccattcggcgcgccaggctccagcccctccgcgagcacgggaaccggaccaggttcgtcaccctcagcatcaacggggacgggaccgggggcgtcaccaggaacgtcctccaccggctcgccgggtgcatcacccggaacgtcatcgaccggatcgccagggagctcgacgccatcaggcgcaacaggatcacctggctcaagccctagcgcgtcaaccggcacgggtccgggtgcctcccctggcacgtccagcaccggatcacccggatcgagcccatccgcctcaaccggaaccggacccggtacaccagggtcgggaacagcctcctcgtcaccaggctcctcaaccccctcgggagccacgggttcgcccggttcgtcaacgccttccggagcaactggtagccccggagcatcgccaggaacttcgagcacggggtcgcccgcctcgagcaacacctcagtcgtgtacaaaaagactctgtttgtagaattcacggatcaccttttcaacatcgctaagccaaggccaccctggatgggtctgctaggtcctaccatccaggctgaggtttatgatacagtggtcattacacttaagaacatggcttcccatcctgtcagtcttcatgctgttggtgtatcctactggaaagcttctgagggagctgaatatgatgatcagaccagtcaaagggagaaagaagatgataaagtcttccctggtggaagccatacatatgtctggcaggtcctgaaagagaatggtccaatggcctctgacccactgtgccttacctactcatatctttctcatgtggacctggtaaaagacttgaattcaggcctcattggagccctactagtatgtagagaagggagtctggccaaggaaaagacacagaccttgcacaaatttatactactttttgctgtatttgatgaagggaaaagttggcactcagaaacaaagaactccttgatgcaggatagggatgctgcatctgctcgggcctggcctaaaatgcacacagtcaatggttatgtaaacaggtctctgccaggtctgattggatgccacaggaaatcagtctattggcatgtgattggaatgggcaccactcctgaagtgcactcaatattcctcgaaggtcacacatttcttgtgaggaaccatcgccaggctagcttggaaatctcgccaataactttccttactgctcaaacactcttgatggaccttggacagtttctactgttttgtcatatctcttcccaccaacatgatggcatggaagcttatgtcaaagtagacagctgtccagaggaaccccaactacgaatgaaaaataatgaagaagcggaagactatgatgatgatcttactgattctgaaatggatgtggtcaggtttgatgatgacaactctccttcctttatccaaattcgctcagttgccaagaagcatcctaaaacttgggtacattacattgctgctgaagaggaggactgggactatgctcccttagtcctcgcccccgatggcgcgccaggtgcctcgccgggaacatcatcaactggttcacccgggtcatccccctcggcctcaaccgggacgggtcccggctcatcccccagcgccagcactggaacaggtcctggcactcctggttccggtacggcatcgtcatccccgggaagctcaacaccgtccggagcgacaggatcacctggctcgtcaccttcggcgtcaactggaacggggccaggggcctcacccggaacgtcctcgactgggtcgcctggtacgccgggatcaggaacggcctcatcctcgcctgggtcctcaacgccctcgggtgcgactggttcgccgggaactcctggctcggggacggcctcgtcgtcgcctggggcatcaccggggacgagctccacggggtcccctggagcgtcaccggggacctcctcgacaggtagcccggcctcgagcgacagaagttataaaagtcaatatttgaacaatggccctcagcggattggtaggaagtacaaaaaagtccgatttatggcatacacagatgaaacctttaagactcgtgaagctattcagcatgaatcaggaatcttgggacctttactttatggggaagttggagacacactgttgattatatttaagaatcaagcaagcagaccatataacatctaccctcacggaatcactgatgtccgtcctttgtattcaaggagattaccaaaaggtgtaaaacatttgaaggattttccaattctgccaggagaaatattcaaatataaatggacagtgactgtagaagatgggccaactaaatcagatcctcggtgcctgacccgctattactctagtttcgttaatatggagagagatctagcttcaggactcattggccctctcctcatctgctacaaagaatctgtagatcaaagaggaaaccagataatgtcagacaagaggaatgtcatcctgttttctgtatttgatgagaaccgaagctggtacctcacagagaatatacaacgctttctccccaatccagctggagtgcagcttgaggatccagagttccaagcctccaacatcatgcacagcatcaatggctatgtttttgatagtttgcagttgtcagtttgtttgcatgaggtggcatactggtacattctaagcattggagcacagactgacttcctttctgtcttcttctctggatataccttcaaacacaaaatggtctatgaagacacactcaccctattcccattctcaggagaaactgtcttcatgtcgatggaaaacccaggtctatggattctggggtgccacaactcagactttcggaacagaggcatgaccgccttactgaaggtttctagttgtgacaagaacactggtgattattacgaggacagttatgaagatatttcagcatacttgctgagtaaaaacaatgccattgaaccaagaagcttctctcaaaacccaccagtcttgaaacgccatcaacgggaaataactcgtactactcttcagtcagatcaagaggaaatcgattatgatgataccatatcagttgaaatgaagaaggaagattttgacatttatgatgaggatgaaaatcagagcccccgcagctttcaaaagaaaacacgacactattttattgctgcagtggagaggctctgggattatgggatgagtagctccccacatgttctaagaaacagggctcagagtggcagtgtccctcagttcaagaaagttgttttccaggaatttactgatggctcctttactcagcccttataccgtggagaactaaatgaacatttgggactcctggggccatatataagagcagaagttgaagataatatcatggtaactttcagaaatcaggcctctcgtccctattccttctattctagccttatttcttatgaggaagatcagaggcaaggagcagaacctagaaaaaactttgtcaagcctaatgaaaccaaaacttacttttggaaagtgcaacatcatatggcacccactaaagatgagtttgactgcaaagcctgggcttatttctctgatgttgacctggaaaaagatgtgcactcaggcctgattggaccccttctggtctgccacactaacacactgaaccctgctcatgggagacaagtgacagtacaggaatttgctctgtttttcaccatctttgatgagaccaaaagctggtacttcactgaaaatatggaaagaaactgcagggctccctgcaatatccagatggaagatcccacttttaaagagaattatcgcttccatgcaatcaatggctacataatggatacactacctggcttagtaatggctcaggatcaaaggattcgatggtatctgctcagcatgggcagcaatgaaaacatccattctattcatttcagtggacatgtgttcactgtacgaaaaaaagaggagtataaaatggcactgtacaatctctatccaggtgtttttgagacagtggaaatgttaccatccaaagctggaatttggcgggtggaatgccttattggcgagcatctacatgctgggatgagcacactttttctggtgtacagcaataagtgtcagactcccctgggaatggcttctggacacattagagattttcagattacagcttcaggacaatatggacagtgggccccaaagctggccagacttcattattccggatcaatcaatgcctggagcaccaaggagcccttttcttggatcaaggtggatctgttggcaccaatgattattcacggcatcaagacccagggtgcccgtcagaagttctccagcctctacatctctcagtttatcatcatgtatagtcttgatgggaagaagtggcagacttatcgaggaaattccactggaaccttaatggtcttctttggcaatgtggattcatctgggataaaacacaatatttttaaccctccaattattgctcgatacatccgtttgcacccaactcattatagcattcgcagcactcttcgcatggagttgatgggctgtgatttaaatagttgcagcatgccattgggaatggagagtaaagcaatatcagatgcacagattactgcttcatcctactttaccaatatgtttgccacctggtctccttcaaaagctcgacttcacctccaagggaggagtaatgcctggagacctcaggtgaataatccaaaagagtggctgcaagtggacttccagaagacaatgaaagtcacaggagtaactactcagggagtaaaatctctgcttaccagcatgtatgtgaaggagttcctcatctccagcagtcaagatggccatcagtggactctcttttttcagaatggcaaagtaaaggtttttcagggaaatcaagactccttcacacctgtggtgaactctctagacccaccgttactgactcgctaccttcgaattcacccccagagttgggtgcaccagattgccctgaggatggaggttctgggctgcgaggcacaggacctctacggcgccggatcacctggggccgaaacggccgaacaaaaactcatctcagaagaggatctgtcacctgcaaccggtcatcatcaccatcaccattga

SEQ ID NO: 871 - protein, 1769 aa, synthetic construct
  REGION 1..1769: note = Description of Artificial Sequence: Synthetic polypeptide
ATRRYYLGAVELSWDYMQSDLGELPVGAPGSSPSASTGTGPGSSPSASTGTGPGASPGTSSTGSPGASPGTSSTGSPGSSTPSGATGSPGSSPSASTGTGPGASPGTSSTGSPGSSPSASTGTGPGTPGSGTASSSPGSSTPSGATGSPGSSTPSGATGSPGASPGTSSTGSPASSDARFPPRVPKSFPFNTSVVYKKTLFVEFTDHLFNIAKPRPPWMGLLGPTIQAEVYDTVVITLKNMASHPVSLHAVGVSYWKASEGAEYDDQTSQREKEDDKVFPGGSHTYVWQVLKENGPMASDPLCLTYSYLSHVDLVKDLNSGLIGALLVCREGSLAKEKTQTLHKFILLFAVFDEGKSWHSETKNSLMQDRDAASARAWPKMHTVNGYVNRSLPGLIGCHRKSVYWHVIGMGTTPEVHSIFLEGHTFLVRNHRQASLEISPITFLTAQTLLMDLGQFLLFCHISSHQHDGMEAYVKVDSCPEEPQLRMKNNEEAEDYDDDLTDSEMDVVRFDDDNSPSFIQIRSVAKKHPKTWVHYIAAEEEDWDYAPLVLAPDGAPGASPGTSSTGSPGSSPSASTGTGPGSSPSASTGTGPGTPGSGTASSSPGSSTPSGATGSPGSSPSASTGTGPGASPGTSSTGSPGTPGSGTASSSPGSSTPSGATGSPGTPGSGTASSSPGASPGTSSTGSPGASPGTSSTGSPASSDRSYKSQYLNNGPQRIGRKYKKVRFMAYTDETFKTREAIQHESGILGPLLYGEVGDTLLIIFKNQASRPYNIYPHGITDVRPLYSRRLPKGVKHLKDFPILPGEIFKYKWTVTVEDGPTKSDPRCLTRYYSSFVNMERDLASGLIGPLLICYKESVDQRGNQIMSDKRNVILFSVFDENRSWYLTENIQRFLPNPAGVQLEDPEFQASNIMHSINGYVFDSLQLSVCLHEVAYWYILSIGAQTDFLSVFFSGYTFKHKMVYEDTLTLFPFSGETVFMSMENPGLWILGCHNSDFRNRGMTALLKVSSCDKNTGDYYEDSYEDISAYLLSKNNAIEPRSFSQNPPVLKRHQREITRTTLQSDQEEIDYDDTISVEMKKEDFDIYDEDENQSPRSFQKKTRHYFIAAVERLWDYGMSSSPHVLRNRAQSGSVPQFKKVVFQEFTDGSFTQPLYRGELNEHLGLLGPYIRAEVEDNIMVTFRNQASRPYSFYSSLISYEEDQRQGAEPRKNFVKPNETKTYFWKVQHHMAPTKDEFDCKAWAYFSDVDLEKDVHSGLIGPLLVCHTNTLNPAHGRQVTVQEFALFFTIFDETKSWYFTENMERNCRAPCNIQMEDPTFKENYRFHAINGYIMDTLPGLVMAQDQRIRWYLLSMGSNENIHSIHFSGHVFTVRKKEEYKMALYNLYPGVFETVEMLPSKAGIWRVECLIGEHLHAGMSTLFLVYSNKCQTPLGMASGHIRDFQITASGQYGQWAPKLARLHYSGSINAWSTKEPFSWIKVDLLAPMIIHGIKTQGARQKFSSLYISQFIIMYSLDGKKWQTYRGNSTGTLMVFFGNVDSSGIKHNIFNPPIIARYIRLHPTHYSIRSTLRMELMGCDLNSCSMPLGMESKAISDAQITASSYFTNMFATWSPSKARLHLQGRSNAWRPQVNNPKEWLQVDFQKTMKVTGVTTQGVKSLLTSMYVKEFLISSSQDGHQWTLFFQNGKVKVFQGNQDSFTPVVNSLDPPLLTRYLRIHPQSWVHQIALRMEVLGCEAQDLYGAGSPGAETAEQKLISEEDLSPATGHHHHHH

SEQ ID NO: 872 - DNA, 5310 bp, synthetic construct
  misc_feature 1..5310: note = Description of Artificial Sequence: Synthetic polynucleotide
  source 1..5310: mol_type = other DNA
gccaccagaagatactacctgggtgcagtggaactgtcatgggactatatgcaaagtgatctcggtgagctgcctgtgggcgcgccaggctccagcccctccgcgagcacgggaaccggaccaggttcgtcaccctcagcatcaacggggacgggaccgggggcgtcaccaggaacgtcctccaccggctcgccgggtgcatcacccggaacgtcatcgaccggatcgccagggagctcgacgccatcaggcgcaacaggatcacctggctcaagccctagcgcgtcaaccggcacgggtccgggtgcctcccctggcacgtccagcaccggatcacccggatcgagcccatccgcctcaaccggaaccggacccggtacaccagggtcgggaacagcctcctcgtcaccaggctcctcaaccccctcgggagccacgggttcgcccggttcgtcaacgccttccggagcaactggtagccccggagcatcgccaggaacttcgagcacggggtcgcccgcctcgagcgacgcaagatttcctcctagagtgccaaaatcttttccattcaacacctcagtcgtgtacaaaaagactctgtttgtagaattcacggatcaccttttcaacatcgctaagccaaggccaccctggatgggtctgctaggtcctaccatccaggctgaggtttatgatacagtggtcattacacttaagaacatggcttcccatcctgtcagtcttcatgctgttggtgtatcctactggaaagcttctgagggagctgaatatgatgatcagaccagtcaaagggagaaagaagatgataaagtcttccctggtggaagccatacatatgtctggcaggtcctgaaagagaatggtccaatggcctctgacccactgtgccttacctactcatatctttctcatgtggacctggtaaaagacttgaattcaggcctcattggagccctactagtatgtagagaagggagtctggccaaggaaaagacacagaccttgcacaaatttatactactttttgctgtatttgatgaagggaaaagttggcactcagaaacaaagaactccttgatgcaggatagggatgctgcatctgctcgggcctggcctaaaatgcacacagtcaatggttatgtaaacaggtctctgccaggtctgattggatgccacaggaaatcagtctattggcatgtgattggaatgggcaccactcctgaagtgcactcaatattcctcgaaggtcacacatttcttgtgaggaaccatcgccaggctagcttggaaatctcgccaataactttccttactgctcaaacactcttgatggaccttggacagtttctactgttttgtcatatctcttcccaccaacatgatggcatggaagcttatgtcaaagtagacagctgtccagaggaaccccaactacgaatgaaaaataatgaagaagcggaagactatgatgatgatcttactgattctgaaatggatgtggtcaggtttgatgatgacaactctccttcctttatccaaattcgctcagttgccaagaagcatcctaaaacttgggtacattacattgctgctgaagaggaggactgggactatgctcccttagtcctcgcccccgatggcgcgccaggtgcctcgccgggaacatcatcaactggttcacccgggtcatccccctcggcctcaaccgggacgggtcccggctcatcccccagcgccagcactggaacaggtcctggcactcctggttccggtacggcatcgtcatccccgggaagctcaacaccgtccggagcgacaggatcacctggctcgtcaccttcggcgtcaactggaacggggccaggggcctcacccggaacgtcctcgactgggtcgcctggtacgccgggatcaggaacggcctcatcctcgcctgggtcctcaacgccctcgggtgcgactggttcgccgggaactcctggctcggggacggcctcgtcgtcgcctggggcatcaccggggacgagctccacggggtcccctggagcgtcaccggggacctcctcgacaggtagcccggcctcgagcgacagaagttataaaagtcaatatttgaacaatggccctcagcggattggtaggaagtacaaaaaagtccgatttatggcatacacagatgaaacctttaagactcgtgaagctattcagcatgaatcaggaatcttgggacctttactttatggggaagttggagacacactgttgattatatttaagaatcaagcaagcagaccatataacatctaccctcacggaatcactgatgtccgtcctttgtattcaaggagattaccaaaaggtgtaaaacatttgaaggattttccaattctgccaggagaaatattcaaatataaatggacagtgactgtagaagatgggccaactaaatcagatcctcggtgcctgacccgctattactctagtttcgttaatatggagagagatctagcttcaggactcattggccctctcctcatctgctacaaagaatctgtagatcaaagaggaaaccagataatgtcagacaagaggaatgtcatcctgttttctgtatttgatgagaaccgaagctggtacctcacagagaatatacaacgctttctccccaatccagctggagtgcagcttgaggatccagagttccaagcctccaacatcatgcacagcatcaatggctatgtttttgatagtttgcagttgtcagtttgtttgcatgaggtggcatactggtacattctaagcattggagcacagactgacttcctttctgtcttcttctctggatataccttcaaacacaaaatggtctatgaagacacactcaccctattcccattctcaggagaaactgtcttcatgtcgatggaaaacccaggtctatggattctggggtgccacaactcagactttcggaacagaggcatgaccgccttactgaaggtttctagttgtgacaagaacactggtgattattacgaggacagttatgaagatatttcagcatacttgctgagtaaaaacaatgccattgaaccaagaagcttctctcaaaacccaccagtcttgaaacgccatcaacgggaaataactcgtactactcttcagtcagatcaagaggaaatcgattatgatgataccatatcagttgaaatgaagaaggaagattttgacatttatgatgaggatgaaaatcagagcccccgcagctttcaaaagaaaacacgacactattttattgctgcagtggagaggctctgggattatgggatgagtagctccccacatgttctaagaaacagggctcagagtggcagtgtccctcagttcaagaaagttgttttccaggaatttactgatggctcctttactcagcccttataccgtggagaactaaatgaacatttgggactcctggggccatatataagagcagaagttgaagataatatcatggtaactttcagaaatcaggcctctcgtccctattccttctattctagccttatttcttatgaggaagatcagaggcaaggagcagaacctagaaaaaactttgtcaagcctaatgaaaccaaaacttacttttggaaagtgcaacatcatatggcacccactaaagatgagtttgactgcaaagcctgggcttatttctctgatgttgacctggaaaaagatgtgcactcaggcctgattggaccccttctggtctgccacactaacacactgaaccctgctcatgggagacaagtgacagtacaggaatttgctctgtttttcaccatctttgatgagaccaaaagctggtacttcactgaaaatatggaaagaaactgcagggctccctgcaatatccagatggaagatcccacttttaaagagaattatcgcttccatgcaatcaatggctacataatggatacactacctggcttagtaatggctcaggatcaaaggattcgatggtatctgctcagcatgggcagcaatgaaaacatccattctattcatttcagtggacatgtgttcactgtacgaaaaaaagaggagtataaaatggcactgtacaatctctatccaggtgtttttgagacagtggaaatgttaccatccaaagctggaatttggcgggtggaatgccttattggcgagcatctacatgctgggatgagcacactttttctggtgtacagcaataagtgtcagactcccctgggaatggcttctggacacattagagattttcagattacagcttcaggacaatatggacagtgggccccaaagctggccagacttcattattccggatcaatcaatgcctggagcaccaaggagcccttttcttggatcaaggtggatctgttggcaccaatgattattcacggcatcaagacccagggtgcccgtcagaagttctccagcctctacatctctcagtttatcatcatgtatagtcttgatgggaagaagtggcagacttatcgaggaaattccactggaaccttaatggtcttctttggcaatgtggattcatctgggataaaacacaatatttttaaccctccaattattgctcgatacatccgtttgcacccaactcattatagcattcgcagcactcttcgcatggagttgatgggctgtgatttaaatagttgcagcatgccattgggaatggagagtaaagcaatatcagatgcacagattactgcttcatcctactttaccaatatgtttgccacctggtctccttcaaaagctcgacttcacctccaagggaggagtaatgcctggagacctcaggtgaataatccaaaagagtggctgcaagtggacttccagaagacaatgaaagtcacaggagtaactactcagggagtaaaatctctgcttaccagcatgtatgtgaaggagttcctcatctccagcagtcaagatggccatcagtggactctcttttttcagaatggcaaagtaaaggtttttcagggaaatcaagactccttcacacctgtggtgaactctctagacccaccgttactgactcgctaccttcgaattcacccccagagttgggtgcaccagattgccctgaggatggaggttctgggctgcgaggcacaggacctctacggcgccggatcacctggggccgaaacggccgaacaaaaactcatctcagaagaggatctgtcacctgcaaccggtcatcatcaccatcaccattga

SEQ ID NO: 873 - protein, 1769 aa, synthetic construct
  REGION 1..1769: note = Description of Artificial Sequence: Synthetic polypeptide
ATRRYYLGAVELSWDYMQSDLGELPVGAPTSESATPESGPGSEPATSGSETPGTSESATPESGPGSEPATSGSETPGTSESATPESGPGTSTEPSEGSAPGSPAGSPTSTEEGTSESATPESGPGSEPATSGSETPGTSESATPESGPGSPAGSPTSTEEGSPAGSPTSTEEGASSDARFPPRVPKSFPFNTSVVYKKTLFVEFTDHLFNIAKPRPPWMGLLGPTIQAEVYDTVVITLKNMASHPVSLHAVGVSYWKASEGAEYDDQTSQREKEDDKVFPGGSHTYVWQVLKENGPMASDPLCLTYSYLSHVDLVKDLNSGLIGALLVCREGSLAKEKTQTLHKFILLFAVFDEGKSWHSETKNSLMQDRDAASARAWPKMHTVNGYVNRSLPGLIGCHRKSVYWHVIGMGTTPEVHSIFLEGHTFLVRNHRQASLEISPITFLTAQTLLMDLGQFLLFCHISSHQHDGMEAYVKVDSCPEEPQLRMKNNEEAEDYDDDLTDSEMDVVRFDDDNSPSFIQIRSVAKKHPKTWVHYIAAEEEDWDYAPLVLAPDGAPGASPGTSSTGSPGSSPSASTGTGPGSSPSASTGTGPGTPGSGTASSSPGSSTPSGATGSPGSSPSASTGTGPGASPGTSSTGSPGTPGSGTASSSPGSSTPSGATGSPGTPGSGTASSSPGASPGTSSTGSPGASPGTSSTGSPASSDRSYKSQYLNNGPQRIGRKYKKVRFMAYTDETFKTREAIQHESGILGPLLYGEVGDTLLIIFKNQASRPYNIYPHGITDVRPLYSRRLPKGVKHLKDFPILPGEIFKYKWTVTVEDGPTKSDPRCLTRYYSSFVNMERDLASGLIGPLLICYKESVDQRGNQIMSDKRNVILFSVFDENRSWYLTENIQRFLPNPAGVQLEDPEFQASNIMHSINGYVFDSLQLSVCLHEVAYWYILSIGAQTDFLSVFFSGYTFKHKMVYEDTLTLFPFSGETVFMSMENPGLWILGCHNSDFRNRGMTALLKVSSCDKNTGDYYEDSYEDISAYLLSKNNAIEPRSFSQNPPVLKRHQREITRTTLQSDQEEIDYDDTISVEMKKEDFDIYDEDENQSPRSFQKKTRHYFIAAVERLWDYGMSSSPHVLRNRAQSGSVPQFKKVVFQEFTDGSFTQPLYRGELNEHLGLLGPYIRAEVEDNIMVTFRNQASRPYSFYSSLISYEEDQRQGAEPRKNFVKPNETKTYFWKVQHHMAPTKDEFDCKAWAYFSDVDLEKDVHSGLIGPLLVCHTNTLNPAHGRQVTVQEFALFFTIFDETKSWYFTENMERNCRAPCNIQMEDPTFKENYRFHAINGYIMDTLPGLVMAQDQRIRWYLLSMGSNENIHSIHFSGHVFTVRKKEEYKMALYNLYPGVFETVEMLPSKAGIWRVECLIGEHLHAGMSTLFLVYSNKCQTPLGMASGHIRDFQITASGQYGQWAPKLARLHYSGSINAWSTKEPFSWIKVDLLAPMIIHGIKTQGARQKFSSLYISQFIIMYSLDGKKWQTYRGNSTGTLMVFFGNVDSSGIKHNIFNPPIIARYIRLHPTHYSIRSTLRMELMGCDLNSCSMPLGMESKAISDAQITASSYFTNMFATWSPSKARLHLQGRSNAWRPQVNNPKEWLQVDFQKTMKVTGVTTQGVKSLLTSMYVKEFLISSSQDGHQWTLFFQNGKVKVFQGNQDSFTPVVNSLDPPLLTRYLRIHPQSWVHQIALRMEVLGCEAQDLYGAGSPGAETAEQKLISEEDLSPATGHHHHHH

SEQ ID NO: 874 - DNA, 5310 bp, synthetic construct
  misc_feature 1..5310: note = Description of Artificial Sequence: Synthetic polynucleotide
  source 1..5310: mol_type = other DNA
gccaccagaagatactacctgggtgcagtggaactgtcatgggactatatgcaaagtgatctcggtgagctgcctgtgggcgcgccaacatcagagagcgccacccctgaaagtggtcccgggagcgagccagccacatctgggtcggaaacgccaggcacaagtgagtctgcaactcccgagtccggacctggctccgagcctgccactagcggctccgagactccgggaacttccgagagcgctacaccagaaagcggacccggaaccagtaccgaacctagcgagggctctgctccgggcagcccagccggctctcctacatccacggaggagggcacttccgaatccgccaccccggagtcagggccaggatctgaacccgctacctcaggcagtgagacgccaggaacgagcgagtccgctacaccggagagtgggccagggagccctgctggatctcctacgtccactgaggaagggtcaccagcgggctcgcccaccagcactgaagaaggtgcctcgagcgacgcaagatttcctcctagagtgccaaaatcttttccattcaacacctcagtcgtgtacaaaaagactctgtttgtagaattcacggatcaccttttcaacatcgctaagccaaggccaccctggatgggtctgctaggtcctaccatccaggctgaggtttatgatacagtggtcattacacttaagaacatggcttcccatcctgtcagtcttcatgctgttggtgtatcctactggaaagcttctgagggagctgaatatgatgatcagaccagtcaaagggagaaagaagatgataaagtcttccctggtggaagccatacatatgtctggcaggtcctgaaagagaatggtccaatggcctctgacccactgtgccttacctactcatatctttctcatgtggacctggtaaaagacttgaattcaggcctcattggagccctactagtatgtagagaagggagtctggccaaggaaaagacacagaccttgcacaaatttatactactttttgctgtatttgatgaagggaaaagttggcactcagaaacaaagaactccttgatgcaggatagggatgctgcatctgctcgggcctggcctaaaatgcacacagtcaatggttatgtaaacaggtctctgccaggtctgattggatgccacaggaaatcagtctattggcatgtgattggaatgggcaccactcctgaagtgcactcaatattcctcgaaggtcacacatttcttgtgaggaaccatcgccaggctagcttggaaatctcgccaataactttccttactgctcaaacactcttgatggaccttggacagtttctactgttttgtcatatctcttcccaccaacatgatggcatggaagcttatgtcaaagtagacagctgtccagaggaaccccaactacgaatgaaaaataatgaagaagcggaagactatgatgatgatcttactgattctgaaatggatgtggtcaggtttgatgatgacaactctccttcctttatccaaattcgctcagttgccaagaagcatcctaaaacttgggtacattacattgctgctgaagaggaggactgggactatgctcccttagtcctcgcccccgatggcgcgccaggtgcctcgccgggaacatcatcaactggttcacccgggtcatccccctcggcctcaaccgggacgggtcccggctcatcccccagcgccagcactggaacaggtcctggcactcctggttccggtacggcatcgtcatccccgggaagctcaacaccgtccggagcgacaggatcacctggctcgtcaccttcggcgtcaactggaacggggccaggggcctcacccggaacgtcctcgactgggtcgcctggtacgccgggatcaggaacggcctcatcctcgcctgggtcctcaacgccctcgggtgcgactggttcgccgggaactcctggctcggggacggcctcgtcgtcgcctggggcatcaccggggacgagctccacggggtcccctggagcgtcaccggggacctcctcgacaggtagcccggcctcgagcgacagaagttataaaagtcaatatttgaacaatggccctcagcggattggtaggaagtacaaaaaagtccgatttatggcatacacagatgaaacctttaagactcgtgaagctattcagcatgaatcaggaatcttgggacctttactttatggggaagttggagacacactgttgattatatttaagaatcaagcaagcagaccatataacatctaccctcacggaatcactgatgtccgtcctttgtattcaaggagattaccaaaaggtgtaaaacatttgaaggattttccaattctgccaggagaaatattcaaatataaatggacagtgactgtagaagatgggccaactaaatcagatcctcggtgcctgacccgctattactctagtttcgttaatatggagagagatctagcttcaggactcattggccctctcctcatctgctacaaagaatctgtagatcaaagaggaaaccagataatgtcagacaagaggaatgtcatcctgttttctgtatttgatgagaaccgaagctggtacctcacagagaatatacaacgctttctccccaatccagctggagtgcagcttgaggatccagagttccaagcctccaacatcatgcacagcatcaatggctatgtttttgatagtttgcagttgtcagtttgtttgcatgaggtggcatactggtacattctaagcattggagcacagactgacttcctttctgtcttcttctctggatataccttcaaacacaaaatggtctatgaagacacactcaccctattcccattctcaggagaaactgtcttcatgtcgatggaaaacccaggtctatggattctggggtgccacaactcagactttcggaacagaggcatgaccgccttactgaaggtttctagttgtgacaagaacactggtgattattacgaggacagttatgaagatatttcagcatacttgctgagtaaaaacaatgccattgaaccaagaagcttctctcaaaacccaccagtcttgaaacgccatcaacgggaaataactcgtactactcttcagtcagatcaagaggaaatcgattatgatgataccatatcagttgaaatgaagaaggaagattttgacatttatgatgaggatgaaaatcagagcccccgcagctttcaaaagaaaacacgacactattttattgctgcagtggagaggctctgggattatgggatgagtagctccccacatgttctaagaaacagggctcagagtggcagtgtccctcagttcaagaaagttgttttccaggaatttactgatggctcctttactcagcccttataccgtggagaactaaatgaacatttgggactcctggggccatatataagagcagaagttgaagataatatcatggtaactttcagaaatcaggcctctcgtccctattccttctattctagccttatttcttatgaggaagatcagaggcaaggagcagaacctagaaaaaactttgtcaagcctaatgaaaccaaaacttacttttggaaagtgcaacatcatatggcacccactaaagatgagtttgactgcaaagcctgggcttatttctctgatgttgacctggaaaaagatgtgcactcaggcctgattggaccccttctggtctgccacactaacacactgaaccctgctcatgggagacaagtgacagtacaggaatttgctctgtttttcaccatctttgatgagaccaaaagctggtacttcactgaaaatatggaaagaaactgcagggctccctgcaatatccagatggaagatcccacttttaaagagaattatcgcttccatgcaatcaatggctacataatggatacactacctggcttagtaatggctcaggatcaaaggattcgatggtatctgctcagcatgggcagcaatgaaaacatccattctattcatttcagtggacatgtgttcactgtacgaaaaaaagaggagtataaaatggcactgtacaatctctatccaggtgtttttgagacagtggaaatgttaccatccaaagctggaatttggcgggtggaatgccttattggcgagcatctacatgctgggatgagcacactttttctggtgtacagcaataagtgtcagactcccctgggaatggcttctggacacattagagattttcagattacagcttcaggacaatatggacagtgggccccaaagctggccagacttcattattccggatcaatcaatgcctggagcaccaaggagcccttttcttggatcaaggtggatctgttggcaccaatgattattcacggcatcaagacccagggtgcccgtcagaagttctccagcctctacatctctcagtttatcatcatgtatagtcttgatgggaagaagtggcagacttatcgaggaaattccactggaaccttaatggtcttctttggcaatgtggattcatctgggataaaacacaatatttttaaccctccaattattgctcgatacatccgtttgcacccaactcattatagcattcgcagcactcttcgcatggagttgatgggctgtgatttaaatagttgcagcatgccattgggaatggagagtaaagcaatatcagatgcacagattactgcttcatcctactttaccaatatgtttgccacctggtctccttcaaaagctcgacttcacctccaagggaggagtaatgcctggagacctcaggtgaataatccaaaagagtggctgcaagtggacttccagaagacaatgaaagtcacaggagtaactactcagggagtaaaatctctgcttaccagcatgtatgtgaaggagttcctcatctccagcagtcaagatggccatcagtggactctcttttttcagaatggcaaagtaaaggtttttcagggaaatcaagactccttcacacctgtggtgaactctctagacccaccgttactgactcgctaccttcgaattcacccccagagttgggtgcaccagattgccctgaggatggaggttctgggctgcgaggcacaggacctctacggcgccggatcacctggggccgaaacggccgaacaaaaactcatctcagaagaggatctgtcacctgcaaccggtcatcatcaccatcaccattga

SEQ ID NO: 875 - protein, 1769 aa, synthetic construct
  REGION 1..1769: note = Description of Artificial Sequence: Synthetic polypeptide
ATRRYYLGAVELSWDYMQSDLGELPVGAPGSSPSASTGTGPGSSPSASTGTGPGASPGTSSTGSPGASPGTSSTGSPGSSTPSGATGSPGSSPSASTGTGPGASPGTSSTGSPGSSPSASTGTGPGTPGSGTASSSPGSSTPSGATGSPGSSTPSGATGSPGASPGTSSTGSPASSDARFPPRVPKSFPFNTSVVYKKTLFVEFTDHLFNIAKPRPPWMGLLGPTIQAEVYDTVVITLKNMASHPVSLHAVGVSYWKASEGAEYDDQTSQREKEDDKVFPGGSHTYVWQVLKENGPMASDPLCLTYSYLSHVDLVKDLNSGLIGALLVCREGSLAKEKTQTLHKFILLFAVFDEGKSWHSETKNSLMQDRDAASARAWPKMHTVNGYVNRSLPGLIGCHRKSVYWHVIGMGTTPEVHSIFLEGHTFLVRNHRQASLEISPITFLTAQTLLMDLGQFLLFCHISSHQHDGMEAYVKVDSCPEEPQLRMKNNEEAEDYDDDLTDSEMDVVRFDDDNSPSFIQIRSVAKKHPKTWVHYIAAEEEDWDYAPLVLAPDDRSYKSQYLNNGPQRIGRKYKKVRFMAYTDETFKTREAIQHESGILGPLLYGEVGDTLLIIFKNQASRPYNIYPHGITDVRPLYSRRLPKGVKHLKDFPILPGEIFKYKWTVTVEDGPTKSDPRCLTRYYSSFVNMERDLASGLIGPLLICYKESVDQRGNQIMSDKRNVILFSVFDENRSWYLTENIQRFLPNPAGAPGASPGTSSTGSPGSSPSASTGTGPGSSPSASTGTGPGTPGSGTASSSPGSSTPSGATGSPGSSPSASTGTGPGASPGTSSTGSPGTPGSGTASSSPGSSTPSGATGSPGTPGSGTASSSPGASPGTSSTGSPGASPGTSSTGSPASSGVQLEDPEFQASNIMHSINGYVFDSLQLSVCLHEVAYWYILSIGAQTDFLSVFFSGYTFKHKMVYEDTLTLFPFSGETVFMSMENPGLWILGCHNSDFRNRGMTALLKVSSCDKNTGDYYEDSYEDISAYLLSKNNAIEPRSFSQNPPVLKRHQREITRTTLQSDQEEIDYDDTISVEMKKEDFDIYDEDENQSPRSFQKKTRHYFIAAVERLWDYGMSSSPHVLRNRAQSGSVPQFKKVVFQEFTDGSFTQPLYRGELNEHLGLLGPYIRAEVEDNIMVTFRNQASRPYSFYSSLISYEEDQRQGAEPRKNFVKPNETKTYFWKVQHHMAPTKDEFDCKAWAYFSDVDLEKDVHSGLIGPLLVCHTNTLNPAHGRQVTVQEFALFFTIFDETKSWYFTENMERNCRAPCNIQMEDPTFKENYRFHAINGYIMDTLPGLVMAQDQRIRWYLLSMGSNENIHSIHFSGHVFTVRKKEEYKMALYNLYPGVFETVEMLPSKAGIWRVECLIGEHLHAGMSTLFLVYSNKCQTPLGMASGHIRDFQITASGQYGQWAPKLARLHYSGSINAWSTKEPFSWIKVDLLAPMIIHGIKTQGARQKFSSLYISQFIIMYSLDGKKWQTYRGNSTGTLMVFFGNVDSSGIKHNIFNPPIIARYIRLHPTHYSIRSTLRMELMGCDLNSCSMPLGMESKAISDAQITASSYFTNMFATWSPSKARLHLQGRSNAWRPQVNNPKEWLQVDFQKTMKVTGVTTQGVKSLLTSMYVKEFLISSSQDGHQWTLFFQNGKVKVFQGNQDSFTPVVNSLDPPLLTRYLRIHPQSWVHQIALRMEVLGCEAQDLYGAGSPGAETAEQKLISEEDLSPATGHHHHHH

SEQ ID NO: 876 - DNA, 5310 bp, synthetic construct
  misc_feature 1..5310: note = Description of Artificial Sequence: Synthetic polynucleotide
  source 1..5310: mol_type = other DNA
gccaccagaagatactacctgggtgcagtggaactgtcatgggactatatgcaaagtgatctcggtgagctgcctgtgggcgcgccaggctccagcccctccgcgagcacgggaaccggaccaggttcgtcaccctcagcatcaacggggacgggaccgggggcgtcaccaggaacgtcctccaccggctcgccgggtgcatcacccggaacgtcatcgaccggatcgccagggagctcgacgccatcaggcgcaacaggatcacctggctcaagccctagcgcgtcaaccggcacgggtccgggtgcctcccctggcacgtccagcaccggatcacccggatcgagcccatccgcctcaaccggaaccggacccggtacaccagggtcgggaacagcctcctcgtcaccaggctcctcaaccccctcgggagccacgggttcgcccggttcgtcaacgccttccggagcaactggtagccccggagcatcgccaggaacttcgagcacggggtcgcccgcctcgagcgacgcaagatttcctcctagagtgccaaaatcttttccattcaacacctcagtcgtgtacaaaaagactctgtttgtagaattcacggatcaccttttcaacatcgctaagccaaggccaccctggatgggtctgctaggtcctaccatccaggctgaggtttatgatacagtggtcattacacttaagaacatggcttcccatcctgtcagtcttcatgctgttggtgtatcctactggaaagcttctgagggagctgaatatgatgatcagaccagtcaaagggagaaagaagatgataaagtcttccctggtggaagccatacatatgtctggcaggtcctgaaagagaatggtccaatggcctctgacccactgtgccttacctactcatatctttctcatgtggacctggtaaaagacttgaattcaggcctcattggagccctactagtatgtagagaagggagtctggccaaggaaaagacacagaccttgcacaaatttatactactttttgctgtatttgatgaagggaaaagttggcactcagaaacaaagaactccttgatgcaggatagggatgctgcatctgctcgggcctggcctaaaatgcacacagtcaatggttatgtaaacaggtctctgccaggtctgattggatgccacaggaaatcagtctattggcatgtgattggaatgggcaccactcctgaagtgcactcaatattcctcgaaggtcacacatttcttgtgaggaaccatcgccaggctagcttggaaatctcgccaataactttccttactgctcaaacactcttgatggaccttggacagtttctactgttttgtcatatctcttcccaccaacatgatggcatggaagcttatgtcaaagtagacagctgtccagaggaaccccaactacgaatgaaaaataatgaagaagcggaagactatgatgatgatcttactgattctgaaatggatgtggtcaggtttgatgatgacaactctccttcctttatccaaattcgctcagttgccaagaagcatcctaaaacttgggtacattacattgctgctgaagaggaggactgggactatgctcccttagtcctcgcccccgatgacagaagttataaaagtcaatatttgaacaatggccctcagcggattggtaggaagtacaaaaaagtccgatttatggcatacacagatgaaacctttaagactcgtgaagctattcagcatgaatcaggaatcttgggacctttactttatggggaagttggagacacactgttgattatatttaagaatcaagcaagcagaccatataacatctaccctcacggaatcactgatgtccgtcctttgtattcaaggagattaccaaaaggtgtaaaacatttgaaggattttccaattctgccaggagaaatattcaaatataaatggacagtgactgtagaagatgggccaactaaatcagatcctcggtgcctgacccgctattactctagtttcgttaatatggagagagatctagcttcaggactcattggccctctcctcatctgctacaaagaatctgtagatcaaagaggaaaccagataatgtcagacaagaggaatgtcatcctgttttctgtatttgatgagaaccgaagctggtacctcacagagaatatacaacgctttctccccaatccagctggcgcgccaggtgcctcgccgggaacatcatcaactggttcacccgggtcatccccctcggcctcaaccgggacgggtcccggctcatcccccagcgccagcactggaacaggtcctggcactcctggttccggtacggcatcgtcatccccgggaagctcaacaccgtccggagcgacaggatcacctggctcgtcaccttcggcgtcaactggaacggggccaggggcctcacccggaacgtcctcgactgggtcgcctggtacgccgggatcaggaacggcctcatcctcgcctgggtcctcaacgccctcgggtgcgactggttcgccgggaactcctggctcggggacggcctcgtcgtcgcctggggcatcaccggggacgagctccacggggtcccctggagcgtcaccggggacctcctcgacaggtagcccggcctcgagcggagtgcagcttgaggatccagagttccaagcctccaacatcatgcacagcatcaatggctatgtttttgatagtttgcagttgtcagtttgtttgcatgaggtggcatactggtacattctaagcattggagcacagactgacttcctttctgtcttcttctctggatataccttcaaacacaaaatggtctatgaagacacactcaccctattcccattctcaggagaaactgtcttcatgtcgatggaaaacccaggtctatggattctggggtgccacaactcagactttcggaacagaggcatgaccgccttactgaaggtttctagttgtgacaagaacactggtgattattacgaggacagttatgaagatatttcagcatacttgctgagtaaaaacaatgccattgaaccaagaagcttctctcaaaacccaccagtcttgaaacgccatcaacgggaaataactcgtactactcttcagtcagatcaagaggaaatcgattatgatgataccatatcagttgaaatgaagaaggaagattttgacatttatgatgaggatgaaaatcagagcccccgcagctttcaaaagaaaacacgacactattttattgctgcagtggagaggctctgggattatgggatgagtagctccccacatgttctaagaaacagggctcagagtggcagtgtccctcagttcaagaaagttgttttccaggaatttactgatggctcctttactcagcccttataccgtggagaactaaatgaacatttgggactcctggggccatatataagagcagaagttgaagataatatcatggtaactttcagaaatcaggcctctcgtccctattccttctattctagccttatttcttatgaggaagatcagaggcaaggagcagaacctagaaaaaactttgtcaagcctaatgaaaccaaaacttacttttggaaagtgcaacatcatatggcacccactaaagatgagtttgactgcaaagcctgggcttatttctctgatgttgacctggaaaaagatgtgcactcaggcctgattggaccccttctggtctgccacactaacacactgaaccctgctcatgggagacaagtgacagtacaggaatttgctctgtttttcaccatctttgatgagaccaaaagctggtacttcactgaaaatatggaaagaaactgcagggctccctgcaatatccagatggaagatcccacttttaaagagaattatcgcttccatgcaatcaatggctacataatggatacactacctggcttagtaatggctcaggatcaaaggattcgatggtatctgctcagcatgggcagcaatgaaaacatccattctattcatttcagtggacatgtgttcactgtacgaaaaaaagaggagtataaaatggcactgtacaatctctatccaggtgtttttgagacagtggaaatgttaccatccaaagctggaatttggcgggtggaatgccttattggcgagcatctacatgctgggatgagcacactttttctggtgtacagcaataagtgtcagactcccctgggaatggcttctggacacattagagattttcagattacagcttcaggacaatatggacagtgggccccaaagctggccagacttcattattccggatcaatcaatgcctggagcaccaaggagcccttttcttggatcaaggtggatctgttggcaccaatgattattcacggcatcaagacccagggtgcccgtcagaagttctccagcctctacatctctcagtttatcatcatgtatagtcttgatgggaagaagtggcagacttatcgaggaaattccactggaaccttaatggtcttctttggcaatgtggattcatctgggataaaacacaatatttttaaccctccaattattgctcgatacatccgtttgcacccaactcattatagcattcgcagcactcttcgcatggagttgatgggctgtgatttaaatagttgcagcatgccattgggaatggagagtaaagcaatatcagatgcacagattactgcttcatcctactttaccaatatgtttgccacctggtctccttcaaaagctcgacttcacctccaagggaggagtaatgcctggagacctcaggtgaataatccaaaagagtggctgcaagtggacttccagaagacaatgaaagtcacaggagtaactactcagggagtaaaatctctgcttaccagcatgtatgtgaaggagttcctcatctccagcagtcaagatggccatcagtggactctcttttttcagaatggcaaagtaaaggtttttcagggaaatcaagactccttcacacctgtggtgaactctctagacccaccgttactgactcgctaccttcgaattcacccccagagttgggtgcaccagattgccctgaggatggaggttctgggctgcgaggcacaggacctctacggcgccggatcacctggggccgaaacggccgaacaaaaactcatctcagaagaggatctgtcacctgcaaccggtcatcatcaccatcaccattga

SEQ ID NO: 877 - protein, 1769 aa, synthetic construct
  REGION 1..1769: note = Description of Artificial Sequence: Synthetic polypeptide
ATRRYYLGAVELSWDYMQSDLGELPVDARFPPRVPKSFPFGAPGSSPSASTGTGPGSSPSASTGTGPGASPGTSSTGSPGASPGTSSTGSPGSSTPSGATGSPGSSPSASTGTGPGASPGTSSTGSPGSSPSASTGTGPGTPGSGTASSSPGSSTPSGATGSPGSSTPSGATGSPGASPGTSSTGSPASSNTSVVYKKTLFVEFTDHLFNIAKPRPPWMGLLGPTIQAEVYDTVVITLKNMASHPVSLHAVGVSYWKASEGAEYDDQTSQREKEDDKVFPGGSHTYVWQVLKENGPMASDPLCLTYSYLSHVDLVKDLNSGLIGALLVCREGSLAKEKTQTLHKFILLFAVFDEGKSWHSETKNSLMQDRDAASARAWPKMHTVNGYVNRSLPGLIGCHRKSVYWHVIGMGTTPEVHSIFLEGHTFLVRNHRQASLEISPITFLTAQTLLMDLGQFLLFCHISSHQHDGMEAYVKVDSCPEEPQLRMKNNEEAEDYDDDLTDSEMDVVRFDDDNSPSFIQIRSVAKKHPKTWVHYIAAEEEDWDYAPLVLAPDDRSYKSQYLNNGPQRIGRKYKKVRFMAYTDETFKTREAIQHESGILGPLLYGEVGDTLLIIFKNQASRPYNIYPHGITDVRPLYSRRLPKGVKHLKDFPILPGEIFKYKWTVTVEDGPTKSDPRCLTRYYSSFVNMERDLASGLIGPLLICYKESVDQRGNQIMSDKRNVILFSVFDENRSWYLTENIQRFLPNPAGAPGASPGTSSTGSPGSSPSASTGTGPGSSPSASTGTGPGTPGSGTASSSPGSSTPSGATGSPGSSPSASTGTGPGASPGTSSTGSPGTPGSGTASSSPGSSTPSGATGSPGTPGSGTASSSPGASPGTSSTGSPGASPGTSSTGSPASSGVQLEDPEFQASNIMHSINGYVFDSLQLSVCLHEVAYWYILSIGAQTDFLSVFFSGYTFKHKMVYEDTLTLFPFSGETVFMSMENPGLWILGCHNSDFRNRGMTALLKVSSCDKNTGDYYEDSYEDISAYLLSKNNAIEPRSFSQNPPVLKRHQREITRTTLQSDQEEIDYDDTISVEMKKEDFDIYDEDENQSPRSFQKKTRHYFIAAVERLWDYGMSSSPHVLRNRAQSGSVPQFKKVVFQEFTDGSFTQPLYRGELNEHLGLLGPYIRAEVEDNIMVTFRNQASRPYSFYSSLISYEEDQRQGAEPRKNFVKPNETKTYFWKVQHHMAPTKDEFDCKAWAYFSDVDLEKDVHSGLIGPLLVCHTNTLNPAHGRQVTVQEFALFFTIFDETKSWYFTENMERNCRAPCNIQMEDPTFKENYRFHAINGYIMDTLPGLVMAQDQRIRWYLLSMGSNENIHSIHFSGHVFTVRKKEEYKMALYNLYPGVFETVEMLPSKAGIWRVECLIGEHLHAGMSTLFLVYSNKCQTPLGMASGHIRDFQITASGQYGQWAPKLARLHYSGSINAWSTKEPFSWIKVDLLAPMIIHGIKTQGARQKFSSLYISQFIIMYSLDGKKWQTYRGNSTGTLMVFFGNVDSSGIKHNIFNPPIIARYIRLHPTHYSIRSTLRMELMGCDLNSCSMPLGMESKAISDAQITASSYFTNMFATWSPSKARLHLQGRSNAWRPQVNNPKEWLQVDFQKTMKVTGVTTQGVKSLLTSMYVKEFLISSSQDGHQWTLFFQNGKVKVFQGNQDSFTPVVNSLDPPLLTRYLRIHPQSWVHQIALRMEVLGCEAQDLYGAGSPGAETAEQKLISEEDLSPATGHHHHHH

SEQ ID NO: 878 - DNA, 5310 bp, synthetic construct
  misc_feature 1..5310: note = Description of Artificial Sequence: Synthetic polynucleotide
  source 1..5310: mol_type = other DNA
gccaccagaagatactacctgggtgcagtggaactgtcatgggactatatgcaaagtgatctcggtgagctgcctgtggacgcaagatttcctcctagagtgccaaaatcttttccattcggcgcgccaggctccagcccctccgcgagcacgggaaccggaccaggttcgtcaccctcagcatcaacggggacgggaccgggggcgtcaccaggaacgtcctccaccggctcgccgggtgcatcacccggaacgtcatcgaccggatcgccagggagctcgacgccatcaggcgcaacaggatcacctggctcaagccctagcgcgtcaaccggcacgggtccgggtgcctcccctggcacgtccagcaccggatcacccggatcgagcccatccgcctcaaccggaaccggacccggtacaccagggtcgggaacagcctcctcgtcaccaggctcctcaaccccctcgggagccacgggttcgcccggttcgtcaacgccttccggagcaactggtagccccggagcatcgccaggaacttcgagcacggggtcgcccgcctcgagcaacacctcagtcgtgtacaaaaagactctgtttgtagaattcacggatcaccttttcaacatcgctaagccaaggccaccctggatgggtctgctaggtcctaccatccaggctgaggtttatgatacagtggtcattacacttaagaacatggcttcccatcctgtcagtcttcatgctgttggtgtatcctactggaaagcttctgagggagctgaatatgatgatcagaccagtcaaagggagaaagaagatgataaagtcttccctggtggaagccatacatatgtctggcaggtcctgaaagagaatggtccaatggcctctgacccactgtgccttacctactcatatctttctcatgtggacctggtaaaagacttgaattcaggcctcattggagccctactagtatgtagagaagggagtctggccaaggaaaagacacagaccttgcacaaatttatactactttttgctgtatttgatgaagggaaaagttggcactcagaaacaaagaactccttgatgcaggatagggatgctgcatctgctcgggcctggcctaaaatgcacacagtcaatggttatgtaaacaggtctctgccaggtctgattggatgccacaggaaatcagtctattggcatgtgattggaatgggcaccactcctgaagtgcactcaatattcctcgaaggtcacacatttcttgtgaggaaccatcgccaggctagcttggaaatctcgccaataactttccttactgctcaaacactcttgatggaccttggacagtttctactgttttgtcatatctcttcccaccaacatgatggcatggaagcttatgtcaaagtagacagctgtccagaggaaccccaactacgaatgaaaaataatgaagaagcggaagactatgatgatgatcttactgattctgaaatggatgtggtcaggtttgatgatgacaactctccttcctttatccaaattcgctcagttgccaagaagcatcctaaaacttgggtacattacattgctgctgaagaggaggactgggactatgctcccttagtcctcgcccccgatgacagaagttataaaagtcaatatttgaacaatggccctcagcggattggtaggaagtacaaaaaagtccgatttatggcatacacagatgaaacctttaagactcgtgaagctattcagcatgaatcaggaatcttgggacctttactttatggggaagttggagacacactgttgattatatttaagaatcaagcaagcagaccatataacatctaccctcacggaatcactgatgtccgtcctttgtattcaaggagattaccaaaaggtgtaaaacatttgaaggattttccaattctgccaggagaaatattcaaatataaatggacagtgactgtagaagatgggccaactaaatcagatcctcggtgcctgacccgctattactctagtttcgttaatatggagagagatctagcttcaggactcattggccctctcctcatctgctacaaagaatctgtagatcaaagaggaaaccagataatgtcagacaagaggaatgtcatcctgttttctgtatttgatgagaaccgaagctggtacctcacagagaatatacaacgctttctccccaatccagctggcgcgccaggtgcctcgccgggaacatcatcaactggttcacccgggtcatccccctcggcctcaaccgggacgggtcccggctcatcccccagcgccagcactggaacaggtcctggcactcctggttccggtacggcatcgtcatccccgggaagctcaacaccgtccggagcgacaggatcacctggctcgtcaccttcggcgtcaactggaacggggccaggggcctcacccggaacgtcctcgactgggtcgcctggtacgccgggatcaggaacggcctcatcctcgcctgggtcctcaacgccctcgggtgcgactggttcgccgggaactcctggctcggggacggcctcgtcgtcgcctggggcatcaccggggacgagctccacggggtcccctggagcgtcaccggggacctcctcgacaggtagcccggcctcgagcggagtgcagcttgaggatccagagttccaagcctccaacatcatgcacagcatcaatggctatgtttttgatagtttgcagttgtcagtttgtttgcatgaggtggcatactggtacattctaagcattggagcacagactgacttcctttctgtcttcttctctggatataccttcaaacacaaaatggtctatgaagacacactcaccctattcccattctcaggagaaactgtcttcatgtcgatggaaaacccaggtctatggattctggggtgccacaactcagactttcggaacagaggcatgaccgccttactgaaggtttctagttgtgacaagaacactggtgattattacgaggacagttatgaagatatttcagcatacttgctgagtaaaaacaatgccattgaaccaagaagcttctctcaaaacccaccagtcttgaaacgccatcaacgggaaataactcgtactactcttcagtcagatcaagaggaaatcgattatgatgataccatatcagttgaaatgaagaaggaagattttgacatttatgatgaggatgaaaatcagagcccccgcagctttcaaaagaaaacacgacactattttattgctgcagtggagaggctctgggattatgggatgagtagctccccacatgttctaagaaacagggctcagagtggcagtgtccctcagttcaagaaagttgttttccaggaatttactgatggctcctttactcagcccttataccgtggagaactaaatgaacatttgggactcctggggccatatataagagcagaagttgaagataatatcatggtaactttcagaaatcaggcctctcgtccctattccttctattctagccttatttcttatgaggaagatcagaggcaaggagcagaacctagaaaaaactttgtcaagcctaatgaaaccaaaacttacttttggaaagtgcaacatcatatggcacccactaaagatgagtttgactgcaaagcctgggcttatttctctgatgttgacctggaaaaagatgtgcactcaggcctgattggaccccttctggtctgccacactaacacactgaaccctgctcatgggagacaagtgacagtacaggaatttgctctgtttttcaccatctttgatgagaccaaaagctggtacttcactgaaaatatggaaagaaactgcagggctccctgcaatatccagatggaagatcccacttttaaagagaattatcgcttccatgcaatcaatggctacataatggatacactacctggcttagtaatggctcaggatcaaaggattcgatggtatctgctcagcatgggcagcaatgaaaacatccattctattcatttcagtggacatgtgttcactgtacgaaaaaaagaggagtataaaatggcactgtacaatctctatccaggtgtttttgagacagtggaaatgttaccatccaaagctggaatttggcgggtggaatgccttattggcgagcatctacatgctgggatgagcacactttttctggtgtacagcaataagtgtcagactcccctgggaatggcttctggacacattagagattttcagattacagcttcaggacaatatggacagtgggccccaaagctggccagacttcattattccggatcaatcaatgcctggagcaccaaggagcccttttcttggatcaaggtggatctgttggcaccaatgattattcacggcatcaagacccagggtgcccgtcagaagttctccagcctctacatctctcagtttatcatcatgtatagtcttgatgggaagaagtggcagacttatcgaggaaattccactggaaccttaatggtcttctttggcaatgtggattcatctgggataaaacacaatatttttaaccctccaattattgctcgatacatccgtttgcacccaactcattatagcattcgcagcactcttcgcatggagttgatgggctgtgatttaaatagttgcagcatgccattgggaatggagagtaaagcaatatcagatgcacagattactgcttcatcctactttaccaatatgtttgccacctggtctccttcaaaagctcgacttcacctccaagggaggagtaatgcctggagacctcaggtgaataatccaaaagagtggctgcaagtggacttccagaagacaatgaaagtcacaggagtaactactcagggagtaaaatctctgcttaccagcatgtatgtgaaggagttcctcatctccagcagtcaagatggccatcagtggactctcttttttcagaatggcaaagtaaaggtttttcagggaaatcaagactccttcacacctgtggtgaactctctagacccaccgttactgactcgctaccttcgaattcacccccagagttgggtgcaccagattgccctgaggatggaggttctgggctgcgaggcacaggacctctacggcgccggatcacctggggccgaaacggccgaacaaaaactcatctcagaagaggatctgtcacctgcaaccggtcatcatcaccatcaccattga

SEQ ID NO: 879 - protein, 1769 aa, synthetic construct
  REGION 1..1769: note = Description of Artificial Sequence: Synthetic polypeptide
ATRRYYLGAVELSWDYMQSDLGELPVGAPTSESATPESGPGSEPATSGSETPGTSESATPESGPGSEPATSGSETPGTSESATPESGPGTSTEPSEGSAPGSPAGSPTSTEEGTSESATPESGPGSEPATSGSETPGTSESATPESGPGSPAGSPTSTEEGSPAGSPTSTEEGASSDARFPPRVPKSFPFNTSVVYKKTLFVEFTDHLFNIAKPRPPWMGLLGPTIQAEVYDTVVITLKNMASHPVSLHAVGVSYWKASEGAEYDDQTSQREKEDDKVFPGGSHTYVWQVLKENGPMASDPLCLTYSYLSHVDLVKDLNSGLIGALLVCREGSLAKEKTQTLHKFILLFAVFDEGKSWHSETKNSLMQDRDAASARAWPKMHTVNGYVNRSLPGLIGCHRKSVYWHVIGMGTTPEVHSIFLEGHTFLVRNHRQASLEISPITFLTAQTLLMDLGQFLLFCHISSHQHDGMEAYVKVDSCPEEPQLRMKNNEEAEDYDDDLTDSEMDVVRFDDDNSPSFIQIRSVAKKHPKTWVHYIAAEEEDWDYAPLVLAPDDRSYKSQYLNNGPQRIGRKYKKVRFMAYTDETFKTREAIQHESGILGPLLYGEVGDTLLIIFKNQASRPYNIYPHGITDVRPLYSRRLPKGVKHLKDFPILPGEIFKYKWTVTVEDGPTKSDPRCLTRYYSSFVNMERDLASGLIGPLLICYKESVDQRGNQIMSDKRNVILFSVFDENRSWYLTENIQRFLPNPAGAPGASPGTSSTGSPGSSPSASTGTGPGSSPSASTGTGPGTPGSGTASSSPGSSTPSGATGSPGSSPSASTGTGPGASPGTSSTGSPGTPGSGTASSSPGSSTPSGATGSPGTPGSGTASSSPGASPGTSSTGSPGASPGTSSTGSPASSGVQLEDPEFQASNIMHSINGYVFDSLQLSVCLHEVAYWYILSIGAQTDFLSVFFSGYTFKHKMVYEDTLTLFPFSGETVFMSMENPGLWILGCHNSDFRNRGMTALLKVSSCDKNTGDYYEDSYEDISAYLLSKNNAIEPRSFSQNPPVLKRHQREITRTTLQSDQEEIDYDDTISVEMKKEDFDIYDEDENQSPRSFQKKTRHYFIAAVERLWDYGMSSSPHVLRNRAQSGSVPQFKKVVFQEFTDGSFTQPLYRGELNEHLGLLGPYIRAEVEDNIMVTFRNQASRPYSFYSSLISYEEDQRQGAEPRKNFVKPNETKTYFWKVQHHMAPTKDEFDCKAWAYFSDVDLEKDVHSGLIGPLLVCHTNTLNPAHGRQVTVQEFALFFTIFDETKSWYFTENMERNCRAPCNIQMEDPTFKENYRFHAINGYIMDTLPGLVMAQDQRIRWYLLSMGSNENIHSIHFSGHVFTVRKKEEYKMALYNLYPGVFETVEMLPSKAGIWRVECLIGEHLHAGMSTLFLVYSNKCQTPLGMASGHIRDFQITASGQYGQWAPKLARLHYSGSINAWSTKEPFSWIKVDLLAPMIIHGIKTQGARQKFSSLYISQFIIMYSLDGKKWQTYRGNSTGTLMVFFGNVDSSGIKHNIFNPPIIARYIRLHPTHYSIRSTLRMELMGCDLNSCSMPLGMESKAISDAQITASSYFTNMFATWSPSKARLHLQGRSNAWRPQVNNPKEWLQVDFQKTMKVTGVTTQGVKSLLTSMYVKEFLISSSQDGHQWTLFFQNGKVKVFQGNQDSFTPVVNSLDPPLLTRYLRIHPQSWVHQIALRMEVLGCEAQDLYGAGSPGAETAEQKLISEEDLSPATGHHHHHH

SEQ ID NO: 880 - DNA, 5310 bp, synthetic construct
  misc_feature 1..5310: note = Description of Artificial Sequence: Synthetic polynucleotide
  source 1..5310: mol_type = other DNA
gccaccagaagatactacctgggtgcagtggaactgtcatgggactatatgcaaagtgatctcggtgagctgcctgtgggcgcgccaacatcagagagcgccacccctgaaagtggtcccgggagcgagccagccacatctgggtcggaaacgccaggcacaagtgagtctgcaactcccgagtccggacctggctccgagcctgccactagcggctccgagactccgggaacttccgagagcgctacaccagaaagcggacccggaaccagtaccgaacctagcgagggctctgctccgggcagcccagccggctctcctacatccacggaggagggcacttccgaatccgccaccccggagtcagggccaggatctgaacccgctacctcaggcagtgagacgccaggaacgagcgagtccgctacaccggagagtgggccagggagccctgctggatctcctacgtccactgaggaagggtcaccagcgggctcgcccaccagcactgaagaaggtgcctcgagcgacgcaagatttcctcctagagtgccaaaatcttttccattcaacacctcagtcgtgtacaaaaagactctgtttgtagaattcacggatcaccttttcaacatcgctaagccaaggccaccctggatgggtctgctaggtcctaccatccaggctgaggtttatgatacagtggtcattacacttaagaacatggcttcccatcctgtcagtcttcatgctgttggtgtatcctactggaaagcttctgagggagctgaatatgatgatcagaccagtcaaagggagaaagaagatgataaagtcttccctggtggaagccatacatatgtctggcaggtcctgaaagagaatggtccaatggcctctgacccactgtgccttacctactcatatctttctcatgtggacctggtaaaagacttgaattcaggcctcattggagccctactagtatgtagagaagggagtctggccaaggaaaagacacagaccttgcacaaatttatactactttttgctgtatttgatgaagggaaaagttggcactcagaaacaaagaactccttgatgcaggatagggatgctgcatctgctcgggcctggcctaaaatgcacacagtcaatggttatgtaaacaggtctctgccaggtctgattggatgccacaggaaatcagtctattggcatgtgattggaatgggcaccactcctgaagtgcactcaatattcctcgaaggtcacacatttcttgtgaggaaccatcgccaggctagcttggaaatctcgccaataactttccttactgctcaaacactcttgatggaccttggacagtttctactgttttgtcatatctcttcccaccaacatgatggcatggaagcttatgtcaaagtagacagctgtccagaggaaccccaactacgaatgaaaaataatgaagaagcggaagactatgatgatgatcttactgattctgaaatggatgtggtcaggtttgatgatgacaactctccttcctttatccaaattcgctcagttgccaagaagcatcctaaaacttgggtacattacattgctgctgaagaggaggactgggactatgctcccttagtcctcgcccccgatgacagaagttataaaagtcaatatttgaacaatggccctcagcggattggtaggaagtacaaaaaagtccgatttatggcatacacagatgaaacctttaagactcgtgaagctattcagcatgaatcaggaatcttgggacctttactttatggggaagttggagacacactgttgattatatttaagaatcaagcaagcagaccatataacatctaccctcacggaatcactgatgtccgtcctttgtattcaaggagattaccaaaaggtgtaaaacatttgaaggattttccaattctgccaggagaaatattcaaatataaatggacagtgactgtagaagatgggccaactaaatcagatcctcggtgcctgacccgctattactctagtttcgttaatatggagagagatctagcttcaggactcattggccctctcctcatctgctacaaagaatctgtagatcaaagaggaaaccagataatgtcagacaagaggaatgtcatcctgttttctgtatttgatgagaaccgaagctggtacctcacagagaatatacaacgctttctccccaatccagctggcgcgccaggtgcctcgccgggaacatcatcaactggttcacccgggtcatccccctcggcctcaaccgggacgggtcccggctcatcccccagcgccagcactggaacaggtcctggcactcctggttccggtacggcatcgtcatccccgggaagctcaacaccgtccggagcgacaggatcacctggctcgtcaccttcggcgtcaactggaacggggccaggggcctcacccggaacgtcctcgactgggtcgcctggtacgccgggatcaggaacggcctcatcctcgcctgggtcctcaacgccctcgggtgcgactggttcgccgggaactcctggctcggggacggcctcgtcgtcgcctggggcatcaccggggacgagctccacggggtcccctggagcgtcaccggggacctcctcgacaggtagcccggcctcgagcggagtgcagcttgaggatccagagttccaagcctccaacatcatgcacagcatcaatggctatgtttttgatagtttgcagttgtcagtttgtttgcatgaggtggcatactggtacattctaagcattggagcacagactgacttcctttctgtcttcttctctggatataccttcaaacacaaaatggtctatgaagacacactcaccctattcccattctcaggagaaactgtcttcatgtcgatggaaaacccaggtctatggattctggggtgccacaactcagactttcggaacagaggcatgaccgccttactgaaggtttctagttgtgacaagaacactggtgattattacgaggacagttatgaagatatttcagcatacttgctgagtaaaaacaatgccattgaaccaagaagcttctctcaaaacccaccagtcttgaaacgccatcaacgggaaataactcgtactactcttcagtcagatcaagaggaaatcgattatgatgataccatatcagttgaaatgaagaaggaagattttgacatttatgatgaggatgaaaatcagagcccccgcagctttcaaaagaaaacacgacactattttattgctgcagtggagaggctctgggattatgggatgagtagctccccacatgttctaagaaacagggctcagagtggcagtgtccctcagttcaagaaagttgttttccaggaatttactgatggctcctttactcagcccttataccgtggagaactaaatgaacatttgggactcctggggccatatataagagcagaagttgaagataatatcatggtaactttcagaaatcaggcctctcgtccctattccttctattctagccttatttcttatgaggaagatcagaggcaaggagcagaacctagaaaaaactttgtcaagcctaatgaaaccaaaacttacttttggaaagtgcaacatcatatggcacccactaaagatgagtttgactgcaaagcctgggcttatttctctgatgttgacctggaaaaagatgtgcactcaggcctgattggaccccttctggtctgccacactaacacactgaaccctgctcatgggagacaagtgacagtacaggaatttgctctgtttttcaccatctttgatgagaccaaaagctggtacttcactgaaaatatggaaagaaactgcagggctccctgcaatatccagatggaagatcccacttttaaagagaattatcgcttccatgcaatcaatggctacataatggatacactacctggcttagtaatggctcaggatcaaaggattcgatggtatctgctcagcatgggcagcaatgaaaacatccattctattcatttcagtggacatgtgttcactgtacgaaaaaaagaggagtataaaatggcactgtacaatctctatccaggtgtttttgagacagtggaaatgttaccatccaaagctggaatttggcgggtggaatgccttattggcgagcatctacatgctgggatgagcacactttttctggtgtacagcaataagtgtcagactcccctgggaatggcttctggacacattagagattttcagattacagcttcaggacaatatggacagtgggccccaaagctggccagacttcattattccggatcaatcaatgcctggagcaccaaggagcccttttcttggatcaaggtggatctgttggcaccaatgattattcacggcatcaagacccagggtgcccgtcagaagttctccagcctctacatctctcagtttatcatcatgtatagtcttgatgggaagaagtggcagacttatcgaggaaattccactggaaccttaatggtcttctttggcaatgtggattcatctgggataaaacacaatatttttaaccctccaattattgctcgatacatccgtttgcacccaactcattatagcattcgcagcactcttcgcatggagttgatgggctgtgatttaaatagttgcagcatgccattgggaatggagagtaaagcaatatcagatgcacagattactgcttcatcctactttaccaatatgtttgccacctggtctccttcaaaagctcgacttcacctccaagggaggagtaatgcctggagacctcaggtgaataatccaaaagagtggctgcaagtggacttccagaagacaatgaaagtcacaggagtaactactcagggagtaaaatctctgcttaccagcatgtatgtgaaggagttcctcatctccagcagtcaagatggccatcagtggactctcttttttcagaatggcaaagtaaaggtttttcagggaaatcaagactccttcacacctgtggtgaactctctagacccaccgttactgactcgctaccttcgaattcacccccagagttgggtgcaccagattgccctgaggatggaggttctgggctgcgaggcacaggacctctacggcgccggatcacctggggccgaaacggccgaacaaaaactcatctcagaagaggatctgtcacctgcaaccggtcatcatcaccatcaccattga

SEQ ID NO: 881 - protein, 1769 aa, synthetic construct
  REGION 1..1769: note = Description of Artificial Sequence: Synthetic polypeptide
ATRRYYLGAVELSWDYMQGAPTSESATPESGPGSEPATSGSETPGTSESATPESGPGSEPATSGSETPGTSESATPESGPGTSTEPSEGSAPGSPAGSPTSTEEGTSESATPESGPGSEPATSGSETPGTSESATPESGPGSPAGSPTSTEEGSPAGSPTSTEEGASSSDLGELPVDARFPPRVPKSFPFNTSVVYKKTLFVEFTDHLFNIAKPRPPWMGLLGPTIQAEVYDTVVITLKNMASHPVSLHAVGVSYWKASEGAEYDDQTSQREKEDDKVFPGGSHTYVWQVLKENGPMASDPLCLTYSYLSHVDLVKDLNSGLIGALLVCREGSLAKEKTQTLHKFILLFAVFDEGKSWHSETKNSLMQDRDAASARAWPKMHTVNGYVNRSLPGLIGCHRKSVYWHVIGMGTTPEVHSIFLEGHTFLVRNHRQASLEISPITFLTAQTLLMDLGQFLLFCHISSHQHDGMEAYVKVDSCPEEPQLRMKNNEEAEDYDDDLTDSEMDVVRFDDDNSPSFIQIRSVAKKHPKTWVHYIAAEEEDWDYAPLVLAPDDRSYKSQYLNNGPQRIGRKYKKVRFMAYTDETFKTREAIQHESGILGPLLYGEVGDTLLIIFKNQASRPYNIYPHGITDVRPLYSRRLPKGVKHLKDFPILPGEIFKYKWTVTVEDGPTKSDPRCLTRYYSSFVNMERDLASGLIGPLLICYKESVDQRGNQIMSDKRNVILFSVFDENRSWYLTENIQRFLPNPAGAPGASPGTSSTGSPGSSPSASTGTGPGSSPSASTGTGPGTPGSGTASSSPGSSTPSGATGSPGSSPSASTGTGPGASPGTSSTGSPGTPGSGTASSSPGSSTPSGATGSPGTPGSGTASSSPGASPGTSSTGSPGASPGTSSTGSPASSGVQLEDPEFQASNIMHSINGYVFDSLQLSVCLHEVAYWYILSIGAQTDFLSVFFSGYTFKHKMVYEDTLTLFPFSGETVFMSMENPGLWILGCHNSDFRNRGMTALLKVSSCDKNTGDYYEDSYEDISAYLLSKNNAIEPRSFSQNPPVLKRHQREITRTTLQSDQEEIDYDDTISVEMKKEDFDIYDEDENQSPRSFQKKTRHYFIAAVERLWDYGMSSSPHVLRNRAQSGSVPQFKKVVFQEFTDGSFTQPLYRGELNEHLGLLGPYIRAEVEDNIMVTFRNQASRPYSFYSSLISYEEDQRQGAEPRKNFVKPNETKTYFWKVQHHMAPTKDEFDCKAWAYFSDVDLEKDVHSGLIGPLLVCHTNTLNPAHGRQVTVQEFALFFTIFDETKSWYFTENMERNCRAPCNIQMEDPTFKENYRFHAINGYIMDTLPGLVMAQDQRIRWYLLSMGSNENIHSIHFSGHVFTVRKKEEYKMALYNLYPGVFETVEMLPSKAGIWRVECLIGEHLHAGMSTLFLVYSNKCQTPLGMASGHIRDFQITASGQYGQWAPKLARLHYSGSINAWSTKEPFSWIKVDLLAPMIIHGIKTQGARQKFSSLYISQFIIMYSLDGKKWQTYRGNSTGTLMVFFGNVDSSGIKHNIFNPPIIARYIRLHPTHYSIRSTLRMELMGCDLNSCSMPLGMESKAISDAQITASSYFTNMFATWSPSKARLHLQGRSNAWRPQVNNPKEWLQVDFQKTMKVTGVTTQGVKSLLTSMYVKEFLISSSQDGHQWTLFFQNGKVKVFQGNQDSFTPVVNSLDPPLLTRYLRIHPQSWVHQIALRMEVLGCEAQDLYGAGSPGAETAEQKLISEEDLSPATGHHHHHH

SEQ ID NO: 882 - DNA, 5310 bp, synthetic construct
  misc_feature 1..5310: note = Description of Artificial Sequence: Synthetic polynucleotide
  source 1..5310: mol_type = other DNA
gccaccagaagatactacctgggtgcagtggaactgtcatgggactatatgcaaggcgcgccaacatcagagagcgccacccctgaaagtggtcccgggagcgagccagccacatctgggtcggaaacgccaggcacaagtgagtctgcaactcccgagtccggacctggctccgagcctgccactagcggctccgagactccgggaacttccgagagcgctacaccagaaagcggacccggaaccagtaccgaacctagcgagggctctgctccgggcagcccagccggctctcctacatccacggaggagggcacttccgaatccgccaccccggagtcagggccaggatctgaacccgctacctcaggcagtgagacgccaggaacgagcgagtccgctacaccggagagtgggccagggagccctgctggatctcctacgtccactgaggaagggtcaccagcgggctcgcccaccagcactgaagaaggtgcctcgagcagtgatctcggtgagctgcctgtggacgcaagatttcctcctagagtgccaaaatcttttccattcaacacctcagtcgtgtacaaaaagactctgtttgtagaattcacggatcaccttttcaacatcgctaagccaaggccaccctggatgggtctgctaggtcctaccatccaggctgaggtttatgatacagtggtcattacacttaagaacatggcttcccatcctgtcagtcttcatgctgttggtgtatcctactggaaagcttctgagggagctgaatatgatgatcagaccagtcaaagggagaaagaagatgataaagtcttccctggtggaagccatacatatgtctggcaggtcctgaaagagaatggtccaatggcctctgacccactgtgccttacctactcatatctttctcatgtggacctggtaaaagacttgaattcaggcctcattggagccctactagtatgtagagaagggagtctggccaaggaaaagacacagaccttgcacaaatttatactactttttgctgtatttgatgaagggaaaagttggcactcagaaacaaagaactccttgatgcaggatagggatgctgcatctgctcgggcctggcctaaaatgcacacagtcaatggttatgtaaacaggtctctgccaggtctgattggatgccacaggaaatcagtctattggcatgtgattggaatgggcaccactcctgaagtgcactcaatattcctcgaaggtcacacatttcttgtgaggaaccatcgccaggctagcttggaaatctcgccaataactttccttactgctcaaacactcttgatggaccttggacagtttctactgttttgtcatatctcttcccaccaacatgatggcatggaagcttatgtcaaagtagacagctgtccagaggaaccccaactacgaatgaaaaataatgaagaagcggaagactatgatgatgatcttactgattctgaaatggatgtggtcaggtttgatgatgacaactctccttcctttatccaaattcgctcagttgccaagaagcatcctaaaacttgggtacattacattgctgctgaagaggaggactgggactatgctcccttagtcctcgcccccgatgacagaagttataaaagtcaatatttgaacaatggccctcagcggattggtaggaagtacaaaaaagtccgatttatggcatacacagatgaaacctttaagactcgtgaagctattcagcatgaatcaggaatcttgggacctttactttatggggaagttggagacacactgttgattatatttaagaatcaagcaagcagaccatataacatctaccctcacggaatcactgatgtccgtcctttgtattcaaggagattaccaaaaggtgtaaaacatttgaaggattttccaattctgccaggagaaatattcaaatataaatggacagtgactgtagaagatgggccaactaaatcagatcctcggtgcctgacccgctattactctagtttcgttaatatggagagagatctagcttcaggactcattggccctctcctcatctgctacaaagaatctgtagatcaaagaggaaaccagataatgtcagacaagaggaatgtcatcctgttttctgtatttgatgagaaccgaagctggtacctcacagagaatatacaacgctttctccccaatccagctggcgcgccaggtgcctcgccgggaacatcatcaactggttcacccgggtcatccccctcggcctcaaccgggacgggtcccggctcatcccccagcgccagcactggaacaggtcctggcactcctggttccggtacggcatcgtcatccccgggaagctcaacaccgtccggagcgacaggatcacctggctcgtcaccttcggcgtcaactggaacggggccaggggcctcacccggaacgtcctcgactgggtcgcctggtacgccgggatcaggaacggcctcatcctcgcctgggtcctcaacgccctcgggtgcgactggttcgccgggaactcctggctcggggacggcctcgtcgtcgcctggggcatcaccggggacgagctccacggggtcccctggagcgtcaccggggacctcctcgacaggtagcccggcctcgagcggagtgcagcttgaggatccagagttccaagcctccaacatcatgcacagcatcaatggctatgtttttgatagtttgcagttgtcagtttgtttgcatgaggtggcatactggtacattctaagcattggagcacagactgacttcctttctgtcttcttctctggatataccttcaaacacaaaatggtctatgaagacacactcaccctattcccattctcaggagaaactgtcttcatgtcgatggaaaacccaggtctatggattctggggtgccacaactcagactttcggaacagaggcatgaccgccttactgaaggtttctagttgtgacaagaacactggtgattattacgaggacagttatgaagatatttcagcatacttgctgagtaaaaacaatgccattgaaccaagaagcttctctcaaaacccaccagtcttgaaacgccatcaacgggaaataactcgtactactcttcagtcagatcaagaggaaatcgattatgatgataccatatcagttgaaatgaagaaggaagattttgacatttatgatgaggatgaaaatcagagcccccgcagctttcaaaagaaaacacgacactattttattgctgcagtggagaggctctgggattatgggatgagtagctccccacatgttctaagaaacagggctcagagtggcagtgtccctcagttcaagaaagttgttttccaggaatttactgatggctcctttactcagcccttataccgtggagaactaaatgaacatttgggactcctggggccatatataagagcagaagttgaagataatatcatggtaactttcagaaatcaggcctctcgtccctattccttctattctagccttatttcttatgaggaagatcagaggcaaggagcagaacctagaaaaaactttgtcaagcctaatgaaaccaaaacttacttttggaaagtgcaacatcatatggcacccactaaagatgagtttgactgcaaagcctgggcttatttctctgatgttgacctggaaaaagatgtgcactcaggcctgattggaccccttctggtctgccacactaacacactgaaccctgctcatgggagacaagtgacagtacaggaatttgctctgtttttcaccatctttgatgagaccaaaagctggtacttcactgaaaatatggaaagaaactgcagggctccctgcaatatccagatggaagatcccacttttaaagagaattatcgcttccatgcaatcaatggctacataatggatacactacctggcttagtaatggctcaggatcaaaggattcgatggtatctgctcagcatgggcagcaatgaaaacatccattctattcatttcagtggacatgtgttcactgtacgaaaaaaagaggagtataaaatggcactgtacaatctctatccaggtgtttttgagacagtggaaatgttaccatccaaagctggaatttggcgggtggaatgccttattggcgagcatctacatgctgggatgagcacactttttctggtgtacagcaataagtgtcagactcccctgggaatggcttctggacacattagagattttcagattacagcttcaggacaatatggacagtgggccccaaagctggccagacttcattattccggatcaatcaatgcctggagcaccaaggagcccttttcttggatcaaggtggatctgttggcaccaatgattattcacggcatcaagacccagggtgcccgtcagaagttctccagcctctacatctctcagtttatcatcatgtatagtcttgatgggaagaagtggcagacttatcgaggaaattccactggaaccttaatggtcttctttggcaatgtggattcatctgggataaaacacaatatttttaaccctccaattattgctcgatacatccgtttgcacccaactcattatagcattcgcagcactcttcgcatggagttgatgggctgtgatttaaatagttgcagcatgccattgggaatggagagtaaagcaatatcagatgcacagattactgcttcatcctactttaccaatatgtttgccacctggtctccttcaaaagctcgacttcacctccaagggaggagtaatgcctggagacctcaggtgaataatccaaaagagtggctgcaagtggacttccagaagacaatgaaagtcacaggagtaactactcagggagtaaaatctctgcttaccagcatgtatgtgaaggagttcctcatctccagcagtcaagatggccatcagtggactctcttttttcagaatggcaaagtaaaggtttttcagggaaatcaagactccttcacacctgtggtgaactctctagacccaccgttactgactcgctaccttcgaattcacccccagagttgggtgcaccagattgccctgaggatggaggttctgggctgcgaggcacaggacctctacggcgccggatcacctggggccgaaacggccgaacaaaaactcatctcagaagaggatctgtcacctgcaaccggtcatcatcaccatcaccattga

SEQ ID NO: 883 - protein, 1769 aa, synthetic construct
  REGION 1..1769: note = Description of Artificial Sequence: Synthetic polypeptide
ATRRYYLGAVELSWDYMQSDLGELPVDARFPPRVPKSFPFGAPTSESATPESGPGSEPATSGSETPGTSESATPESGPGSEPATSGSETPGTSESATPESGPGTSTEPSEGSAPGSPAGSPTSTEEGTSESATPESGPGSEPATSGSETPGTSESATPESGPGSPAGSPTSTEEGSPAGSPTSTEEGASSNTSVVYKKTLFVEFTDHLFNIAKPRPPWMGLLGPTIQAEVYDTVVITLKNMASHPVSLHAVGVSYWKASEGAEYDDQTSQREKEDDKVFPGGSHTYVWQVLKENGPMASDPLCLTYSYLSHVDLVKDLNSGLIGALLVCREGSLAKEKTQTLHKFILLFAVFDEGKSWHSETKNSLMQDRDAASARAWPKMHTVNGYVNRSLPGLIGCHRKSVYWHVIGMGTTPEVHSIFLEGHTFLVRNHRQASLEISPITFLTAQTLLMDLGQFLLFCHISSHQHDGMEAYVKVDSCPEEPQLRMKNNEEAEDYDDDLTDSEMDVVRFDDDNSPSFIQIRSVAKKHPKTWVHYIAAEEEDWDYAPLVLAPDDRSYKSQYLNNGPQRIGRKYKKVRFMAYTDETFKTREAIQHESGILGPLLYGEVGDTLLIIFKNQASRPYNIYPHGITDVRPLYSRRLPKGVKHLKDFPILPGEIFKYKWTVTVEDGPTKSDPRCLTRYYSSFVNMERDLASGLIGPLLICYKESVDQRGNQIMSDKRNVILFSVFDENRSWYLTENIQRFLPNPAGAPGASPGTSSTGSPGSSPSASTGTGPGSSPSASTGTGPGTPGSGTASSSPGSSTPSGATGSPGSSPSASTGTGPGASPGTSSTGSPGTPGSGTASSSPGSSTPSGATGSPGTPGSGTASSSPGASPGTSSTGSPGASPGTSSTGSPASSGVQLEDPEFQASNIMHSINGYVFDSLQLSVCLHEVAYWYILSIGAQTDFLSVFFSGYTFKHKMVYEDTLTLFPFSGETVFMSMENPGLWILGCHNSDFRNRGMTALLKVSSCDKNTGDYYEDSYEDISAYLLSKNNAIEPRSFSQNPPVLKRHQREITRTTLQSDQEEIDYDDTISVEMKKEDFDIYDEDENQSPRSFQKKTRHYFIAAVERLWDYGMSSSPHVLRNRAQSGSVPQFKKVVFQEFTDGSFTQPLYRGELNEHLGLLGPYIRAEVEDNIMVTFRNQASRPYSFYSSLISYEEDQRQGAEPRKNFVKPNETKTYFWKVQHHMAPTKDEFDCKAWAYFSDVDLEKDVHSGLIGPLLVCHTNTLNPAHGRQVTVQEFALFFTIFDETKSWYFTENMERNCRAPCNIQMEDPTFKENYRFHAINGYIMDTLPGLVMAQDQRIRWYLLSMGSNENIHSIHFSGHVFTVRKKEEYKMALYNLYPGVFETVEMLPSKAGIWRVECLIGEHLHAGMSTLFLVYSNKCQTPLGMASGHIRDFQITASGQYGQWAPKLARLHYSGSINAWSTKEPFSWIKVDLLAPMIIHGIKTQGARQKFSSLYISQFIIMYSLDGKKWQTYRGNSTGTLMVFFGNVDSSGIKHNIFNPPIIARYIRLHPTHYSIRSTLRMELMGCDLNSCSMPLGMESKAISDAQITASSYFTNMFATWSPSKARLHLQGRSNAWRPQVNNPKEWLQVDFQKTMKVTGVTTQGVKSLLTSMYVKEFLISSSQDGHQWTLFFQNGKVKVFQGNQDSFTPVVNSLDPPLLTRYLRIHPQSWVHQIALRMEVLGCEAQDLYGAGSPGAETAEQKLISEEDLSPATGHHHHHH

SEQ ID NO: 884 - DNA, 5310 bp, synthetic construct
  misc_feature 1..5310: note = Description of Artificial Sequence: Synthetic polynucleotide
  source 1..5310: mol_type = other DNA
gccaccagaagatactacctgggtgcagtggaactgtcatgggactatatgcaaagtgatctcggtgagctgcctgtggacgcaagatttcctcctagagtgccaaaatcttttccattcggcgcgccaacatcagagagcgccacccctgaaagtggtcccgggagcgagccagccacatctgggtcggaaacgccaggcacaagtgagtctgcaactcccgagtccggacctggctccgagcctgccactagcggctccgagactccgggaacttccgagagcgctacaccagaaagcggacccggaaccagtaccgaacctagcgagggctctgctccgggcagcccagccggctctcctacatccacggaggagggcacttccgaatccgccaccccggagtcagggccaggatctgaacccgctacctcaggcagtgagacgccaggaacgagcgagtccgctacaccggagagtgggccagggagccctgctggatctcctacgtccactgaggaagggtcaccagcgggctcgcccaccagcactgaagaaggtgcctcgagcaacacctcagtcgtgtacaaaaagactctgtttgtagaattcacggatcaccttttcaacatcgctaagccaaggccaccctggatgggtctgctaggtcctaccatccaggctgaggtttatgatacagtggtcattacacttaagaacatggcttcccatcctgtcagtcttcatgctgttggtgtatcctactggaaagcttctgagggagctgaatatgatgatcagaccagtcaaagggagaaagaagatgataaagtcttccctggtggaagccatacatatgtctggcaggtcctgaaagagaatggtccaatggcctctgacccactgtgccttacctactcatatctttctcatgtggacctggtaaaagacttgaattcaggcctcattggagccctactagtatgtagagaagggagtctggccaaggaaaagacacagaccttgcacaaatttatactactttttgctgtatttgatgaagggaaaagttggcactcagaaacaaagaactccttgatgcaggatagggatgctgcatctgctcgggcctggcctaaaatgcacacagtcaatggttatgtaaacaggtctctgccaggtctgattggatgccacaggaaatcagtctattggcatgtgattggaatgggcaccactcctgaagtgcactcaatattcctcgaaggtcacacatttcttgtgaggaaccatcgccaggctagcttggaaatctcgccaataactttccttactgctcaaacactcttgatggaccttggacagtttctactgttttgtcatatctcttcccaccaacatgatggcatggaagcttatgtcaaagtagacagctgtccagaggaaccccaactacgaatgaaaaataatgaagaagcggaagactatgatgatgatcttactgattctgaaatggatgtggtcaggtttgatgatgacaactctccttcctttatccaaattcgctcagttgccaagaagcatcctaaaacttgggtacattacattgctgctgaagaggaggactgggactatgctcccttagtcctcgcccccgatgacagaagttataaaagtcaatatttgaacaatggccctcagcggattggtaggaagtacaaaaaagtccgatttatggcatacacagatgaaacctttaagactcgtgaagctattcagcatgaatcaggaatcttgggacctttactttatggggaagttggagacacactgttgattatatttaagaatcaagcaagcagaccatataacatctaccctcacggaatcactgatgtccgtcctttgtattcaaggagattaccaaaaggtgtaaaacatttgaaggattttccaattctgccaggagaaatattcaaatataaatggacagtgactgtagaagatgggccaactaaatcagatcctcggtgcctgacccgctattactctagtttcgttaatatggagagagatctagcttcaggactcattggccctctcctcatctgctacaaagaatctgtagatcaaagaggaaaccagataatgtcagacaagaggaatgtcatcctgttttctgtatttgatgagaaccgaagctggtacctcacagagaatatacaacgctttctccccaatccagctggcgcgccaggtgcctcgccgggaacatcatcaactggttcacccgggtcatccccctcggcctcaaccgggacgggtcccggctcatcccccagcgccagcactggaacaggtcctggcactcctggttccggtacggcatcgtcatccccgggaagctcaacaccgtccggagcgacaggatcacctggctcgtcaccttcggcgtcaactggaacggggccaggggcctcacccggaacgtcctcgactgggtcgcctggtacgccgggatcaggaacggcctcatcctcgcctgggtcctcaacgccctcgggtgcgactggttcgccgggaactcctggctcggggacggcctcgtcgtcgcctggggcatcaccggggacgagctccacggggtcccctggagcgtcaccggggacctcctcgacaggtagcccggcctcgagcggagtgcagcttgaggatccagagttccaagcctccaacatcatgcacagcatcaatggctatgtttttgatagtttgcagttgtcagtttgtttgcatgaggtggcatactggtacattctaagcattggagcacagactgacttcctttctgtcttcttctctggatataccttcaaacacaaaatggtctatgaagacacactcaccctattcccattctcaggagaaactgtcttcatgtcgatggaaaacccaggtctatggattctggggtgccacaactcagactttcggaacagaggcatgaccgccttactgaaggtttctagttgtgacaagaacactggtgattattacgaggacagttatgaagatatttcagcatacttgctgagtaaaaacaatgccattgaaccaagaagcttctctcaaaacccaccagtcttgaaacgccatcaacgggaaataactcgtactactcttcagtcagatcaagaggaaatcgattatgatgataccatatcagttgaaatgaagaaggaagattttgacatttatgatgaggatgaaaatcagagcccccgcagctttcaaaagaaaacacgacactattttattgctgcagtggagaggctctgggattatgggatgagtagctccccacatgttctaagaaacagggctcagagtggcagtgtccctcagttcaagaaagttgttttccaggaatttactgatggctcctttactcagcccttataccgtggagaactaaatgaacatttgggactcctggggccatatataagagcagaagttgaagataatatcatggtaactttcagaaatcaggcctctcgtccctattccttctattctagccttatttcttatgaggaagatcagaggcaaggagcagaacctagaaaaaactttgtcaagcctaatgaaaccaaaacttacttttggaaagtgcaacatcatatggcacccactaaagatgagtttgactgcaaagcctgggcttatttctctgatgttgacctggaaaaagatgtgcactcaggcctgattggaccccttctggtctgccacactaacacactgaaccctgctcatgggagacaagtgacagtacaggaatttgctctgtttttcaccatctttgatgagaccaaaagctggtacttcactgaaaatatggaaagaaactgcagggctccctgcaatatccagatggaagatcccacttttaaagagaattatcgcttccatgcaatcaatggctacataatggatacactacctggcttagtaatggctcaggatcaaaggattcgatggtatctgctcagcatgggcagcaatgaaaacatccattctattcatttcagtggacatgtgttcactgtacgaaaaaaagaggagtataaaatggcactgtacaatctctatccaggtgtttttgagacagtggaaatgttaccatccaaagctggaatttggcgggtggaatgccttattggcgagcatctacatgctgggatgagcacactttttctggtgtacagcaataagtgtcagactcccctgggaatggcttctggacacattagagattttcagattacagcttcaggacaatatggacagtgggccccaaagctggccagacttcattattccggatcaatcaatgcctggagcaccaaggagcccttttcttggatcaaggtggatctgttggcaccaatgattattcacggcatcaagacccagggtgcccgtcagaagttctccagcctctacatctctcagtttatcatcatgtatagtcttgatgggaagaagtggcagacttatcgaggaaattccactggaaccttaatggtcttctttggcaatgtggattcatctgggataaaacacaatatttttaaccctccaattattgctcgatacatccgtttgcacccaactcattatagcattcgcagcactcttcgcatggagttgatgggctgtgatttaaatagttgcagcatgccattgggaatggagagtaaagcaatatcagatgcacagattactgcttcatcctactttaccaatatgtttgccacctggtctccttcaaaagctcgacttcacctccaagggaggagtaatgcctggagacctcaggtgaataatccaaaagagtggctgcaagtggacttccagaagacaatgaaagtcacaggagtaactactcagggagtaaaatctctgcttaccagcatgtatgtgaaggagttcctcatctccagcagtcaagatggccatcagtggactctcttttttcagaatggcaaagtaaaggtttttcagggaaatcaagactccttcacacctgtggtgaactctctagacccaccgttactgactcgctaccttcgaattcacccccagagttgggtgcaccagattgccctgaggatggaggttctgggctgcgaggcacaggacctctacggcgccggatcacctggggccgaaacggccgaacaaaaactcatctcagaagaggatctgtcacctgcaaccggtcatcatcaccatcaccattga

SEQ ID NO: 885 - protein, 1759 aa, synthetic construct
  REGION 1..1759: note = Description of Artificial Sequence: Synthetic polypeptide
ATRRYYLGAVELSWDYMQSDLGELPVDARFPPRVPKSFPFNTSVVYKKTLFVEFTDHLFNIAKPRPPWMGLLGPTIQAEVYDTVVITLKNMASHPVSLHAVGVSYWKASEGAEYDDQTSQREKEDDKVFPGGSHTYVWQVLKENGPMASDPLCLTYSYLSHVDLVKDLNSGLIGALLVCREGSLAKEKTQTLHKFILLFAVFDEGKSWHSETKNSLMQDRDAASARAWPKMHTVNGYVNRSLPGLIGCHRKSVYWHVIGMGTTPEVHSIFLEGHTFLVRNHRQASLEISPITFLTAQTLLMDLGQFLLFCHISSHQHDGMEAYVKVDSCPEEPQLRMKNNEEAEDYDDDLTDSEMDVVRFDDDNSPSFIQIRSVAKKHPKTWVHYIAAEEEDWDYAPLVLAPDDRSYKSQYLNNGPQRIGRKYKKVRFMAYTDETFKTREAIQHESGILGPLLYGEVGDTLLIIFKNQASRPYNIYPHGITDVRPLYSRRLPKGVKHLKDFPILPGEIFKYKWTVTVEDGPTKSDPRCLTRYYSSFVNMERDLASGLIGPLLICYKESVDQRGNQIMSDKRNVILFSVFDENRSWYLTENIQRFLPNPAGVQLEDPEFQASNIMHSINGYVFDSLQLSVCLHEVAYWYILSIGAQTDFLSVFFSGYTFKHKMVYEDTLTLFPFSGETVFMSMENPGLWILGCHNSDFRNRGMTALLKVSSCDKNTGDYYEDSYEDISAYLLSKNNAIEPRSFSQNGAPSPAGSPTSTEEGTSESATPESGPGSEPATSGSETPGTSESATPESGPGTSTEPSEGSAPGTSTEPSEGSAPGTSTEPSEGSAPGTSTEPSEGSAPGTSTEPSEGSAPGTSTEPSEGSAPGSPAGSPTSTEEGTSTEPSEGSAPGASSPPVLKRHQREITRTTLQSDQEEIDYDDTISVEMKKEDFDIYDEDENQSPRSFQKKTRHYFIAAVERLWDYGMSSSPHVLRNRAQSGSVPQFKKVVFQEFTDGSFTQPLYRGELNEHLGLLGPYIRAEVEDNIMVTFRNQASRPYSFYSSLISYEEDQRQGAEPRKNFVKPNETKTYFWKVQHHMAPTKDEFDCKAWAYFSDVDLEKDVHSGLIGPLLVCHTNTLNPAHGRQVTVQEFALFFTIFDETKSWYFTENMERNCRAPCNIQMEDPTFKENYRFHAINGYIMDTLPGLVMAQDQRIRWYLLSMGSNENIHSIHFSGHVFTVRKKEEYKMALYNLYPGVFETVEMLPSKAGIWRVECLIGEHLHAGMSTLFLVYSNKCQTPLGMASGHIRDFQITASGQYGQWAPKLARLHYSGSINAWSTKEPFSWIKVDLLAPMIIHGIKTQGARQKFSSLYISQFIIMYSLDGKKWQTYRGNSTGTLMVFFGNVDSSGIKHNIFNPPIIARYIRLHPTHYSIRSTLRMELMGCDLNSCSMPLGMESKAISDAQITASSYFTNMFATWSPSKARLHLQGRSNAWRPQVNNPKEWLQVDFQKTMKVTGVTTQGVKSLLTSMYVKEFLISSSQDGHQWTLFFQNGKVKVFQGNQDSFTPVVNSLDPPLLTRYLRIHPQSWVHQIALRMEVLGCEAQDLYGAPPGSSPSASTGTGPGSSPSASTGTGPGTPGSGTASSSPGSSTPSGATGSPGSSPSASTGTGPGASPGTSSTGSPGTPGSGTASSSPGSSTPSGATGSPGTPGSGTASSSPGASPGTSSTGSPGASPGTSSTGSPGTPGSGTASSSASSEQKLISEEDLSPATGHHHHHH

SEQ ID NO: 886 - DNA, 5280 bp, synthetic construct
  misc_feature 1..5280: note = Description of Artificial Sequence: Synthetic polynucleotide
  source 1..5280: mol_type = other DNA
gccaccagaagatactacctgggtgcagtggaactgtcatgggactatatgcaaagtgatctcggtgagctgcctgtggacgcaagatttcctcctagagtgccaaaatcttttccattcaacacctcagtcgtgtacaaaaagactctgtttgtagaattcacggatcaccttttcaacatcgctaagccaaggccaccctggatgggtctgctaggtcctaccatccaggctgaggtttatgatacagtggtcattacacttaagaacatggcttcccatcctgtcagtcttcatgctgttggtgtatcctactggaaagcttctgagggagctgaatatgatgatcagaccagtcaaagggagaaagaagatgataaagtcttccctggtggaagccatacatatgtctggcaggtcctgaaagagaatggtccaatggcctctgacccactgtgccttacctactcatatctttctcatgtggacctggtaaaagacttgaattcaggcctcattggagccctactagtatgtagagaagggagtctggccaaggaaaagacacagaccttgcacaaatttatactactttttgctgtatttgatgaagggaaaagttggcactcagaaacaaagaactccttgatgcaggatagggatgctgcatctgctcgggcctggcctaaaatgcacacagtcaatggttatgtaaacaggtctctgccaggtctgattggatgccacaggaaatcagtctattggcatgtgattggaatgggcaccactcctgaagtgcactcaatattcctcgaaggtcacacatttcttgtgaggaaccatcgccaggctagcttggaaatctcgccaataactttccttactgctcaaacactcttgatggaccttggacagtttctactgttttgtcatatctcttcccaccaacatgatggcatggaagcttatgtcaaagtagacagctgtccagaggaaccccaactacgaatgaaaaataatgaagaagcggaagactatgatgatgatcttactgattctgaaatggatgtggtcaggtttgatgatgacaactctccttcctttatccaaattcgctcagttgccaagaagcatcctaaaacttgggtacattacattgctgctgaagaggaggactgggactatgctcccttagtcctcgcccccgatgacagaagttataaaagtcaatatttgaacaatggccctcagcggattggtaggaagtacaaaaaagtccgatttatggcatacacagatgaaacctttaagactcgtgaagctattcagcatgaatcaggaatcttgggacctttactttatggggaagttggagacacactgttgattatatttaagaatcaagcaagcagaccatataacatctaccctcacggaatcactgatgtccgtcctttgtattcaaggagattaccaaaaggtgtaaaacatttgaaggattttccaattctgccaggagaaatattcaaatataaatggacagtgactgtagaagatgggccaactaaatcagatcctcggtgcctgacccgctattactctagtttcgttaatatggagagagatctagcttcaggactcattggccctctcctcatctgctacaaagaatctgtagatcaaagaggaaaccagataatgtcagacaagaggaatgtcatcctgttttctgtatttgatgagaaccgaagctggtacctcacagagaatatacaacgctttctccccaatccagctggagtgcagcttgaggatccagagttccaagcctccaacatcatgcacagcatcaatggctatgtttttgatagtttgcagttgtcagtttgtttgcatgaggtggcatactggtacattctaagcattggagcacagactgacttcctttctgtcttcttctctggatataccttcaaacacaaaatggtctatgaagacacactcaccctattcccattctcaggagaaactgtcttcatgtcgatggaaaacccaggtctatggattctggggtgccacaactcagactttcggaacagaggcatgaccgccttactgaaggtttctagttgtgacaagaacactggtgattattacgaggacagttatgaagatatttcagcatacttgctgagtaaaaacaatgccattgaaccaagaagcttctctcaaaacggcgcgccaagtcccgctggaagcccaactagcaccgaagaggggacctcagagtccgccacccccgagtccggccctggctctgagcctgccactagcggctccgagactcctggcacatccgaaagcgctacacccgagagtggacccggcacctctaccgagcccagtgagggctccgcccctggaacaagcaccgagcccagcgaaggcagcgccccagggacctccacagagcccagtgaaggcagtgctcctggcaccagcaccgaaccaagcgagggctctgcacccgggacctccaccgagccaagcgaaggctctgcccctggcacttccaccgagcccagcgaaggcagcgcccctgggagccccgctggctctcccaccagcactgaggagggcacatctaccgaaccaagtgaaggctctgcaccaggtgcctcgagcccaccagtcttgaaacgccatcaacgggaaataactcgtactactcttcagtcagatcaagaggaaatcgattatgatgataccatatcagttgaaatgaagaaggaagattttgacatttatgatgaggatgaaaatcagagcccccgcagctttcaaaagaaaacacgacactattttattgctgcagtggagaggctctgggattatgggatgagtagctccccacatgttctaagaaacagggctcagagtggcagtgtccctcagttcaagaaagttgttttccaggaatttactgatggctcctttactcagcccttataccgtggagaactaaatgaacatttgggactcctggggccatatataagagcagaagttgaagataatatcatggtaactttcagaaatcaggcctctcgtccctattccttctattctagccttatttcttatgaggaagatcagaggcaaggagcagaacctagaaaaaactttgtcaagcctaatgaaaccaaaacttacttttggaaagtgcaacatcatatggcacccactaaagatgagtttgactgcaaagcctgggcttatttctctgatgttgacctggaaaaagatgtgcactcaggcctgattggaccccttctggtctgccacactaacacactgaaccctgctcatgggagacaagtgacagtacaggaatttgctctgtttttcaccatctttgatgagaccaaaagctggtacttcactgaaaatatggaaagaaactgcagggctccctgcaatatccagatggaagatcccacttttaaagagaattatcgcttccatgcaatcaatggctacataatggatacactacctggcttagtaatggctcaggatcaaaggattcgatggtatctgctcagcatgggcagcaatgaaaacatccattctattcatttcagtggacatgtgttcactgtacgaaaaaaagaggagtataaaatggcactgtacaatctctatccaggtgtttttgagacagtggaaatgttaccatccaaagctggaatttggcgggtggaatgccttattggcgagcatctacatgctgggatgagcacactttttctggtgtacagcaataagtgtcagactcccctgggaatggcttctggacacattagagattttcagattacagcttcaggacaatatggacagtgggccccaaagctggccagacttcattattccggatcaatcaatgcctggagcaccaaggagcccttttcttggatcaaggtggatctgttggcaccaatgattattcacggcatcaagacccagggtgcccgtcagaagttctccagcctctacatctctcagtttatcatcatgtatagtcttgatgggaagaagtggcagacttatcgaggaaattccactggaaccttaatggtcttctttggcaatgtggattcatctgggataaaacacaatatttttaaccctccaattattgctcgatacatccgtttgcacccaactcattatagcattcgcagcactcttcgcatggagttgatgggctgtgatttaaatagttgcagcatgccattgggaatggagagtaaagcaatatcagatgcacagattactgcttcatcctactttaccaatatgtttgccacctggtctccttcaaaagctcgacttcacctccaagggaggagtaatgcctggagacctcaggtgaataatccaaaagagtggctgcaagtggacttccagaagacaatgaaagtcacaggagtaactactcagggagtaaaatctctgcttaccagcatgtatgtgaaggagttcctcatctccagcagtcaagatggccatcagtggactctcttttttcagaatggcaaagtaaaggtttttcagggaaatcaagactccttcacacctgtggtgaactctctagacccaccgttactgactcgctaccttcgaattcacccccagagttgggtgcaccagattgccctgaggatggaggttctgggctgcgaggcacaggacctctacggcgcgccacccgggtcgtccccgtcggcgtccaccggaacagggccagggtcatccccgtcagcgtcgactgggacgggacccgggacacccggttcggggactgcatcctcctcgcctggttcgtccaccccgtcaggagccacgggttcgccgggaagcagcccaagcgcatccactggtacagggcctggggcttcaccgggtacttcatccacggggtcaccgggaacgcccggatcggggacggcttcctcatcaccaggatcgtcaacaccctcgggcgcaacgggcagccccggaacccctggttcgggtacggcgtcgtcgagccccggtgcgagcccgggaacaagctcgacaggatcgcctggggcgtcacccggcacgtcgagcacaggcagccccggaacccctggatcgggaaccgcgtcgtcaagcgcctcgagcgaacaaaaactcatctcagaagaggatctgtcacctgcaaccggtcatcatcaccatcaccattga

SEQ ID NO: 887 - protein, 1903 aa, synthetic construct
  REGION 1..1903: note = Description of Artificial Sequence: Synthetic polypeptide
ATRRYYLGAVELSWDYMQSDLGELPVDARFPPRVPKSFPFNTSVVYKKTLFVEFTDHLFNIAKPRPPWMGLLGPTIQAEVYDTVVITLKNMASHPVSLHAVGVSYWKASEGAEYDDQTSQREKEDDKVFPGGSHTYVWQVLKENGPMASDPLCLTYSYLSHVDLVKDLNSGLIGALLVCREGSLAKEKTQTLHKFILLFAVFDEGKSWHSETKNSLMQDRDAASARAWPKMHTVNGYVNRSLPGLIGCHRKSVYWHVIGMGTTPEVHSIFLEGHTFLVRNHRQASLEISPITFLTAQTLLMDLGQFLLFCHISSHQHDGMEAYVKVDSCPEEPQLRMKNNEEAEDYDDDLTDSEMDVVRFDDDNSPSFIQIRSVAKKHPKTWVHYIAAEEEDWDYAPLVLAPDDRSYKSQYLNNGPQRIGRKYKKVRFMAYTDETFKTREAIQHESGILGPLLYGEVGDTLLIIFKNQASRPYNIYPHGITDVRPLYSRRLPKGVKHLKDFPILPGEIFKYKWTVTVEDGPTKSDPRCLTRYYSSFVNMERDLASGLIGPLLICYKESVDQRGNQIMSDKRNVILFSVFDENRSWYLTENIQRFLPNPAGVQLEDPEFQASNIMHSINGYVFDSLQLSVCLHEVAYWYILSIGAQTDFLSVFFSGYTFKHKMVYEDTLTLFPFSGETVFMSMENPGLWILGCHNSDFRNRGMTALLKVSSCDKNTGDYYEDSYEDISAYLLSKNNAIEPRSFSQNGAPPGASPGTSSTGSPGASPGTSSTGSPGTPGSGTASSSPGSSTPSGATGSPGTPGSGTASSSPGSSTPSGATGSPGTPGSGTASSSPGSSTPSGATGSPGSSTPSGATGSPGSSPSASTGTGPGSSPSASTGTGPGASPGTSSTGSPGTPGSGTASSSPGSSTPSGATGSPGSSPSASTGTGPGSSPSASTGTGPGASPGTSSTGSPGASPGTSSTGSPGSSTPSGATGSPGSSPSASTGTGPGASPGTSSTGSPGSSPSASTGTGPGTPGSGTASSSPGSSTPSGATGSASSPPVLKRHQAEITRTTLQSDQEEIDYDDTISVEMKKEDFDIYDEDENQSPRSFQKKTRHYFIAAVERLWDYGMSSSPHVLRNRAQSGSVPQFKKVVFQEFTDGSFTQPLYRGELNEHLGLLGPYIRAEVEDNIMVTFRNQASRPYSFYSSLISYEEDQRQGAEPRKNFVKPNETKTYFWKVQHHMAPTKDEFDCKAWAYFSDVDLEKDVHSGLIGPLLVCHTNTLNPAHGRQVTVQEFALFFTIFDETKSWYFTENMERNCRAPCNIQMEDPTFKENYRFHAINGYIMDTLPGLVMAQDQRIRWYLLSMGSNENIHSIHFSGHVFTVRKKEEYKMALYNLYPGVFETVEMLPSKAGIWRVECLIGEHLHAGMSTLFLVYSNKCQTPLGMASGHIRDFQITASGQYGQWAPKLARLHYSGSINAWSTKEPFSWIKVDLLAPMIIHGIKTQGARQKFSSLYISQFIIMYSLDGKKWQTYRGNSTGTLMVFFGNVDSSGIKHNIFNPPIIARYIRLHPTHYSIRSTLRMELMGCDLNSCSMPLGMESKAISDAQITASSYFTNMFATWSPSKARLHLQGRSNAWRPQVNNPKEWLQVDFQKTMKVTGVTTQGVKSLLTSMYVKEFLISSSQDGHQWTLFFQNGKVKVFQGNQDSFTPVVNSLDPPLLTRYLRIHPQSWVHQIALRMEVLGCEAQDLYGAPPGSSPSASTGTGPGSSPSASTGTGPGTPGSGTASSSPGSSTPSGATGSPGSSPSASTGTGPGASPGTSSTGSPGTPGSGTASSSPGSSTPSGATGSPGTPGSGTASSSPGASPGTSSTGSPGASPGTSSTGSPGTPGSGTASSSASSEQKLISEEDLSPATGHHHHHH

SEQ ID NO: 888 - DNA, 5712 bp, synthetic construct
  misc_feature 1..5712: note = Description of Artificial Sequence: Synthetic polynucleotide
  source 1..5712: mol_type = other DNA
gccaccagaagatactacctgggtgcagtggaactgtcatgggactatatgcaaagtgatctcggtgagctgcctgtggacgcaagatttcctcctagagtgccaaaatcttttccattcaacacctcagtcgtgtacaaaaagactctgtttgtagaattcacggatcaccttttcaacatcgctaagccaaggccaccctggatgggtctgctaggtcctaccatccaggctgaggtttatgatacagtggtcattacacttaagaacatggcttcccatcctgtcagtcttcatgctgttggtgtatcctactggaaagcttctgagggagctgaatatgatgatcagaccagtcaaagggagaaagaagatgataaagtcttccctggtggaagccatacatatgtctggcaggtcctgaaagagaatggtccaatggcctctgacccactgtgccttacctactcatatctttctcatgtggacctggtaaaagacttgaattcaggcctcattggagccctactagtatgtagagaagggagtctggccaaggaaaagacacagaccttgcacaaatttatactactttttgctgtatttgatgaagggaaaagttggcactcagaaacaaagaactccttgatgcaggatagggatgctgcatctgctcgggcctggcctaaaatgcacacagtcaatggttatgtaaacaggtctctgccaggtctgattggatgccacaggaaatcagtctattggcatgtgattggaatgggcaccactcctgaagtgcactcaatattcctcgaaggtcacacatttcttgtgaggaaccatcgccaggctagcttggaaatctcgccaataactttccttactgctcaaacactcttgatggaccttggacagtttctactgttttgtcatatctcttcccaccaacatgatggcatggaagcttatgtcaaagtagacagctgtccagaggaaccccaactacgaatgaaaaataatgaagaagcggaagactatgatgatgatcttactgattctgaaatggatgtggtcaggtttgatgatgacaactctccttcctttatccaaattcgctcagttgccaagaagcatcctaaaacttgggtacattacattgctgctgaagaggaggactgggactatgctcccttagtcctcgcccccgatgacagaagttataaaagtcaatatttgaacaatggccctcagcggattggtaggaagtacaaaaaagtccgatttatggcatacacagatgaaacctttaagactcgtgaagctattcagcatgaatcaggaatcttgggacctttactttatggggaagttggagacacactgttgattatatttaagaatcaagcaagcagaccatataacatctaccctcacggaatcactgatgtccgtcctttgtattcaaggagattaccaaaaggtgtaaaacatttgaaggattttccaattctgccaggagaaatattcaaatataaatggacagtgactgtagaagatgggccaactaaatcagatcctcggtgcctgacccgctattactctagtttcgttaatatggagagagatctagcttcaggactcattggccctctcctcatctgctacaaagaatctgtagatcaaagaggaaaccagataatgtcagacaagaggaatgtcatcctgttttctgtatttgatgagaaccgaagctggtacctcacagagaatatacaacgctttctccccaatccagctggagtgcagcttgaggatccagagttccaagcctccaacatcatgcacagcatcaatggctatgtttttgatagtttgcagttgtcagtttgtttgcatgaggtggcatactggtacattctaagcattggagcacagactgacttcctttctgtcttcttctctggatataccttcaaacacaaaatggtctatgaagacacactcaccctattcccattctcaggagaaactgtcttcatgtcgatggaaaacccaggtctatggattctggggtgccacaactcagactttcggaacagaggcatgaccgccttactgaaggtttctagttgtgacaagaacactggtgattattacgaggacagttatgaagatatttcagcatacttgctgagtaaaaacaatgccattgaaccaagaagcttctctcaaaacggcgcgccaccgggagcgtcacccggtacgtcctcaacggggagccctggggcatcacccggcacgtcctcgacagggtcccccggaacaccgggttcggggactgcgtcgtcgtcacccggttcgtcaacacccagcggtgcgacgggttccccgggaacccccggatcaggaacagcgtcgtcgagccccggaagctcgaccccgtcaggagcgaccgggtcgccaggaacgcctgggtcgggtactgcctcatcgtcgccgggttcatcgacgccctccggagcaacaggttcacccgggtcgtccacccccagcggagcgactggatcaccgggatcgagcccgtcggcatcgacaggaacaggtcccggtagctccccatcggcctccacggggacggggcctggtgcgtcaccggggacaagcagcacgggttcgccgggaacgccagggtcagggaccgcgtcgtcgagcccagggtcgtccaccccaagcggggctactgggtccccgggtagctcgccgagcgcatcaacgggaaccggaccgggcagctccccctcagcgtcgacagggacaggccctggcgcgagcccgggaacatcgtcgacggggtcacccggagcatcgccagggacctcgtcaactggctcgcctggatcgtcaacgccctcgggagccacggggtcgcccggatcatccccgtccgcctcaactggcacaggccctggtgcttcccctggaacgtccagcacaggctcccccggttccagcccttccgcttcgactgggactggacccggaaccccgggatcggggacagcgtcaagctcgcccggaagctccacgccttcgggggcaaccgggtcagcctcgagcccaccagtcttgaaacgccatcaagctgaaataactcgtactactcttcagtcagatcaagaggaaatcgattatgatgataccatatcagttgaaatgaagaaggaagattttgacatttatgatgaggatgaaaatcagagcccccgcagctttcaaaagaaaacacgacactattttattgctgcagtggagaggctctgggattatgggatgagtagctccccacatgttctaagaaacagggctcagagtggcagtgtccctcagttcaagaaagttgttttccaggaatttactgatggctcctttactcagcccttataccgtggagaactaaatgaacatttgggactcctggggccatatataagagcagaagttgaagataatatcatggtaactttcagaaatcaggcctctcgtccctattccttctattctagccttatttcttatgaggaagatcagaggcaaggagcagaacctagaaaaaactttgtcaagcctaatgaaaccaaaacttacttttggaaagtgcaacatcatatggcacccactaaagatgagtttgactgcaaagcctgggcttatttctctgatgttgacctggaaaaagatgtgcactcaggcctgattggaccccttctggtctgccacactaacacactgaaccctgctcatgggagacaagtgacagtacaggaatttgctctgtttttcaccatctttgatgagaccaaaagctggtacttcactgaaaatatggaaagaaactgcagggctccctgcaatatccagatggaagatcccacttttaaagagaattatcgcttccatgcaatcaatggctacataatggatacactacctggcttagtaatggctcaggatcaaaggattcgatggtatctgctcagcatgggcagcaatgaaaacatccattctattcatttcagtggacatgtgttcactgtacgaaaaaaagaggagtataaaatggcactgtacaatctctatccaggtgtttttgagacagtggaaatgttaccatccaaagctggaatttggcgggtggaatgccttattggcgagcatctacatgctgggatgagcacactttttctggtgtacagcaataagtgtcagactcccctgggaatggcttctggacacattagagattttcagattacagcttcaggacaatatggacagtgggccccaaagctggccagacttcattattccggatcaatcaatgcctggagcaccaaggagcccttttcttggatcaaggtggatctgttggcaccaatgattattcacggcatcaagacccagggtgcccgtcagaagttctccagcctctacatctctcagtttatcatcatgtatagtcttgatgggaagaagtggcagacttatcgaggaaattccactggaaccttaatggtcttctttggcaatgtggattcatctgggataaaacacaatatttttaaccctccaattattgctcgatacatccgtttgcacccaactcattatagcattcgcagcactcttcgcatggagttgatgggctgtgatttaaatagttgcagcatgccattgggaatggagagtaaagcaatatcagatgcacagattactgcttcatcctactttaccaatatgtttgccacctggtctccttcaaaagctcgacttcacctccaagggaggagtaatgcctggagacctcaggtgaataatccaaaagagtggctgcaagtggacttccagaagacaatgaaagtcacaggagtaactactcagggagtaaaatctctgcttaccagcatgtatgtgaaggagttcctcatctccagcagtcaagatggccatcagtggactctcttttttcagaatggcaaagtaaaggtttttcagggaaatcaagactccttcacacctgtggtgaactctctagacccaccgttactgactcgctaccttcgaattcacccccagagttgggtgcaccagattgccctgaggatggaggttctgggctgcgaggcacaggacctctacggcgcgccacccgggtcgtccccgtcggcgtccaccggaacagggccagggtcatccccgtcagcgtcgactgggacgggacccgggacacccggttcggggactgcatcctcctcgcctggttcgtccaccccgtcaggagccacgggttcgccgggaagcagcccaagcgcatccactggtacagggcctggggcttcaccgggtacttcatccacggggtcaccgggaacgcccggatcggggacggcttcctcatcaccaggatcgtcaacaccctcgggcgcaacgggcagccccggaacccctggttcgggtacggcgtcgtcgagccccggtgcgagcccgggaacaagctcgacaggatcgcctggggcgtcacccggcacgtcgagcacaggcagccccggaacccctggatcgggaaccgcgtcgtcaagcgcctcgagcgaacaaaaactcatctcagaagaggatctgtcacctgcaaccggtcatcatcaccatcaccattga

SEQ ID NO: 889 - protein, 1903 aa, synthetic construct
  REGION 1..1903: note = Description of Artificial Sequence: Synthetic polypeptide
ATRRYYLGAVELSWDYMQSDLGELPVDARFPPRVPKSFPFNTSVVYKKTLFVEFTDHLFNIAKPRPPWMGLLGPTIQAEVYDTVVITLKNMASHPVSLHAVGVSYWKASEGAEYDDQTSQREKEDDKVFPGGSHTYVWQVLKENGPMASDPLCLTYSYLSHVDLVKDLNSGLIGALLVCREGSLAKEKTQTLHKFILLFAVFDEGKSWHSETKNSLMQDRDAASARAWPKMHTVNGYVNRSLPGLIGCHRKSVYWHVIGMGTTPEVHSIFLEGHTFLVRNHRQASLEISPITFLTAQTLLMDLGQFLLFCHISSHQHDGMEAYVKVDSCPEEPQLRMKNNEEAEDYDDDLTDSEMDVVRFDDDNSPSFIQIRSVAKKHPKTWVHYIAAEEEDWDYAPLVLAPDDRSYKSQYLNNGPQRIGRKYKKVRFMAYTDETFKTREAIQHESGILGPLLYGEVGDTLLIIFKNQASRPYNIYPHGITDVRPLYSRRLPKGVKHLKDFPILPGEIFKYKWTVTVEDGPTKSDPRCLTRYYSSFVNMERDLASGLIGPLLICYKESVDQRGNQIMSDKRNVILFSVFDENRSWYLTENIQRFLPNPAGVQLEDPEFQASNIMHSINGYVFDSLQLSVCLHEVAYWYILSIGAQTDFLSVFFSGYTFKHKMVYEDTLTLFPFSGETVFMSMENPGLWILGCHNSDFRNRGMTALLKVSSCDKNTGDYYEDSYEDISAYLLSKNNAIEPRSFSQNGAPGTPGSGTASSSPGSSTPSGATGSPGASPGTSSTGSPGTPGSGTASSSPGSSTPSGATGSPGSSPSASTGTGPGSSPSASTGTGPGSSTPSGATGSPGSSTPSGATGSPGASPGTSSTGSPGASPGTSSTGSPGASPGTSSTGSPASSPPVLKRHQAEITRTTLQSDQEEIDYDDTISVEMKKEDFDIYDEDENQSPRSFQKKTRHYFIAAVERLWDYGMSSSPHVLRNRAQSGSVPQFKKVVFQEFTDGSFTQPLYRGELNEHLGLLGPYIRAEVEDNIMVTFRNQASRPYSFYSSLISYEEDQRQGAEPRKNFVKPNETKTYFWKVQHHMAPTKDEFDCKAWAYFSDVDLEKDVHSGLIGPLLVCHTNTLNPAHGRQVTVQEFALFFTIFDETKSWYFTENMERNCRAPCNIQMEDPTFKENYRFHAINGYIMDTLPGLVMAQDQRIRWYLLSMGSNENIHSIHFSGHVFTVRKKEEYKMALYNLYPGVFETVEMLPSKAGIWRVECLIGEHLHAGMSTLFLVYSNKCQTPLGMASGHIRDFQITASGQYGQWAPKLARLHYSGSINAWSTKEPFSWIKVDLLAPMIIHGIKTQGARQKFSSLYISQFIIMYSLDGKKWQTYRGNSTGTLMVFFGNVDSSGIKHNIFNPPIIARYIRLHPTHYSIRSTLRMELMGCDLNSCSMPLGMESKAISDAQITASSYFTNMFATWSPSKARLHLQGRSNAWRPQVNNPKEWLQVDFQKTMKVTGVTTQGVKSLLTSMYVKEFLISSSQDGHQWTLFFQNGKVKVFQGNQDSFTPVVNSLDPPLLTRYLRIHPQSWVHQIALRMEVLGCEAQDLYGAPGTSESATPESGPGSEPATSGSETPGTSESATPESGPGSEPATSGSETPGTSESATPESGPGTSTEPSEGSAPGSPAGSPTSTEEGTSESATPESGPGSEPATSGSETPGTSESATPESGPGSPAGSPTSTEEGSPAGSPTSTEEGTSTEPSEGSAPGTSESATPESGPGTSESATPESGPGTSESATPESGPGSEPATSGSETPGSEPATSGSETPGSPAGSPTSTEEGTSTEPSEGSAPGTSTEPSEGSAPGSEPATSGSETPGTSESATPESGPGTSTEPSEGSAPASSEQKLISEEDLSPATGHHHHHH

SEQ ID NO: 890 - DNA, 5712 bp, synthetic construct
  misc_feature 1..5712: note = Description of Artificial Sequence: Synthetic polynucleotide
  source 1..5712: mol_type = other DNA
gccaccagaagatactacctgggtgcagtggaactgtcatgggactatatgcaaagtgatctcggtgagctgcctgtggacgcaagatttcctcctagagtgccaaaatcttttccattcaacacctcagtcgtgtacaaaaagactctgtttgtagaattcacggatcaccttttcaacatcgctaagccaaggccaccctggatgggtctgctaggtcctaccatccaggctgaggtttatgatacagtggtcattacacttaagaacatggcttcccatcctgtcagtcttcatgctgttggtgtatcctactggaaagcttctgagggagctgaatatgatgatcagaccagtcaaagggagaaagaagatgataaagtcttccctggtggaagccatacatatgtctggcaggtcctgaaagagaatggtccaatggcctctgacccactgtgccttacctactcatatctttctcatgtggacctggtaaaagacttgaattcaggcctcattggagccctactagtatgtagagaagggagtctggccaaggaaaagacacagaccttgcacaaatttatactactttttgctgtatttgatgaagggaaaagttggcactcagaaacaaagaactccttgatgcaggatagggatgctgcatctgctcgggcctggcctaaaatgcacacagtcaatggttatgtaaacaggtctctgccaggtctgattggatgccacaggaaatcagtctattggcatgtgattggaatgggcaccactcctgaagtgcactcaatattcctcgaaggtcacacatttcttgtgaggaaccatcgccaggctagcttggaaatctcgccaataactttccttactgctcaaacactcttgatggaccttggacagtttctactgttttgtcatatctcttcccaccaacatgatggcatggaagcttatgtcaaagtagacagctgtccagaggaaccccaactacgaatgaaaaataatgaagaagcggaagactatgatgatgatcttactgattctgaaatggatgtggtcaggtttgatgatgacaactctccttcctttatccaaattcgctcagttgccaagaagcatcctaaaacttgggtacattacattgctgctgaagaggaggactgggactatgctcccttagtcctcgcccccgatgacagaagttataaaagtcaatatttgaacaatggccctcagcggattggtaggaagtacaaaaaagtccgatttatggcatacacagatgaaacctttaagactcgtgaagctattcagcatgaatcaggaatcttgggacctttactttatggggaagttggagacacactgttgattatatttaagaatcaagcaagcagaccatataacatctaccctcacggaatcactgatgtccgtcctttgtattcaaggagattaccaaaaggtgtaaaacatttgaaggattttccaattctgccaggagaaatattcaaatataaatggacagtgactgtagaagatgggccaactaaatcagatcctcggtgcctgacccgctattactctagtttcgttaatatggagagagatctagcttcaggactcattggccctctcctcatctgctacaaagaatctgtagatcaaagaggaaaccagataatgtcagacaagaggaatgtcatcctgttttctgtatttgatgagaaccgaagctggtacctcacagagaatatacaacgctttctccccaatccagctggagtgcagcttgaggatccagagttccaagcctccaacatcatgcacagcatcaatggctatgtttttgatagtttgcagttgtcagtttgtttgcatgaggtggcatactggtacattctaagcattggagcacagactgacttcctttctgtcttcttctctggatataccttcaaacacaaaatggtctatgaagacacactcaccctattcccattctcaggagaaactgtcttcatgtcgatggaaaacccaggtctatggattctggggtgccacaactcagactttcggaacagaggcatgaccgccttactgaaggtttctagttgtgacaagaacactggtgattattacgaggacagttatgaagatatttcagcatacttgctgagtaaaaacaatgccattgaaccaagaagcttctctcaaaacggcgcgccaggtacaccgggcagcggcacggcttcgtcgtcacccggctcgtccacaccgtcgggagctacgggaagcccaggagcgtcaccgggaacgtcgtcaacggggtcaccgggtacgccaggtagcggcacggccagcagctcgccaggttcatcgaccccgtcgggagcgactgggtcgcccggatcaagcccgtcagcttccactggaacaggacccgggtcgtcgccgtcagcctcaacggggacaggacctggttcatcgacgccgtcaggggcgacaggctcgcccggatcgtcaacaccctcgggggcaacggggagccctggtgcgtcgcctggaacctcatccaccggaagcccgggggcctcgccgggtacgagctccacgggatcgcccggagcgtcccccggaacttcaagcacagggagccctgcctcgagcccaccagtcttgaaacgccatcaagctgaaataactcgtactactcttcagtcagatcaagaggaaatcgattatgatgataccatatcagttgaaatgaagaaggaagattttgacatttatgatgaggatgaaaatcagagcccccgcagctttcaaaagaaaacacgacactattttattgctgcagtggagaggctctgggattatgggatgagtagctccccacatgttctaagaaacagggctcagagtggcagtgtccctcagttcaagaaagttgttttccaggaatttactgatggctcctttactcagcccttataccgtggagaactaaatgaacatttgggactcctggggccatatataagagcagaagttgaagataatatcatggtaactttcagaaatcaggcctctcgtccctattccttctattctagccttatttcttatgaggaagatcagaggcaaggagcagaacctagaaaaaactttgtcaagcctaatgaaaccaaaacttacttttggaaagtgcaacatcatatggcacccactaaagatgagtttgactgcaaagcctgggcttatttctctgatgttgacctggaaaaagatgtgcactcaggcctgattggaccccttctggtctgccacactaacacactgaaccctgctcatgggagacaagtgacagtacaggaatttgctctgtttttcaccatctttgatgagaccaaaagctggtacttcactgaaaatatggaaagaaactgcagggctccctgcaatatccagatggaagatcccacttttaaagagaattatcgcttccatgcaatcaatggctacataatggatacactacctggcttagtaatggctcaggatcaaaggattcgatggtatctgctcagcatgggcagcaatgaaaacatccattctattcatttcagtggacatgtgttcactgtacgaaaaaaagaggagtataaaatggcactgtacaatctctatccaggtgtttttgagacagtggaaatgttaccatccaaagctggaatttggcgggtggaatgccttattggcgagcatctacatgctgggatgagcacactttttctggtgtacagcaataagtgtcagactcccctgggaatggcttctggacacattagagattttcagattacagcttcaggacaatatggacagtgggccccaaagctggccagacttcattattccggatcaatcaatgcctggagcaccaaggagcccttttcttggatcaaggtggatctgttggcaccaatgattattcacggcatcaagacccagggtgcccgtcagaagttctccagcctctacatctctcagtttatcatcatgtatagtcttgatgggaagaagtggcagacttatcgaggaaattccactggaaccttaatggtcttctttggcaatgtggattcatctgggataaaacacaatatttttaaccctccaattattgctcgatacatccgtttgcacccaactcattatagcattcgcagcactcttcgcatggagttgatgggctgtgatttaaatagttgcagcatgccattgggaatggagagtaaagcaatatcagatgcacagattactgcttcatcctactttaccaatatgtttgccacctggtctccttcaaaagctcgacttcacctccaagggaggagtaatgcctggagacctcaggtgaataatccaaaagagtggctgcaagtggacttccagaagacaatgaaagtcacaggagtaactactcagggagtaaaatctctgcttaccagcatgtatgtgaaggagttcctcatctccagcagtcaagatggccatcagtggactctcttttttcagaatggcaaagtaaaggtttttcagggaaatcaagactccttcacacctgtggtgaactctctagacccaccgttactgactcgctaccttcgaattcacccccagagttgggtgcaccagattgccctgaggatggaggttctgggctgcgaggcacaggacctctacggcgcgccaggtacctcagagtctgctacccccgagtcagggccaggatcagagccagccacctccgggtctgagacacccgggacttccgagagtgccacccctgagtccggacccgggtccgagcccgccacttccggctccgaaactcccggcacaagcgagagcgctaccccagagtcaggaccaggaacatctacagagccctctgaaggctccgctccagggtccccagccggcagtcccactagcaccgaggagggaacctctgaaagcgccacacccgaatcagggccagggtctgagcctgctaccagcggcagcgagacaccaggcacctctgagtccgccacaccagagtccggacccggatctcccgctgggagccccacctccactgaggagggatctcctgctggctctccaacatctactgaggaaggtacctcaaccgagccatccgagggatcagctcccggcacctcagagtcggcaaccccggagtctggacccggaacttccgaaagtgccacaccagagtccggtcccgggacttcagaatcagcaacacccgagtccggccctgggtctgaacccgccacaagtggtagtgagacaccaggatcagaacctgctacctcagggtcagagacacccggatctccggcaggctcaccaacctccactgaggagggcaccagcacagaaccaagcgagggctccgcacccggaacaagcactgaacccagtgagggttcagcacccggctctgagccggccacaagtggcagtgagacacccggcacttcagagagtgccacccccgagagtggcccaggcactagtaccgagccctctgaaggcagtgcgccagcctcgagcgaacaaaaactcatctcagaagaggatctgtcacctgcaaccggtcatcatcaccatcaccattga

SEQ ID NO: 891 - protein, 1903 aa, synthetic construct
  REGION 1..1903: note = Description of Artificial Sequence: Synthetic polypeptide
ATRRYYLGAVELSWDYMQSDLGELPVDARFPPRVPKSFPFNTSVVYKKTLFVEFTDHLFNIAKPRPPWMGLLGPTIQAEVYDTVVITLKNMASHPVSLHAVGVSYWKASEGAEYDDQTSQREKEDDKVFPGGSHTYVWQVLKENGPMASDPLCLTYSYLSHVDLVKDLNSGLIGALLVCREGSLAKEKTQTLHKFILLFAVFDEGKSWHSETKNSLMQDRDAASARAWPKMHTVNGYVNRSLPGLIGCHRKSVYWHVIGMGTTPEVHSIFLEGHTFLVRNHRQASLEISPITFLTAQTLLMDLGQFLLFCHISSHQHDGMEAYVKVDSCPEEPQLRMKNNEEAEDYDDDLTDSEMDVVRFDDDNSPSFIQIRSVAKKHPKTWVHYIAAEEEDWDYAPLVLAPDDRSYKSQYLNNGPQRIGRKYKKVRFMAYTDETFKTREAIQHESGILGPLLYGEVGDTLLIIFKNQASRPYNIYPHGITDVRPLYSRRLPKGVKHLKDFPILPGEIFKYKWTVTVEDGPTKSDPRCLTRYYSSFVNMERDLASGLIGPLLICYKESVDQRGNQIMSDKRNVILFSVFDENRSWYLTENIQRFLPNPAGVQLEDPEFQASNIMHSINGYVFDSLQLSVCLHEVAYWYILSIGAQTDFLSVFFSGYTFKHKMVYEDTLTLFPFSGETVFMSMENPGLWILGCHNSDFRNRGMTALLKVSSCDKNTGDYYEDSYEDISAYLLSKNNAIEPRSFSQNGAPSPAGSPTSTEEGTSESATPESGPGSEPATSGSETPGTSESATPESGPGTSTEPSEGSAPGTSTEPSEGSAPGTSTEPSEGSAPGTSTEPSEGSAPGTSTEPSEGSAPGTSTEPSEGSAPGSPAGSPTSTEEGTSTEPSEGSAPGASSPPVLKRHQREITRTTLQSDQEEIDYDDTISVEMKKEDFDIYDEDENQSPRSFQKKTRHYFIAAVERLWDYGMSSSPHVLRNRAQSGSVPQFKKVVFQEFTDGSFTQPLYRGELNEHLGLLGPYIRAEVEDNIMVTFRNQASRPYSFYSSLISYEEDQRQGAEPRKNFVKPNETKTYFWKVQHHMAPTKDEFDCKAWAYFSDVDLEKDVHSGLIGPLLVCHTNTLNPAHGRQVTVQEFALFFTIFDETKSWYFTENMERNCRAPCNIQMEDPTFKENYRFHAINGYIMDTLPGLVMAQDQRIRWYLLSMGSNENIHSIHFSGHVFTVRKKEEYKMALYNLYPGVFETVEMLPSKAGIWRVECLIGEHLHAGMSTLFLVYSNKCQTPLGMASGHIRDFQITASGQYGQWAPKLARLHYSGSINAWSTKEPFSWIKVDLLAPMIIHGIKTQGARQKFSSLYISQFIIMYSLDGKKWQTYRGNSTGTLMVFFGNVDSSGIKHNIFNPPIIARYIRLHPTHYSIRSTLRMELMGCDLNSCSMPLGMESKAISDAQITASSYFTNMFATWSPSKARLHLQGRSNAWRPQVNNPKEWLQVDFQKTMKVTGVTTQGVKSLLTSMYVKEFLISSSQDGHQWTLFFQNGKVKVFQGNQDSFTPVVNSLDPPLLTRYLRIHPQSWVHQIALRMEVLGCEAQDLYGAPPGASPGTSSTGSPGASPGTSSTGSPGTPGSGTASSSPGSSTPSGATGSPGTPGSGTASSSPGSSTPSGATGSPGTPGSGTASSSPGSSTPSGATGSPGSSTPSGATGSPGSSPSASTGTGPGSSPSASTGTGPGASPGTSSTGSPGTPGSGTASSSPGSSTPSGATGSPGSSPSASTGTGPGSSPSASTGTGPGASPGTSSTGSPGASPGTSSTGSPGSSTPSGATGSPGSSPSASTGTGPGASPGTSSTGSPGSSPSASTGTGPGTPGSGTASSSPGSSTPSGATGSASSEQKLISEEDLSPATGHHHHHH

SEQ ID NO: 892 - DNA, 5712 bp, synthetic construct
  misc_feature 1..5712: note = Description of Artificial Sequence: Synthetic polynucleotide
  source 1..5712: mol_type = other DNA
gccaccagaagatactacctgggtgcagtggaactgtcatgggactatatgcaaagtgatctcggtgagctgcctgtggacgcaagatttcctcctagagtgccaaaatcttttccattcaacacctcagtcgtgtacaaaaagactctgtttgtagaattcacggatcaccttttcaacatcgctaagccaaggccaccctggatgggtctgctaggtcctaccatccaggctgaggtttatgatacagtggtcattacacttaagaacatggcttcccatcctgtcagtcttcatgctgttggtgtatcctactggaaagcttctgagggagctgaatatgatgatcagaccagtcaaagggagaaagaagatgataaagtcttccctggtggaagccatacatatgtctggcaggtcctgaaagagaatggtccaatggcctctgacccactgtgccttacctactcatatctttctcatgtggacctggtaaaagacttgaattcaggcctcattggagccctactagtatgtagagaagggagtctggccaaggaaaagacacagaccttgcacaaatttatactactttttgctgtatttgatgaagggaaaagttggcactcagaaacaaagaactccttgatgcaggatagggatgctgcatctgctcgggcctggcctaaaatgcacacagtcaatggttatgtaaacaggtctctgccaggtctgattggatgccacaggaaatcagtctattggcatgtgattggaatgggcaccactcctgaagtgcactcaatattcctcgaaggtcacacatttcttgtgaggaaccatcgccaggctagcttggaaatctcgccaataactttccttactgctcaaacactcttgatggaccttggacagtttctactgttttgtcatatctcttcccaccaacatgatggcatggaagcttatgtcaaagtagacagctgtccagaggaaccccaactacgaatgaaaaataatgaagaagcggaagactatgatgatgatcttactgattctgaaatggatgtggtcaggtttgatgatgacaactctccttcctttatccaaattcgctcagttgccaagaagcatcctaaaacttgggtacattacattgctgctgaagaggaggactgggactatgctcccttagtcctcgcccccgatgacagaagttataaaagtcaatatttgaacaatggccctcagcggattggtaggaagtacaaaaaagtccgatttatggcatacacagatgaaacctttaagactcgtgaagctattcagcatgaatcaggaatcttgggacctttactttatggggaagttggagacacactgttgattatatttaagaatcaagcaagcagaccatataacatctaccctcacggaatcactgatgtccgtcctttgtattcaaggagattaccaaaaggtgtaaaacatttgaaggattttccaattctgccaggagaaatattcaaatataaatggacagtgactgtagaagatgggccaactaaatcagatcctcggtgcctgacccgctattactctagtttcgttaatatggagagagatctagcttcaggactcattggccctctcctcatctgctacaaagaatctgtagatcaaagaggaaaccagataatgtcagacaagaggaatgtcatcctgttttctgtatttgatgagaaccgaagctggtacctcacagagaatatacaacgctttctccccaatccagctggagtgcagcttgaggatccagagttccaagcctccaacatcatgcacagcatcaatggctatgtttttgatagtttgcagttgtcagtttgtttgcatgaggtggcatactggtacattctaagcattggagcacagactgacttcctttctgtcttcttctctggatataccttcaaacacaaaatggtctatgaagacacactcaccctattcccattctcaggagaaactgtcttcatgtcgatggaaaacccaggtctatggattctggggtgccacaactcagactttcggaacagaggcatgaccgccttactgaaggtttctagttgtgacaagaacactggtgattattacgaggacagttatgaagatatttcagcatacttgctgagtaaaaacaatgccattgaaccaagaagcttctctcaaaacggcgcgccaagtcccgctggaagcccaactagcaccgaagaggggacctcagagtccgccacccccgagtccggccctggctctgagcctgccactagcggctccgagactcctggcacatccgaaagcgctacacccgagagtggacccggcacctctaccgagcccagtgagggctccgcccctggaacaagcaccgagcccagcgaaggcagcgccccagggacctccacagagcccagtgaaggcagtgctcctggcaccagcaccgaaccaagcgagggctctgcacccgggacctccaccgagccaagcgaaggctctgcccctggcacttccaccgagcccagcgaaggcagcgcccctgggagccccgctggctctcccaccagcactgaggagggcacatctaccgaaccaagtgaaggctctgcaccaggtgcctcgagcccaccagtcttgaaacgccatcaacgggaaataactcgtactactcttcagtcagatcaagaggaaatcgattatgatgataccatatcagttgaaatgaagaaggaagattttgacatttatgatgaggatgaaaatcagagcccccgcagctttcaaaagaaaacacgacactattttattgctgcagtggagaggctctgggattatgggatgagtagctccccacatgttctaagaaacagggctcagagtggcagtgtccctcagttcaagaaagttgttttccaggaatttactgatggctcctttactcagcccttataccgtggagaactaaatgaacatttgggactcctggggccatatataagagcagaagttgaagataatatcatggtaactttcagaaatcaggcctctcgtccctattccttctattctagccttatttcttatgaggaagatcagaggcaaggagcagaacctagaaaaaactttgtcaagcctaatgaaaccaaaacttacttttggaaagtgcaacatcatatggcacccactaaagatgagtttgactgcaaagcctgggcttatttctctgatgttgacctggaaaaagatgtgcactcaggcctgattggaccccttctggtctgccacactaacacactgaaccctgctcatgggagacaagtgacagtacaggaatttgctctgtttttcaccatctttgatgagaccaaaagctggtacttcactgaaaatatggaaagaaactgcagggctccctgcaatatccagatggaagatcccacttttaaagagaattatcgcttccatgcaatcaatggctacataatggatacactacctggcttagtaatggctcaggatcaaaggattcgatggtatctgctcagcatgggcagcaatgaaaacatccattctattcatttcagtggacatgtgttcactgtacgaaaaaaagaggagtataaaatggcactgtacaatctctatccaggtgtttttgagacagtggaaatgttaccatccaaagctggaatttggcgggtggaatgccttattggcgagcatctacatgctgggatgagcacactttttctggtgtacagcaataagtgtcagactcccctgggaatggcttctggacacattagagattttcagattacagcttcaggacaatatggacagtgggccccaaagctggccagacttcattattccggatcaatcaatgcctggagcaccaaggagcccttttcttggatcaaggtggatctgttggcaccaatgattattcacggcatcaagacccagggtgcccgtcagaagttctccagcctctacatctctcagtttatcatcatgtatagtcttgatgggaagaagtggcagacttatcgaggaaattccactggaaccttaatggtcttctttggcaatgtggattcatctgggataaaacacaatatttttaaccctccaattattgctcgatacatccgtttgcacccaactcattatagcattcgcagcactcttcgcatggagttgatgggctgtgatttaaatagttgcagcatgccattgggaatggagagtaaagcaatatcagatgcacagattactgcttcatcctactttaccaatatgtttgccacctggtctccttcaaaagctcgacttcacctccaagggaggagtaatgcctggagacctcaggtgaataatccaaaagagtggctgcaagtggacttccagaagacaatgaaagtcacaggagtaactactcagggagtaaaatctctgcttaccagcatgtatgtgaaggagttcctcatctccagcagtcaagatggccatcagtggactctcttttttcagaatggcaaagtaaaggtttttcagggaaatcaagactccttcacacctgtggtgaactctctagacccaccgttactgactcgctaccttcgaattcacccccagagttgggtgcaccagattgccctgaggatggaggttctgggctgcgaggcacaggacctctacggcgcgccaccgggagcgtcacccggtacgtcctcaacggggagccctggggcatcacccggcacgtcctcgacagggtcccccggaacaccgggttcggggactgcgtcgtcgtcacccggttcgtcaacacccagcggtgcgacgggttccccgggaacccccggatcaggaacagcgtcgtcgagccccggaagctcgaccccgtcaggagcgaccgggtcgccaggaacgcctgggtcgggtactgcctcatcgtcgccgggttcatcgacgccctccggagcaacaggttcacccgggtcgtccacccccagcggagcgactggatcaccgggatcgagcccgtcggcatcgacaggaacaggtcccggtagctccccatcggcctccacggggacggggcctggtgcgtcaccggggacaagcagcacgggttcgccgggaacgccagggtcagggaccgcgtcgtcgagcccagggtcgtccaccccaagcggggctactgggtccccgggtagctcgccgagcgcatcaacgggaaccggaccgggcagctccccctcagcgtcgacagggacaggccctggcgcgagcccgggaacatcgtcgacggggtcacccggagcatcgccagggacctcgtcaactggctcgcctggatcgtcaacgccctcgggagccacggggtcgcccggatcatccccgtccgcctcaactggcacaggccctggtgcttcccctggaacgtccagcacaggctcccccggttccagcccttccgcttcgactgggactggacccggaaccccgggatcggggacagcgtcaagctcgcccggaagctccacgccttcgggggcaaccgggtcagcctcgagcgaacaaaaactcatctcagaagaggatctgtcacctgcaaccggtcatcatcaccatcaccattga

SEQ ID NO: 893 - protein, 2047 aa, synthetic construct
  REGION 1..2047: note = Description of Artificial Sequence: Synthetic polypeptide
ATRRYYLGAVELSWDYMQSDLGELPVDARFPPRVPKSFPFNTSVVYKKTLFVEFTDHLFNIAKPRPPWMGLLGPTIQAEVYDTVVITLKNMASHPVSLHAVGVSYWKASEGAEYDDQTSQREKEDDKVFPGGSHTYVWQVLKENGPMASDPLCLTYSYLSHVDLVKDLNSGLIGALLVCREGSLAKEKTQTLHKFILLFAVFDEGKSWHSETKNSLMQDRDAASARAWPKMHTVNGYVNRSLPGLIGCHRKSVYWHVIGMGTTPEVHSIFLEGHTFLVRNHRQASLEISPITFLTAQTLLMDLGQFLLFCHISSHQHDGMEAYVKVDSCPEEPQLRMKNNEEAEDYDDDLTDSEMDVVRFDDDNSPSFIQIRSVAKKHPKTWVHYIAAEEEDWDYAPLVLAPDDRSYKSQYLNNGPQRIGRKYKKVRFMAYTDETFKTREAIQHESGILGPLLYGEVGDTLLIIFKNQASRPYNIYPHGITDVRPLYSRRLPKGVKHLKDFPILPGEIFKYKWTVTVEDGPTKSDPRCLTRYYSSFVNMERDLASGLIGPLLICYKESVDQRGNQIMSDKRNVILFSVFDENRSWYLTENIQRFLPNPAGVQLEDPEFQASNIMHSINGYVFDSLQLSVCLHEVAYWYILSIGAQTDFLSVFFSGYTFKHKMVYEDTLTLFPFSGETVFMSMENPGLWILGCHNSDFRNRGMTALLKVSSCDKNTGDYYEDSYEDISAYLLSKNNAIEPRSFSQNGAPGTSESATPESGPGSEPATSGSETPGTSESATPESGPGSEPATSGSETPGTSESATPESGPGTSTEPSEGSAPGSPAGSPTSTEEGTSESATPESGPGSEPATSGSETPGTSESATPESGPGSPAGSPTSTEEGSPAGSPTSTEEGTSTEPSEGSAPGTSESATPESGPGTSESATPESGPGTSESATPESGPGSEPATSGSETPGSEPATSGSETPGSPAGSPTSTEEGTSTEPSEGSAPGTSTEPSEGSAPGSEPATSGSETPGTSESATPESGPGTSTEPSEGSAPASSPPVLKRHQREITRTTLQSDQEEIDYDDTISVEMKKEDFDIYDEDENQSPRSFQKKTRHYFIAAVERLWDYGMSSSPHVLRNRAQSGSVPQFKKVVFQEFTDGSFTQPLYRGELNEHLGLLGPYIRAEVEDNIMVTFRNQASRPYSFYSSLISYEEDQRQGAEPRKNFVKPNETKTYFWKVQHHMAPTKDEFDCKAWAYFSDVDLEKDVHSGLIGPLLVCHTNTLNPAHGRQVTVQEFALFFTIFDETKSWYFTENMERNCRAPCNIQMEDPTFKENYRFHAINGYIMDTLPGLVMAQDQRIRWYLLSMGSNENIHSIHFSGHVFTVRKKEEYKMALYNLYPGVFETVEMLPSKAGIWRVECLIGEHLHAGMSTLFLVYSNKCQTPLGMASGHIRDFQITASGQYGQWAPKLARLHYSGSINAWSTKEPFSWIKVDLLAPMIIHGIKTQGARQKFSSLYISQFIIMYSLDGKKWQTYRGNSTGTLMVFFGNVDSSGIKHNIFNPPIIARYIRLHPTHYSIRSTLRMELMGCDLNSCSMPLGMESKAISDAQITASSYFTNMFATWSPSKARLHLQGRSNAWRPQVNNPKEWLQVDFQKTMKVTGVTTQGVKSLLTSMYVKEFLISSSQDGHQWTLFFQNGKVKVFQGNQDSFTPVVNSLDPPLLTRYLRIHPQSWVHQIALRMEVLGCEAQDLYGAPGTSESATPESGPGSEPATSGSETPGTSESATPESGPGSEPATSGSETPGTSESATPESGPGTSTEPSEGSAPGSPAGSPTSTEEGTSESATPESGPGSEPATSGSETPGTSESATPESGPGSPAGSPTSTEEGSPAGSPTSTEEGTSTEPSEGSAPGTSESATPESGPGTSESATPESGPGTSESATPESGPGSEPATSGSETPGSEPATSGSETPGSPAGSPTSTEEGTSTEPSEGSAPGTSTEPSEGSAPGSEPATSGSETPGTSESATPESGPGTSTEPSEGSAPASSEQKLISEEDLSPATGHHHHHH

SEQ ID NO: 894 - DNA, 6144 bp, synthetic construct
  misc_feature 1..6144: note = Description of Artificial Sequence: Synthetic polynucleotide
  source 1..6144: mol_type = other DNA
gccaccagaagatactacctgggtgcagtggaactgtcatgggactatatgcaaagtgatctcggtgagctgcctgtggacgcaagatttcctcctagagtgccaaaatcttttccattcaacacctcagtcgtgtacaaaaagactctgtttgtagaattcacggatcaccttttcaacatcgctaagccaaggccaccctggatgggtctgctaggtcctaccatccaggctgaggtttatgatacagtggtcattacacttaagaacatggcttcccatcctgtcagtcttcatgctgttggtgtatcctactggaaagcttctgagggagctgaatatgatgatcagaccagtcaaagggagaaagaagatgataaagtcttccctggtggaagccatacatatgtctggcaggtcctgaaagagaatggtccaatggcctctgacccactgtgccttacctactcatatctttctcatgtggacctggtaaaagacttgaattcaggcctcattggagccctactagtatgtagagaagggagtctggccaaggaaaagacacagaccttgcacaaatttatactactttttgctgtatttgatgaagggaaaagttggcactcagaaacaaagaactccttgatgcaggatagggatgctgcatctgctcgggcctggcctaaaatgcacacagtcaatggttatgtaaacaggtctctgccaggtctgattggatgccacaggaaatcagtctattggcatgtgattggaatgggcaccactcctgaagtgcactcaatattcctcgaaggtcacacatttcttgtgaggaaccatcgccaggctagcttggaaatctcgccaataactttccttactgctcaaacactcttgatggaccttggacagtttctactgttttgtcatatctcttcccaccaacatgatggcatggaagcttatgtcaaagtagacagctgtccagaggaaccccaactacgaatgaaaaataatgaagaagcggaagactatgatgatgatcttactgattctgaaatggatgtggtcaggtttgatgatgacaactctccttcctttatccaaattcgctcagttgccaagaagcatcctaaaacttgggtacattacattgctgctgaagaggaggactgggactatgctcccttagtcctcgcccccgatgacagaagttataaaagtcaatatttgaacaatggccctcagcggattggtaggaagtacaaaaaagtccgatttatggcatacacagatgaaacctttaagactcgtgaagctattcagcatgaatcaggaatcttgggacctttactttatggggaagttggagacacactgttgattatatttaagaatcaagcaagcagaccatataacatctaccctcacggaatcactgatgtccgtcctttgtattcaaggagattaccaaaaggtgtaaaacatttgaaggattttccaattctgccaggagaaatattcaaatataaatggacagtgactgtagaagatgggccaactaaatcagatcctcggtgcctgacccgctattactctagtttcgttaatatggagagagatctagcttcaggactcattggccctctcctcatctgctacaaagaatctgtagatcaaagaggaaaccagataatgtcagacaagaggaatgtcatcctgttttctgtatttgatgagaaccgaagctggtacctcacagagaatatacaacgctttctccccaatccagctggagtgcagcttgaggatccagagttccaagcctccaacatcatgcacagcatcaatggctatgtttttgatagtttgcagttgtcagtttgtttgcatgaggtggcatactggtacattctaagcattggagcacagactgacttcctttctgtcttcttctctggatataccttcaaacacaaaatggtctatgaagacacactcaccctattcccattctcaggagaaactgtcttcatgtcgatggaaaacccaggtctatggattctggggtgccacaactcagactttcggaacagaggcatgaccgccttactgaaggtttctagttgtgacaagaacactggtgattattacgaggacagttatgaagatatttcagcatacttgctgagtaaaaacaatgccattgaaccaagaagcttctctcaaaacggcgcgccaggtacctcagagtctgctacccccgagtcagggccaggatcagagccagccacctccgggtctgagacacccgggacttccgagagtgccacccctgagtccggacccgggtccgagcccgccacttccggctccgaaactcccggcacaagcgagagcgctaccccagagtcaggaccaggaacatctacagagccctctgaaggctccgctccagggtccccagccggcagtcccactagcaccgaggagggaacctctgaaagcgccacacccgaatcagggccagggtctgagcctgctaccagcggcagcgagacaccaggcacctctgagtccgccacaccagagtccggacccggatctcccgctgggagccccacctccactgaggagggatctcctgctggctctccaacatctactgaggaaggtacctcaaccgagccatccgagggatcagctcccggcacctcagagtcggcaaccccggagtctggacccggaacttccgaaagtgccacaccagagtccggtcccgggacttcagaatcagcaacacccgagtccggccctgggtctgaacccgccacaagtggtagtgagacaccaggatcagaacctgctacctcagggtcagagacacccggatctccggcaggctcaccaacctccactgaggagggcaccagcacagaaccaagcgagggctccgcacccggaacaagcactgaacccagtgagggttcagcacccggctctgagccggccacaagtggcagtgagacacccggcacttcagagagtgccacccccgagagtggcccaggcactagtaccgagccctctgaaggcagtgcgccagcctcgagcccaccagtcttgaaacgccatcaacgggaaataactcgtactactcttcagtcagatcaagaggaaatcgattatgatgataccatatcagttgaaatgaagaaggaagattttgacatttatgatgaggatgaaaatcagagcccccgcagctttcaaaagaaaacacgacactattttattgctgcagtggagaggctctgggattatgggatgagtagctccccacatgttctaagaaacagggctcagagtggcagtgtccctcagttcaagaaagttgttttccaggaatttactgatggctcctttactcagcccttataccgtggagaactaaatgaacatttgggactcctggggccatatataagagcagaagttgaagataatatcatggtaactttcagaaatcaggcctctcgtccctattccttctattctagccttatttcttatgaggaagatcagaggcaaggagcagaacctagaaaaaactttgtcaagcctaatgaaaccaaaacttacttttggaaagtgcaacatcatatggcacccactaaagatgagtttgactgcaaagcctgggcttatttctctgatgttgacctggaaaaagatgtgcactcaggcctgattggaccccttctggtctgccacactaacacactgaaccctgctcatgggagacaagtgacagtacaggaatttgctctgtttttcaccatctttgatgagaccaaaagctggtacttcactgaaaatatggaaagaaactgcagggctccctgcaatatccagatggaagatcccacttttaaagagaattatcgcttccatgcaatcaatggctacataatggatacactacctggcttagtaatggctcaggatcaaaggattcgatggtatctgctcagcatgggcagcaatgaaaacatccattctattcatttcagtggacatgtgttcactgtacgaaaaaaagaggagtataaaatggcactgtacaatctctatccaggtgtttttgagacagtggaaatgttaccatccaaagctggaatttggcgggtggaatgccttattggcgagcatctacatgctgggatgagcacactttttctggtgtacagcaataagtgtcagactcccctgggaatggcttctggacacattagagattttcagattacagcttcaggacaatatggacagtgggccccaaagctggccagacttcattattccggatcaatcaatgcctggagcaccaaggagcccttttcttggatcaaggtggatctgttggcaccaatgattattcacggcatcaagacccagggtgcccgtcagaagttctccagcctctacatctctcagtttatcatcatgtatagtcttgatgggaagaagtggcagacttatcgaggaaattccactggaaccttaatggtcttctttggcaatgtggattcatctgggataaaacacaatatttttaaccctccaattattgctcgatacatccgtttgcacccaactcattatagcattcgcagcactcttcgcatggagttgatgggctgtgatttaaatagttgcagcatgccattgggaatggagagtaaagcaatatcagatgcacagattactgcttcatcctactttaccaatatgtttgccacctggtctccttcaaaagctcgacttcacctccaagggaggagtaatgcctggagacctcaggtgaataatccaaaagagtggctgcaagtggacttccagaagacaatgaaagtcacaggagtaactactcagggagtaaaatctctgcttaccagcatgtatgtgaaggagttcctcatctccagcagtcaagatggccatcagtggactctcttttttcagaatggcaaagtaaaggtttttcagggaaatcaagactccttcacacctgtggtgaactctctagacccaccgttactgactcgctaccttcgaattcacccccagagttgggtgcaccagattgccctgaggatggaggttctgggctgcgaggcacaggacctctacggcgcgccaggtacctcagagtctgctacccccgagtcagggccaggatcagagccagccacctccgggtctgagacacccgggacttccgagagtgccacccctgagtccggacccgggtccgagcccgccacttccggctccgaaactcccggcacaagcgagagcgctaccccagagtcaggaccaggaacatctacagagccctctgaaggctccgctccagggtccccagccggcagtcccactagcaccgaggagggaacctctgaaagcgccacacccgaatcagggccagggtctgagcctgctaccagcggcagcgagacaccaggcacctctgagtccgccacaccagagtccggacccggatctcccgctgggagccccacctccactgaggagggatctcctgctggctctccaacatctactgaggaaggtacctcaaccgagccatccgagggatcagctcccggcacctcagagtcggcaaccccggagtctggacccggaacttccgaaagtgccacaccagagtccggtcccgggacttcagaatcagcaacacccgagtccggccctgggtctgaacccgccacaagtggtagtgagacaccaggatcagaacctgctacctcagggtcagagacacccggatctccggcaggctcaccaacctccactgaggagggcaccagcacagaaccaagcgagggctccgcacccggaacaagcactgaacccagtgagggttcagcacccggctctgagccggccacaagtggcagtgagacacccggcacttcagagagtgccacccccgagagtggcccaggcactagtaccgagccctctgaaggcagtgcgccagcctcgagcgaacaaaaactcatctcagaagaggatctgtcacctgcaaccggtcatcatcaccatcaccattga

SEQ ID NO: 895 - protein, 1769 aa, synthetic construct; identical to SEQ ID NO: 871
  REGION 1..1769: note = Description of Artificial Sequence: Synthetic polypeptide

SEQ ID NO: 896 - DNA, 5310 bp, synthetic construct; identical to SEQ ID NO: 872
  misc_feature 1..5310: note = Description of Artificial Sequence: Synthetic polynucleotide
  source 1..5310: mol_type = other DNA

SEQ ID NO: 897 - protein, 1772 aa, synthetic construct
  REGION 1..1772: note = Description of Artificial Sequence: Synthetic polypeptide
ATRRYYLGAVELSWDYMQSDLGELPVDARFPPRVPKSFPFNTSVVYKKTLFVEFTDHLFNIAKPRPPWMGLLGPTIQAEVYDTVVITLKNMASHPVSLHAVGVSYWKASEGAEYDDQTSQREKEDDKVFPGGSHTYVWQVLKENGPMASDPLCLTYSYLSHVDLVKDLNSGLIGALLVCREGSLAKEKTQTLHKFILLFAVFDEGKSWHSETKNSLMQDRDAASARAWPKMHTVNGYVNRSLPGLIGCHRKSVYWHVIGMGTTPEVHSIFLEGHTFLVRNHRQASLEISPITFLTAQTLLMDLGQFLLFCHISSHQHDGMEAYVKVDSCPEEPQLRMKNNEEAEDYDDDLTDSEMDVVRFDDDNSPSFIQIRSVAKKHPKTWVHYIAAEEEDWDYAPLVLAPDDRSYKSQYLNNGPQRIGRKYKKVRFMAYTDETFKTREAIQHESGILGPLLYGEVGDTLLIIFKNQASRPYNIYPHGITDVRPLYSRRLPKGVKHLKDFPILPGEIFKYKWTVTVEDGPTKSDPRCLTRYYSSFVNMERDLASGLIGPLLICYKESVDQRGNQIMSDKRNVILFSVFDENRSWYLTENIQRFLPNPAGVQLEDPEFQASNIMHSINGYVFDSLQLSVCLHEVAYWYILSIGAQTDFLSVFFSGYTFKHKMVYEDTLTLFPFSGETVFMSMENPGLWILGCHNSDFRNRGMTALLKVSSCDKNTGDYYEDSYEDISAYLLSKNNAIEPRSFSQNPPVLKRHQREITRTTLQSDQEEIDYDDTISVEMKKEDFDIYDEDENQSPRSFQKKTRHYFIAAVERLWDYGMSSSPHVLRNRAQGAPGTPGSGTASSSPGASPGTSSTGSPGASPGTSSTGSPGASPGTSSTGSPGSSPSASTGTGPGTPGSGTASSSPGASPGTSSTGSPGASPGTSSTGSPGASPGTSSTGSPGSSTPSGATGSPGSSTPSGATGSPGASPGTSSTGSPASSRAQSGSVPQFKKVVFQEFTDGSFTQPLYRGELNEHLGLLGPYIRAEVEDNIMVTFRNQASRPYSFYSSLISYEEDQRQGAEPRKNFVKPNETKTYFWKVQHHMAPTKDEFDCKAWAYFSDVDLEKDVHSGLIGPLLVCHTNTLNPAHGRQVTVQEFALFFTIFDETKSWYFTENMERNCRGAPTSESATPESGPGSEPATSGSETPGTSESATPESGPGSEPATSGSETPGTSESATPESGPGTSTEPSEGSAPGTSESATPESGPGSPAGSPTSTEEGSPAGSPTSTEEGSPAGSPTSTEEGTSESATPESGPGTSTEPSEGSAPGASSAPCNIQMEDPTFKENYRFHAINGYIMDTLPGLVMAQDQRIRWYLLSMGSNENIHSIHFSGHVFTVRKKEEYKMALYNLYPGVFETVEMLPSKAGIWRVECLIGEHLHAGMSTLFLVYSNKCQTPLGMASGHIRDFQITASGQYGQWAPKLARLHYSGSINAWSTKEPFSWIKVDLLAPMIIHGIKTQGARQKFSSLYISQFIIMYSLDGKKWQTYRGNSTGTLMVFFGNVDSSGIKHNIFNPPIIARYIRLHPTHYSIRSTLRMELMGCDLNSCSMPLGMESKAISDAQITASSYFTNMFATWSPSKARLHLQGRSNAWRPQVNNPKEWLQVDFQKTMKVTGVTTQGVKSLLTSMYVKEFLISSSQDGHQWTLFFQNGKVKVFQGNQDSFTPVVNSLDPPLLTRYLRIHPQSWVHQIALRMEVLGCEAQDLYGAGSPGAETAEQKLISEEDLSPATGHHHHHH

SEQ ID NO: 898 - DNA, 5319 bp, synthetic construct
  misc_feature 1..5319: note = Description of Artificial Sequence: Synthetic polynucleotide
  source 1..5319: mol_type = other DNA
gccaccagaagatactacctgggtgcagtggaactgtcatgggactatatgcaaagtgatctcggtgagctgcctgtggacgcaagatttcctcctagagtgccaaaatcttttccattcaacacctcagtcgtgtacaaaaagactctgtttgtagaattcacggatcaccttttcaacatcgctaagccaaggccaccctggatgggtctgctaggtcctaccatccaggctgaggtttatgatacagtggtcattacacttaagaacatggcttcccatcctgtcagtcttcatgctgttggtgtatcctactggaaagcttctgagggagctgaatatgatgatcagaccagtcaaagggagaaagaagatgataaagtcttccctggtggaagccatacatatgtctggcaggtcctgaaagagaatggtccaatggcctctgacccactgtgccttacctactcatatctttctcatgtggacctggtaaaagacttgaattcaggcctcattggagccctactagtatgtagagaagggagtctggccaaggaaaagacacagaccttgcacaaatttatactactttttgctgtatttgatgaagggaaaagttggcactcagaaacaaagaactccttgatgcaggatagggatgctgcatctgctcgggcctggcctaaaatgcacacagtcaatggttatgtaaacaggtctctgccaggtctgattggatgccacaggaaatcagtctattggcatgtgattggaatgggcaccactcctgaagtgcactcaatattcctcgaaggtcacacatttcttgtgaggaaccatcgccaggctagcttggaaatctcgccaataactttccttactgctcaaacactcttgatggaccttggacagtttctactgttttgtcatatctcttcccaccaacatgatggcatggaagcttatgtcaaagtagacagctgtccagaggaaccccaactacgaatgaaaaataatgaagaagcggaagactatgatgatgatcttactgattctgaaatggatgtggtcaggtttgatgatgacaactctccttcctttatccaaattcgctcagttgccaagaagcatcctaaaacttgggtacattacattgctgctgaagaggaggactgggactatgctcccttagtcctcgcccccgatgacagaagttataaaagtcaatatttgaacaatggccctcagcggattggtaggaagtacaaaaaagtccgatttatggcatacacagatgaaacctttaagactcgtgaagctattcagcatgaatcaggaatcttgggacctttactttatggggaagttggagacacactgttgattatatttaagaatcaagcaagcagaccatataacatctaccctcacggaatcactgatgtccgtcctttgtattcaaggagattaccaaaaggtgtaaaacatttgaaggattttccaattctgccaggagaaatattcaaatataaatggacagtgactgtagaagatgggccaactaaatcagatcctcggtgcctgacccgctattactctagtttcgttaatatggagagagatctagcttcaggactcattggccctctcctcatctgctacaaagaatctgtagatcaaagaggaaaccagataatgtcagacaagaggaatgtcatcctgttttctgtatttgatgagaaccgaagctggtacctcacagagaatatacaacgctttctccccaatccagctggagtgcagcttgaggatccagagttccaagcctccaacatcatgcacagcatcaatggctatgtttttgatagtttgcagttgtcagtttgtttgcatgaggtggcatactggtacattctaagcattggagcacagactgacttcctttctgtcttcttctctggatataccttcaaacacaaaatggtctatgaagacacactcaccctattcccattctcaggagaaactgtcttcatgtcgatggaaaacccaggtctatggattctggggtgccacaactcagactttcggaacagaggcatgaccgccttactgaaggtttctagttgtgacaagaacactggtgattattacgaggacagttatgaagatatttcagcatacttgctgagtaaaaacaatgccattgaaccaagaagcttctctcaaaacccaccagtcttgaaacgccatcaacgggaaataactcgtactactcttcagtcagatcaagaggaaatcgattatgatgataccatatcagttgaaatgaagaaggaagattttgacatttatgatgaggatgaaaatcagagcccccgcagctttcaaaagaaaacacgacactattttattgctgcagtggagaggctctgggattatgggatgagtagctccccacatgttctaagaaacagggctcagggcgcgccaggtacacccggatcgggtacagcgtcatcgagccccggtgcgtcacctggtacgtcgagcacggggtcgccaggggcgtcccctgggacgtcctcaacaggctcgcccggtgcgtcacccggcacgtcgtccacgggttcacctggtagctccccttccgcgtccactggcaccgggcctggaactccggggagcggcacagcgagctcgtcgccgggagcatcgcctgggacatcgagcaccgggtcgccaggagcatcgcccggaacatccagcacaggaagccccggcgcgtcgcccgggacatcaagcacaggttccccgggatcgagcacgccgtccggagccactggatcaccagggagctcgacaccttccggcgcaacgggatcgcccggagccagcccgggtacgtcaagcactggctcccctgcctcgagcagggctcagagtggcagtgtccctcagttcaagaaagttgttttccaggaatttactgatggctcctttactcagcccttataccgtggagaactaaatgaacatttgggactcctggggccatatataagagcagaagttgaagataatatcatggtaactttcagaaatcaggcctctcgtccctattccttctattctagccttatttcttatgaggaagatcagaggcaaggagcagaacctagaaaaaactttgtcaagcctaatgaaaccaaaacttacttttggaaagtgcaacatcatatggcacccactaaagatgagtttgactgcaaagcctgggcttatttctctgatgttgacctggaaaaagatgtgcactcaggcctgattggaccccttctggtctgccacactaacacactgaaccctgctcatgggagacaagtgacagtacaggaatttgctctgtttttcaccatctttgatgagaccaaaagctggtacttcactgaaaatatggaaagaaactgcaggggcgcgccaacgtccgaaagtgctacccctgagtcaggccctggtagtgagcctgccacaagcggaagcgaaactccggggacctcagagtctgccactcccgaatcggggccaggctctgaaccggccacttcagggagcgaaacaccaggaacatcggagagcgctaccccggagagcgggccaggaactagtactgagcctagcgagggaagtgcacctggtacaagcgagtccgccacacccgagtctggccctggctctccagcgggctcacccacgagcactgaagagggctctcccgctggcagcccaacgtcgacagaagaaggatcaccagcaggctcccccacatcaacagaggagggtacatcagaatctgctactcccgagagtggacccggtacctccactgagcccagcgaggggagtgcaccaggtgcctcgagcgctccctgcaatatccagatggaagatcccacttttaaagagaattatcgcttccatgcaatcaatggctacataatggatacactacctggcttagtaatggctcaggatcaaaggattcgatggtatctgctcagcatgggcagcaatgaaaacatccattctattcatttcagtggacatgtgttcactgtacgaaaaaaagaggagtataaaatggcactgtacaatctctatccaggtgtttttgagacagtggaaatgttaccatccaaagctggaatttggcgggtggaatgccttattggcgagcatctacatgctgggatgagcacactttttctggtgtacagcaataagtgtcagactcccctgggaatggcttctggacacattagagattttcagattacagcttcaggacaatatggacagtgggccccaaagctggccagacttcattattccggatcaatcaatgcctggagcaccaaggagcccttttcttggatcaaggtggatctgttggcaccaatgattattcacggcatcaagacccagggtgcccgtcagaagttctccagcctctacatctctcagtttatcatcatgtatagtcttgatgggaagaagtggcagacttatcgaggaaattccactggaaccttaatggtcttctttggcaatgtggattcatctgggataaaacacaatatttttaaccctccaattattgctcgatacatccgtttgcacccaactcattatagcattcgcagcactcttcgcatggagttgatgggctgtgatttaaatagttgcagcatgccattgggaatggagagtaaagcaatatcagatgcacagattactgcttcatcctactttaccaatatgtttgccacctggtctccttcaaaagctcgacttcacctccaagggaggagtaatgcctggagacctcaggtgaataatccaaaagagtggctgcaagtggacttccagaagacaatgaaagtcacaggagtaactactcagggagtaaaatctctgcttaccagcatgtatgtgaaggagttcctcatctccagcagtcaagatggccatcagtggactctcttttttcagaatggcaaagtaaaggtttttcagggaaatcaagactccttcacacctgtggtgaactctctagacccaccgttactgactcgctaccttcgaattcacccccagagttgggtgcaccagattgccctgaggatggaggttctgggctgcgaggcacaggacctctacggcgccggatcacctggggccgaaacggccgaacaaaaactcatctcagaagaggatctgtcacctgcaaccggtcatcatcaccatcaccattga

SEQ ID NO: 899 - protein, 1769 aa, synthetic construct
  REGION 1..1769: note = Description of Artificial Sequence: Synthetic polypeptide
ATRRYYLGAVELSWDYMQSDLGELPVDARFPPRVPKSFPFNTSVVYKKTLFVEFTDHLFNIAKPRPPWMGLLGPTIQAEVYDTVVITLKNMASHPVSLHAVGVSYWKASEGAEYDDQTSQREKEDDKVFPGGSHTYVWQVLKENGPMASDPLCLTYSYLSHVDLVKDLNSGLIGALLVCREGSLAKEKTQTLHKFILLFAVFDEGKSWHSETKNSLMQDRDAASARAWPKMHTVNGYVNRSLPGLIGCHRKSVYWHVIGMGTTPEVHSIFLEGHTFLVRNHRQASLEISPITFLTAQTLLMDLGQFLLFCHISSHQHDGMEAYVKVDSCPEEPQLRMKNNEEAEDYDDDLTDSEMDVVRFDDDNSPSFIQIRSVAKKHPKTWVHYIAAEEEDWDYAPLVLAPDDRSYKSQYLNNGPQRIGRKYKKVRFMAYTDETFKTREAIQHESGILGPLLYGEVGDTLLIIFKNQASRPYNIYPHGITDVRPLYSRRLPKGVKHLKDFPILPGEIFKYKWTVTVEDGPTKSDPRCLTRYYSSFVNMERDLASGLIGPLLICYKESVDQRGNQIMSDKRNVILFSVFDENRSWYLTENIQRFLPNPAGVQLEDPEFQASNIMHSINGYVFDSLQLSVCLHEVAYWYILSIGAQTDFLSVFFSGYTFKHKMVYEDTLTLFPFSGETVFMSMENPGLWILGCHNSDFRNRGMTALLKVSSCDKNTGDYYEDSYEDISAYLLSKNNAIEPRSFSQNPPVLKRHQREITRTTLQSDQEEIDYDDTISVEMKKEDFDIYDEDENQSPRSFQKKTRHYFIAAVERLWDYGMSSSPHVLRNRAQSGGAPTSESATPESGPGSEPATSGSETPGTSESATPESGPGSEPATSGSETPGTSESATPESGPGTSTEPSEGSAPGTSESATPESGPGSPAGSPTSTEEGSPAGSPTSTEEGSPAGSPTSTEEGTSESATPESGPGTSTEPSEGSAPGASSSVPQFKKVVFQEFTDGSFTQPLYRGELNEHLGLLGPYIRAEVEDNIMVTFRNQASRPYSFYSSLISYEEDQRQGAEPRKNFVKPNETKTYFWKVQHHMAPTKDEFDCKAWAYFSDVDLEKDVHSGLIGPLLVCHTNTLNPAHGRQVTVQEFALFFTIFDETKSWYFTENMERNCRGAPTSESATPESGPGSEPATSGSETPGTSESATPESGPGSEPATSGSETPGTSESATPESGPGTSTEPSEGSAPGTSESATPESGPGSPAGSPTSTEEGSPAGSPTSTEEGSPAGSPTSTEEGTSESATPESGPGTSTEPSEGSAPGASSAPCNIQMEDPTFKENYRFHAINGYIMDTLPGLVMAQDQRIRWYLLSMGSNENIHSIHFSGHVFTVRKKEEYKMALYNLYPGVFETVEMLPSKAGIWRVECLIGEHLHAGMSTLFLVYSNKCQTPLGMASGHIRDFQITASGQYGQWAPKLARLHYSGSINAWSTKEPFSWIKVDLLAPMIIHGIKTQGARQKFSSLYISQFIIMYSLDGKKWQTYRGNSTGTLMVFFGNVDSSGIKHNIFNPPIIARYIRLHPTHYSIRSTLRMELMGCDLNSCSMPLGMESKAISDAQITASSYFTNMFATWSPSKARLHLQGRSNAWRPQVNNPKEWLQVDFQKTMKVTGVTTQGVKSLLTSMYVKEFLISSSQDGHQWTLFFQNGKVKVFQGNQDSFTPVVNSLDPPLLTRYLRIHPQSWVHQIALRMEVLGCEAQDLYGAGSPGAETAEQKLISEEDLSPATGHHHHHH

SEQ ID NO: 900 - DNA, 5310 bp, synthetic construct
  misc_feature 1..5310: note = Description of Artificial Sequence: Synthetic polynucleotide
  source 1..5310: mol_type = other DNA
gccaccagaagatactacctgggtgcagtggaactgtcatgggactatatgcaaagtgatctcggtgagctgcctgtggacgcaagatttcctcctagagtgccaaaatcttttccattcaacacctcagtcgtgtacaaaaagactctgtttgtagaattcacggatcaccttttcaacatcgctaagccaaggccaccctggatgggtctgctaggtcctaccatccaggctgaggtttatgatacagtggtcattacacttaagaacatggcttcccatcctgtcagtcttcatgctgttggtgtatcctactggaaagcttctgagggagctgaatatgatgatcagaccagtcaaagggagaaagaagatgataaagtcttccctggtggaagccatacatatgtctggcaggtcctgaaagagaatggtccaatggcctctgacccactgtgccttacctactcatatctttctcatgtggacctggtaaaagacttgaattcaggcctcattggagccctactagtatgtagagaagggagtctggccaaggaaaagacacagaccttgcacaaatttatactactttttgctgtatttgatgaagggaaaagttggcactcagaaacaaagaactccttgatgcaggatagggatgctgcatctgctcgggcctggcctaaaatgcacacagtcaatggttatgtaaacaggtctctgccaggtctgattggatgccacaggaaatcagtctattggcatgtgattggaatgggcaccactcctgaagtgcactcaatattcctcgaaggtcacacatttcttgtgaggaaccatcgccaggctagcttggaaatctcgccaataactttccttactgctcaaacactcttgatggaccttggacagtttctactgttttgtcatatctcttcccaccaacatgatggcatggaagcttatgtcaaagtagacagctgtccagaggaaccccaactacgaatgaaaaataatgaagaagcggaagactatgatgatgatcttactgattctgaaatggatgtggtcaggtttgatgatgacaactctccttcctttatccaaattcgctcagttgccaagaagcatcctaaaacttgggtacattacattgctgctgaagaggaggactgggactatgctcccttagtcctcgcccccgatgacagaagttataaaagtcaatatttgaacaatggccctcagcggattggtaggaagtacaaaaaagtccgatttatggcatacacagatgaaacctttaagactcgtgaagctattcagcatgaatcaggaatcttgggacctttactttatggggaagttggagacacactgttgattatatttaagaatcaagcaagcagaccatataacatctaccctcacggaatcactgatgtccgtcctttgtattcaaggagattaccaaaaggtgtaaaacatttgaaggattttccaattctgccaggagaaatattcaaatataaatggacagtgactgtagaagatgggccaactaaatcagatcctcggtgcctgacccgctattactctagtttcgttaatatggagagagatctagcttcaggactcattggccctctcctcatctgctacaaagaatctgtagatcaaagaggaaaccagataatgtcagacaagaggaatgtcatcctgttttctgtatttgatgagaaccgaagctggtacctcacagagaatatacaacgctttctccccaatccagctggagtgcagcttgaggatccagagttccaagcctccaacatcatgcacagcatcaatggctatgtttttgatagtttgcagttgtcagtttgtttgcatgaggtggcatactggtacattctaagcattggagcacagactgacttcctttctgtcttcttctctggatataccttcaaacacaaaatggtctatgaagacacactcaccctattcccattctcaggagaaactgtcttcatgtcgatggaaaacccaggtctatggattctggggtgccacaactcagactttcggaacagaggcatgaccgccttactgaaggtttctagttgtgacaagaacactggtgattattacgaggacagttatgaagatatttcagcatacttgctgagtaaaaacaatgccattgaaccaagaagcttctctcaaaacccaccagtcttgaaacgccatcaacgggaaataactcgtactactcttcagtcagatcaagaggaaatcgattatgatgataccatatcagttgaaatgaagaaggaagattttgacatttatgatgaggatgaaaatcagagcccccgcagctttcaaaagaaaacacgacactattttattgctgcagtggagaggctctgggattatgggatgagtagctccccacatgttctaagaaacagggctcagagtggcggcgcgccaacgtccgaaagtgctacccctgagtcaggccctggtagtgagcctgccacaagcggaagcgaaactccggggacctcagagtctgccactcccgaatcggggccaggctctgaaccggccacttcagggagcgaaacaccaggaacatcggagagcgctaccccggagagcgggccaggaactagtactgagcctagcgagggaagtgcacctggtacaagcgagtccgccacacccgagtctggccctggctctccagcgggctcacccacgagcactgaagagggctctcccgctggcagcccaacgtcgacagaagaaggatcaccagcaggctcccccacatcaacagaggagggtacatcagaatctgctactcccgagagtggacccggtacctccactgagcccagcgaggggagtgcaccaggtgcctcgagcagtgtccctcagttcaagaaagttgttttccaggaatttactgatggctcctttactcagcccttataccgtggagaactaaatgaacatttgggactcctggggccatatataagagcagaagttgaagataatatcatggtaactttcagaaatcaggcctctcgtccctattccttctattctagccttatttcttatgaggaagatcagaggcaaggagcagaacctagaaaaaactttgtcaagcctaatgaaaccaaaacttacttttggaaagtgcaacatcatatggcacccactaaagatgagtttgactgcaaagcctgggcttatttctctgatgttgacctggaaaaagatgtgcactcaggcctgattggaccccttctggtctgccacactaacacactgaaccctgctcatgggagacaagtgacagtacaggaatttgctctgtttttcaccatctttgatgagaccaaaagctggtacttcactgaaaatatggaaagaaactgcaggggcgcgccaacgtccgaaagtgctacccctgagtcaggccctggtagtgagcctgccacaagcggaagcgaaactccggggacctcagagtctgccactcccgaatcggggccaggctctgaaccggccacttcagggagcgaaacaccaggaacatcggagagcgctaccccggagagcgggccaggaactagtactgagcctagcgagggaagtgcacctggtacaagcgagtccgccacacccgagtctggccctggctctccagcgggctcacccacgagcactgaagagggctctcccgctggcagcccaacgtcgacagaagaaggatcaccagcaggctcccccacatcaacagaggagggtacatcagaatctgctactcccgagagtggacccggtacctccactgagcccagcgaggggagtgcaccaggtgcctcgagcgctccctgcaatatccagatggaagatcccacttttaaagagaattatcgcttccatgcaatcaatggctacataatggatacactacctggcttagtaatggctcaggatcaaaggattcgatggtatctgctcagcatgggcagcaatgaaaacatccattctattcatttcagtggacatgtgttcactgtacgaaaaaaagaggagtataaaatggcactgtacaatctctatccaggtgtttttgagacagtggaaatgttaccatccaaagctggaatttggcgggtggaatgccttattggcgagcatctacatgctgggatgagcacactttttctggtgtacagcaataagtgtcagactcccctgggaatggcttctggacacattagagattttcagattacagcttcaggacaatatggacagtgggccccaaagctggccagacttcattattccggatcaatcaatgcctggagcaccaaggagcccttttcttggatcaaggtggatctgttggcaccaatgattattcacggcatcaagacccagggtgcccgtcagaagttctccagcctctacatctctcagtttatcatcatgtatagtcttgatgggaagaagtggcagacttatcgaggaaattccactggaaccttaatggtcttctttggcaatgtggattcatctgggataaaacacaatatttttaaccctccaattattgctcgatacatccgtttgcacccaactcattatagcattcgcagcactcttcgcatggagttgatgggctgtgatttaaatagttgcagcatgccattgggaatggagagtaaagcaatatcagatgcacagattactgcttcatcctactttaccaatatgtttgccacctggtctccttcaaaagctcgacttcacctccaagggaggagtaatgcctggagacctcaggtgaataatccaaaagagtggctgcaagtggacttccagaagacaatgaaagtcacaggagtaactactcagggagtaaaatctctgcttaccagcatgtatgtgaaggagttcctcatctccagcagtcaagatggccatcagtggactctcttttttcagaatggcaaagtaaaggtttttcagggaaatcaagactccttcacacctgtggtgaactctctagacccaccgttactgactcgctaccttcgaattcacccccagagttgggtgcaccagattgccctgaggatggaggttctgggctgcgaggcacaggacctctacggcgccggatcacctggggccgaaacggccgaacaaaaactcatctcagaagaggatctgtcacctgcaaccggtcatcatcaccatcaccattga

SEQ ID NO: 901 - protein, 1772 aa, synthetic construct
  REGION 1..1772: note = Description of Artificial Sequence: Synthetic polypeptide
ATRRYYLGAVELSWDYMQSDLGELPVDARFPPRVPKSFPFNTSVVYKKTLFVEFTDHLFNIAKPRPPWMGLLGPTIQAEVYDTVVITLKNMASHPVSLHAVGVSYWKASEGAEYDDQTSQREKEDDKVFPGGSHTYVWQVLKENGPMASDPLCLTYSYLSHVDLVKDLNSGLIGALLVCREGSLAKEKTQTLHKFILLFAVFDEGKSWHSETKNSLMQDRDAASARAWPKMHTVNGYVNRSLPGLIGCHRKSVYWHVIGMGTTPEVHSIFLEGHTFLVRNHRQASLEISPITFLTAQTLLMDLGQFLLFCHISSHQHDGMEAYVKVDSCPEEPQLRMKNNEEAEDYDDDLTDSEMDVVRFDDDNSPSFIQIRSVAKKHPKTWVHYIAAEEEDWDYAPLVLAPDDRSYKSQYLNNGPQRIGRKYKKVRFMAYTDETFKTREAIQHESGILGPLLYGEVGDTLLIIFKNQASRPYNIYPHGITDVRPLYSRRLPKGVKHLKDFPILPGEIFKYKWTVTVEDGPTKSDPRCLTRYYSSFVNMERDLASGLIGPLLICYKESVDQRGNQIMSDKRNVILFSVFDENRSWYLTENIQRFLPNPAGVQLEDPEFQASNIMHSINGYVFDSLQLSVCLHEVAYWYILSIGAQTDFLSVFFSGYTFKHKMVYEDTLTLFPFSGETVFMSMENPGLWILGCHNSDFRNRGMTALLKVSSCDKNTGDYYEDSYEDISAYLLSKNNAIEPRSFSQNPPVLKRHQREITRTTLQSDQEEIDYDDTISVEMKKEDFDIYDEDENQSPRSFQKKTRHYFIAAVERLWDYGMSSSPHVLRNRAQGAPGTPGSGTASSSPGASPGTSSTGSPGASPGTSSTGSPGASPGTSSTGSPGSSPSASTGTGPGTPGSGTASSSPGASPGTSSTGSPGASPGTSSTGSPGASPGTSSTGSPGSSTPSGATGSPGSSTPSGATGSPGASPGTSSTGSPASSRAQSGSVPQFKKVVFQEFTDGSFTQPLYRGELNEHLGLLGPYIRAEVEDNIMVTFRNQASRPYSFYSSLISYEEDQRQGAEPRKNFVKPNETKTYFWKVQHHMAPTKDEFDCKAWAYFSDVDLEKDVHSGLIGPLLVCHTNTLNPAHGRQVTVQEFALFFTIFDETKSWYFTENMERNCRGAPGTPGSGTASSSPGASPGTSSTGSPGASPGTSSTGSPGASPGTSSTGSPGSSPSASTGTGPGTPGSGTASSSPGASPGTSSTGSPGASPGTSSTGSPGASPGTSSTGSPGSSTPSGATGSPGSSTPSGATGSPGASPGTSSTGSPASSAPCNIQMEDPTFKENYRFHAINGYIMDTLPGLVMAQDQRIRWYLLSMGSNENIHSIHFSGHVFTVRKKEEYKMALYNLYPGVFETVEMLPSKAGIWRVECLIGEHLHAGMSTLFLVYSNKCQTPLGMASGHIRDFQITASGQYGQWAPKLARLHYSGSINAWSTKEPFSWIKVDLLAPMIIHGIKTQGARQKFSSLYISQFIIMYSLDGKKWQTYRGNSTGTLMVFFGNVDSSGIKHNIFNPPIIARYIRLHPTHYSIRSTLRMELMGCDLNSCSMPLGMESKAISDAQITASSYFTNMFATWSPSKARLHLQGRSNAWRPQVNNPKEWLQVDFQKTMKVTGVTTQGVKSLLTSMYVKEFLISSSQDGHQWTLFFQNGKVKVFQGNQDSFTPVVNSLDPPLLTRYLRIHPQSWVHQIALRMEVLGCEAQDLYGAGSPGAETAEQKLISEEDLSPATGHHHHHH

SEQ ID NO: 902 - DNA, 5319 bp, synthetic construct
  misc_feature 1..5319: note = Description of Artificial Sequence: Synthetic polynucleotide
  source 1..5319: mol_type = other DNA
gccaccagaagatactacctgggtgcagtggaactgtcatgggactatatgcaaagtgatctcggtgagctgcctgtggacgcaagatttcctcctagagtgccaaaatcttttccattcaacacctcagtcgtgtacaaaaagactctgtttgtagaattcacggatcaccttttcaacatcgctaagccaaggccaccctggatgggtctgctaggtcctaccatccaggctgaggtttatgatacagtggtcattacacttaagaacatggcttcccatcctgtcagtcttcatgctgttggtgtatcctactggaaagcttctgagggagctgaatatgatgatcagaccagtcaaagggagaaagaagatgataaagtcttccctggtggaagccatacatatgtctggcaggtcctgaaagagaatggtccaatggcctctgacccactgtgccttacctactcatatctttctcatgtggacctggtaaaagacttgaattcaggcctcattggagccctactagtatgtagagaagggagtctggccaaggaaaagacacagaccttgcacaaatttatactactttttgctgtatttgatgaagggaaaagttggcactcagaaacaaagaactccttgatgcaggatagggatgctgcatctgctcgggcctggcctaaaatgcacacagtcaatggttatgtaaacaggtctctgccaggtctgattggatgccacaggaaatcagtctattggcatgtgattggaatgggcaccactcctgaagtgcactcaatattcctcgaaggtcacacatttcttgtgaggaaccatcgccaggctagcttggaaatctcgccaataactttccttactgctcaaacactcttgatggaccttggacagtttctactgttttgtcatatctcttcccaccaacatgatggcatggaagcttatgtcaaagtagacagctgtccagaggaaccccaactacgaatgaaaaataatgaagaagcggaagactatgatgatgatcttactgattctgaaatggatgtggtcaggtttgatgatgacaactctccttcctttatccaaattcgctcagttgccaagaagcatcctaaaacttgggtacattacattgctgctgaagaggaggactgggactatgctcccttagtcctcgcccccgatgacagaagttataaaagtcaatatttgaacaatggccctcagcggattggtaggaagtacaaaaaagtccgatttatggcatacacagatgaaacctttaagactcgtgaagctattcagcatgaatcaggaatcttgggacctttactttatggggaagttggagacacactgttgattatatttaagaatcaagcaagcagaccatataacatctaccctcacggaatcactgatgtccgtcctttgtattcaaggagattaccaaaaggtgtaaaacatttgaaggattttccaattctgccaggagaaatattcaaatataaatggacagtgactgtagaagatgggccaactaaatcagatcctcggtgcctgacccgctattactctagtttcgttaatatggagagagatctagcttcaggactcattggccctctcctcatctgctacaaagaatctgtagatcaaagaggaaaccagataatgtcagacaagaggaatgtcatcctgttttctgtatttgatgagaaccgaagctggtacctcacagagaatatacaacgctttctccccaatccagctggagtgcagcttgaggatccagagttccaagcctccaacatcatgcacagcatcaatggctatgtttttgatagtttgcagttgtcagtttgtttgcatgaggtggcatactggtacattctaagcattggagcacagactgacttcctttctgtcttcttctctggatataccttcaaacacaaaatggtctatgaagacacactcaccctattcccattctcaggagaaactgtcttcatgtcgatggaaaacccaggtctatggattctggggtgccacaactcagactttcggaacagaggcatgaccgccttactgaaggtttctagttgtgacaagaacactggtgattattacgaggacagttatgaagatatttcagcatacttgctgagtaaaaacaatgccattgaaccaagaagcttctctcaaaacccaccagtcttgaaacgccatcaacgggaaataactcgtactactcttcagtcagatcaagaggaaatcgattatgatgataccatatcagttgaaatgaagaaggaagattttgacatttatgatgaggatgaaaatcagagcccccgcagctttcaaaagaaaacacgacactattttattgctgcagtggagaggctctgggattatgggatgagtagctccccacatgttctaagaaacagggctcagggcgcgccaggtacacccggatcgggtacagcgtcatcgagccccggtgcgtcacctggtacgtcgagcacggggtcgccaggggcgtcccctgggacgtcctcaacaggctcgcccggtgcgtcacccggcacgtcgtccacgggttcacctggtagctccccttccgcgtccactggcaccgggcctggaactccggggagcggcacagcgagctcgtcgccgggagcatcgcctgggacatcgagcaccgggtcgccaggagcatcgcccggaacatccagcacaggaagccccggcgcgtcgcccgggacatcaagcacaggttccccgggatcgagcacgccgtccggagccactggatcaccagggagctcgacaccttccggcgcaacgggatcgcccggagccagcccgggtacgtcaagcactggctcccctgcctcgagcagggctcagagtggcagtgtccctcagttcaagaaagttgttttccaggaatttactgatggctcctttactcagcccttataccgtggagaactaaatgaacatttgggactcctggggccatatataagagcagaagttgaagataatatcatggtaactttcagaaatcaggcctctcgtccctattccttctattctagccttatttcttatgaggaagatcagaggcaaggagcagaacctagaaaaaactttgtcaagcctaatgaaaccaaaacttacttttggaaagtgcaacatcatatggcacccactaaagatgagtttgactgcaaagcctgggcttatttctctgatgttgacctggaaaaagatgtgcactcaggcctgattggaccccttctggtctgccacactaacacactgaaccctgctcatgggagacaagtgacagtacaggaatttgctctgtttttcaccatctttgatgagaccaaaagctggtacttcactgaaaatatggaaagaaactgcaggggcgcgccaggtacacccggatcgggtacagcgtcatcgagccccggtgcgtcacctggtacgtcgagcacggggtcgccaggggcgtcccctgggacgtcctcaacaggctcgcccggtgcgtcacccggcacgtcgtccacgggttcacctggtagctccccttccgcgtccactggcaccgggcctggaactccggggagcggcacagcgagctcgtcgccgggagcatcgcctgggacatcgagcaccgggtcgccaggagcatcgcccggaacatccagcacaggaagccccggcgcgtcgcccgggacatcaagcacaggttccccgggatcgagcacgccgtccggagccactggatcaccagggagctcgacaccttccggcgcaacgggatcgcccggagccagcccgggtacgtcaagcactggctcccctgcctcgagcgctccctgcaatatccagatggaagatcccacttttaaagagaattatcgcttccatgcaatcaatggctacataatggatacactacctggcttagtaatggctcaggatcaaaggattcgatggtatctgctcagcatgggcagcaatgaaaacatccattctattcatttcagtggacatgtgttcactgtacgaaaaaaagaggagtataaaatggcactgtacaatctctatccaggtgtttttgagacagtggaaatgttaccatccaaagctggaatttggcgggtggaatgccttattggcgagcatctacatgctgggatgagcacactttttctggtgtacagcaataagtgtcagactcccctgggaatggcttctggacacattagagattttcagattacagcttcaggacaatatggacagtgggccccaaagctggccagacttcattattccggatcaatcaatgcctggagcaccaaggagcccttttcttggatcaaggtggatctgttggcaccaatgattattcacggcatcaagacccagggtgcccgtcagaagttctccagcctctacatctctcagtttatcatcatgtatagtcttgatgggaagaagtggcagacttatcgaggaaattccactggaaccttaatggtcttctttggcaatgtggattcatctgggataaaacacaatatttttaaccctccaattattgctcgatacatccgtttgcacccaactcattatagcattcgcagcactcttcgcatggagttgatgggctgtgatttaaatagttgcagcatgccattgggaatggagagtaaagcaatatcagatgcacagattactgcttcatcctactttaccaatatgtttgccacctggtctccttcaaaagctcgacttcacctccaagggaggagtaatgcctggagacctcaggtgaataatccaaaagagtggctgcaagtggacttccagaagacaatgaaagtcacaggagtaactactcagggagtaaaatctctgcttaccagcatgtatgtgaaggagttcctcatctccagcagtcaagatggccatcagtggactctcttttttcagaatggcaaagtaaaggtttttcagggaaatcaagactccttcacacctgtggtgaactctctagacccaccgttactgactcgctaccttcgaattcacccccagagttgggtgcaccagattgccctgaggatggaggttctgggctgcgaggcacaggacctctacggcgccggatcacctggggccgaaacggccgaacaaaaactcatctcagaagaggatctgtcacctgcaaccggtcatcatcaccatcaccattga

SEQ ID NO: 903 - protein, 1769 aa, synthetic construct
  REGION 1..1769: note = Description of Artificial Sequence: Synthetic polypeptide
ATRRYYLGAVELSWDYMQSDLGELPVDARFPPRVPKSFPFNTSVVYKKTLFVEFTDHLFNIAKPRPPWMGLLGPTIQAEVYDTVVITLKNMASHPVSLHAVGVSYWKASEGAEYDDQTSQREKEDDKVFPGGSHTYVWQVLKENGPMASDPLCLTYSYLSHVDLVKDLNSGLIGALLVCREGSLAKEKTQTLHKFILLFAVFDEGKSWHSETKNSLMQDRDAASARAWPKMHTVNGYVNRSLPGLIGCHRKSVYWHVIGMGTTPEVHSIFLEGHTFLVRNHRQASLEISPITFLTAQTLLMDLGQFLLFCHISSHQHDGMEAYVKVDSCPEEPQLRMKNNEEAEDYDDDLTDSEMDVVRFDDDNSPSFIQIRSVAKKHPKTWVHYIAAEEEDWDYAPLVLAPDDRSYKSQYLNNGPQRIGRKYKKVRFMAYTDETFKTREAIQHESGILGPLLYGEVGDTLLIIFKNQASRPYNIYPHGITDVRPLYSRRLPKGVKHLKDFPILPGEIFKYKWTVTVEDGPTKSDPRCLTRYYSSFVNMERDLASGLIGPLLICYKESVDQRGNQIMSDKRNVILFSVFDENRSWYLTENIQRFLPNPAGVQLEDPEFQASNIMHSINGYVFDSLQLSVCLHEVAYWYILSIGAQTDFLSVFFSGYTFKHKMVYEDTLTLFPFSGETVFMSMENPGLWILGCHNSDFRNRGMTALLKVSSCDKNTGDYYEDSYEDISAYLLSKNNAIEPRSFSQNPPVLKRHQREITRTTLQSDQEEIDYDDTISVEMKKEDFDIYDEDENQSPRSFQKKTRHYFIAAVERLWDYGMGAPTSESATPESGPGSEPATSGSETPGTSESATPESGPGSEPATSGSETPGTSESATPESGPGTSTEPSEGSAPGTSESATPESGPGSPAGSPTSTEEGSPAGSPTSTEEGSPAGSPTSTEEGTSESATPESGPGTSTEPSEGSAPGASSSSSPHVLRNRAQSGSVPQFKKVVFQEFTDGSFTQPLYRGELNEHLGLLGPYIRAEVEDNIMVTFRNQASRPYSFYSSLISYEEDQRQGAEPRKNFVKPNETKTYFWKVQHHMAPTKDEFDCKAWAYFSDVDLEKDVHSGLIGPLLVCHTNTLNPAHGRQVTVQEFALFFTIFDETKSWYFTENMERNCRAPCNIGAPGTPGSGTASSSPGASPGTSSTGSPGASPGTSSTGSPGASPGTSSTGSPGSSPSASTGTGPGTPGSGTASSSPGASPGTSSTGSPGASPGTSSTGSPGASPGTSSTGSPGSSTPSGATGSPGSSTPSGATGSPGASPGTSSTGSPASSQMEDPTFKENYRFHAINGYIMDTLPGLVMAQDQRIRWYLLSMGSNENIHSIHFSGHVFTVRKKEEYKMALYNLYPGVFETVEMLPSKAGIWRVECLIGEHLHAGMSTLFLVYSNKCQTPLGMASGHIRDFQITASGQYGQWAPKLARLHYSGSINAWSTKEPFSWIKVDLLAPMIIHGIKTQGARQKFSSLYISQFIIMYSLDGKKWQTYRGNSTGTLMVFFGNVDSSGIKHNIFNPPIIARYIRLHPTHYSIRSTLRMELMGCDLNSCSMPLGMESKAISDAQITASSYFTNMFATWSPSKARLHLQGRSNAWRPQVNNPKEWLQVDFQKTMKVTGVTTQGVKSLLTSMYVKEFLISSSQDGHQWTLFFQNGKVKVFQGNQDSFTPVVNSLDPPLLTRYLRIHPQSWVHQIALRMEVLGCEAQDLYGAGSPGAETAEQKLISEEDLSPATGHHHHHH

SEQ ID NO: 904 - DNA, 5310 bp, synthetic construct
  misc_feature 1..5310: note = Description of Artificial Sequence: Synthetic polynucleotide
  source 1..5310: mol_type = other DNA
gccaccagaagatactacctgggtgcagtggaactgtcatgggactatatgcaaagtgatctcggtgagctgcctgtggacgcaagatttcctcctagagtgccaaaatcttttccattcaacacctcagtcgtgtacaaaaagactctgtttgtagaattcacggatcaccttttcaacatcgctaagccaaggccaccctggatgggtctgctaggtcctaccatccaggctgaggtttatgatacagtggtcattacacttaagaacatggcttcccatcctgtcagtcttcatgctgttggtgtatcctactggaaagcttctgagggagctgaatatgatgatcagaccagtcaaagggagaaagaagatgataaagtcttccctggtggaagccatacatatgtctggcaggtcctgaaagagaatggtccaatggcctctgacccactgtgccttacctactcatatctttctcatgtggacctggtaaaagacttgaattcaggcctcattggagccctactagtatgtagagaagggagtctggccaaggaaaagacacagaccttgcacaaatttatactactttttgctgtatttgatgaagggaaaagttggcactcagaaacaaagaactccttgatgcaggatagggatgctgcatctgctcgggcctggcctaaaatgcacacagtcaatggttatgtaaacaggtctctgccaggtctgattggatgccacaggaaatcagtctattggcatgtgattggaatgggcaccactcctgaagtgcactcaatattcctcgaaggtcacacatttcttgtgaggaaccatcgccaggctagcttggaaatctcgccaataactttccttactgctcaaacactcttgatggaccttggacagtttctactgttttgtcatatctcttcccaccaacatgatggcatggaagcttatgtcaaagtagacagctgtccagaggaaccccaactacgaatgaaaaataatgaagaagcggaagactatgatgatgatcttactgattctgaaatggatgtggtcaggtttgatgatgacaactctccttcctttatccaaattcgctcagttgccaagaagcatcctaaaacttgggtacattacattgctgctgaagaggaggactgggactatgctcccttagtcctcgcccccgatgacagaagttataaaagtcaatatttgaacaatggccctcagcggattggtaggaagtacaaaaaagtccgatttatggcatacacagatgaaacctttaagactcgtgaagctattcagcatgaatcaggaatcttgggacctttactttatggggaagttggagacacactgttgattatatttaagaatcaagcaagcagaccatataacatctaccctcacggaatcactgatgtccgtcctttgtattcaaggagattaccaaaaggtgtaaaacatttgaaggattttccaattctgccaggagaaatattcaaatataaatggacagtgactgtagaagatgggccaactaaatcagatcctcggtgcctgacccgctattactctagtttcgttaatatggagagagatctagcttcaggactcattggccctctcctcatctgctacaaagaatctgtagatcaaagaggaaaccagataatgtcagacaagaggaatgtcatcctgttttctgtatttgatgagaaccgaagctggtacctcacagagaatatacaacgctttctccccaatccagctggagtgcagcttgaggatccagagttccaagcctccaacatcatgcacagcatcaatggctatgtttttgatagtttgcagttgtcagtttgtttgcatgaggtggcatactggtacattctaagcattggagcacagactgacttcctttctgtcttcttctctggatataccttcaaacacaaaatggtctatgaagacacactcaccctattcccattctcaggagaaactgtcttcatgtcgatggaaaacccaggtctatggattctggggtgccacaactcagactttcggaacagaggcatgaccgccttactgaaggtttctagttgtgacaagaacactggtgattattacgaggacagttatgaagatatttcagcatacttgctgagtaaaaacaatgccattgaaccaagaagcttctctcaaaacccaccagtcttgaaacgccatcaacgggaaataactcgtactactcttcagtcagatcaagaggaaatcgattatgatgataccatatcagttgaaatgaagaaggaagattttgacatttatgatgaggatgaaaatcagagcccccgcagctttcaaaagaaaacacgacactattttattgctgcagtggagaggctctgggattatgggatgggcgcgccaacgtccgaaagtgctacccctgagtcaggccctggtagtgagcctgccacaagcggaagcgaaactccggggacctcagagtctgccactcccgaatcggggccaggctctgaaccggccacttcagggagcgaaacaccaggaacatcggagagcgctaccccggagagcgggccaggaactagtactgagcctagcgagggaagtgcacctggtacaagcgagtccgccacacccgagtctggccctggctctccagcgggctcacccacgagcactgaagagggctctcccgctggcagcccaacgtcgacagaagaaggatcaccagcaggctcccccacatcaacagaggagggtacatcagaatctgctactcccgagagtggacccggtacctccactgagcccagcgaggggagtgcaccaggtgcctcgagcagtagctccccacatgttctaagaaacagggctcagagtggcagtgtccctcagttcaagaaagttgttttccaggaatttactgatggctcctttactcagcccttataccgtggagaactaaatgaacatttgggactcctggggccatatataagagcagaagttgaagataatatcatggtaactttcagaaatcaggcctctcgtccctattccttctattctagccttatttcttatgaggaagatcagaggcaaggagcagaacctagaaaaaactttgtcaagcctaatgaaaccaaaacttacttttggaaagtgcaacatcatatggcacccactaaagatgagtttgactgcaaagcctgggcttatttctctgatgttgacctggaaaaagatgtgcactcaggcctgattggaccccttctggtctgccacactaacacactgaaccctgctcatgggagacaagtgacagtacaggaatttgctctgtttttcaccatctttgatgagaccaaaagctggtacttcactgaaaatatggaaagaaactgcagggctccctgcaatatcggcgcgccaggtacacccggatcgggtacagcgtcatcgagccccggtgcgtcacctggtacgtcgagcacggggtcgccaggggcgtcccctgggacgtcctcaacaggctcgcccggtgcgtcacccggcacgtcgtccacgggttcacctggtagctccccttccgcgtccactggcaccgggcctggaactccggggagcggcacagcgagctcgtcgccgggagcatcgcctgggacatcgagcaccgggtcgccaggagcatcgcccggaacatccagcacaggaagccccggcgcgtcgcccgggacatcaagcacaggttccccgggatcgagcacgccgtccggagccactggatcaccagggagctcgacaccttccggcgcaacgggatcgcccggagccagcccgggtacgtcaagcactggctcccctgcctcgagccagatggaagatcccacttttaaagagaattatcgcttccatgcaatcaatggctacataatggatacactacctggcttagtaatggctcaggatcaaaggattcgatggtatctgctcagcatgggcagcaatgaaaacatccattctattcatttcagtggacatgtgttcactgtacgaaaaaaagaggagtataaaatggcactgtacaatctctatccaggtgtttttgagacagtggaaatgttaccatccaaagctggaatttggcgggtggaatgccttattggcgagcatctacatgctgggatgagcacactttttctggtgtacagcaataagtgtcagactcccctgggaatggcttctggacacattagagattttcagattacagcttcaggacaatatggacagtgggccccaaagctggccagacttcattattccggatcaatcaatgcctggagcaccaaggagcccttttcttggatcaaggtggatctgttggcaccaatgattattcacggcatcaagacccagggtgcccgtcagaagttctccagcctctacatctctcagtttatcatcatgtatagtcttgatgggaagaagtggcagacttatcgaggaaattccactggaaccttaatggtcttctttggcaatgtggattcatctgggataaaacacaatatttttaaccctccaattattgctcgatacatccgtttgcacccaactcattatagcattcgcagcactcttcgcatggagttgatgggctgtgatttaaatagttgcagcatgccattgggaatggagagtaaagcaatatcagatgcacagattactgcttcatcctactttaccaatatgtttgccacctggtctccttcaaaagctcgacttcacctccaagggaggagtaatgcctggagacctcaggtgaataatccaaaagagtggctgcaagtggacttccagaagacaatgaaagtcacaggagtaactactcagggagtaaaatctctgcttaccagcatgtatgtgaaggagttcctcatctccagcagtcaagatggccatcagtggactctcttttttcagaatggcaaagtaaaggtttttcagggaaatcaagactccttcacacctgtggtgaactctctagacccaccgttactgactcgctaccttcgaattcacccccagagttgggtgcaccagattgccctgaggatggaggttctgggctgcgaggcacaggacctctacggcgccggatcacctggggccgaaacggccgaacaaaaactcatctcagaagaggatctgtcacctgcaaccggtcatcatcaccatcaccattga

SEQ ID NO: 905 - protein, 1772 aa, synthetic construct [sequence omitted]

SEQ ID NO: 906 - DNA, 5319 bp, synthetic construct
  misc_feature 1..5319: note = Description of Artificial Sequence: Synthetic polynucleotide
  source 1..5319: mol_type = other DNA
gccaccagaagatactacctgggtgcagtggaactgtcatgggactatatgcaaagtgatctcggtgagctgcctgtggacgcaagatttcctcctagagtgccaaaatcttttccattcaacacctcagtcgtgtacaaaaagactctgtttgtagaattcacggatcaccttttcaacatcgctaagccaaggccaccctggatgggtctgctaggtcctaccatccaggctgaggtttatgatacagtggtcattacacttaagaacatggcttcccatcctgtcagtcttcatgctgttggtgtatcctactggaaagcttctgagggagctgaatatgatgatcagaccagtcaaagggagaaagaagatgataaagtcttccctggtggaagccatacatatgtctggcaggtcctgaaagagaatggtccaatggcctctgacccactgtgccttacctactcatatctttctcatgtggacctggtaaaagacttgaattcaggcctcattggagccctactagtatgtagagaagggagtctggccaaggaaaagacacagaccttgcacaaatttatactactttttgctgtatttgatgaagggaaaagttggcactcagaaacaaagaactccttgatgcaggatagggatgctgcatctgctcgggcctggcctaaaatgcacacagtcaatggttatgtaaacaggtctctgccaggtctgattggatgccacaggaaatcagtctattggcatgtgattggaatgggcaccactcctgaagtgcactcaatattcctcgaaggtcacacatttcttgtgaggaaccatcgccaggctagcttggaaatctcgccaataactttccttactgctcaaacactcttgatggaccttggacagtttctactgttttgtcatatctcttcccaccaacatgatggcatggaagcttatgtcaaagtagacagctgtccagaggaaccccaactacgaatgaaaaataatgaagaagcggaagactatgatgatgatcttactgattctgaaatggatgtggtcaggtttgatgatgacaactctccttcctttatccaaattcgctcagttgccaagaagcatcctaaaacttgggtacattacattgctgctgaagaggaggactgggactatgctcccttagtcctcgcccccgatgacagaagttataaaagtcaatatttgaacaatggccctcagcggattggtaggaagtacaaaaaagtccgatttatggcatacacagatgaaacctttaagactcgtgaagctattcagcatgaatcaggaatcttgggacctttactttatggggaagttggagacacactgttgattatatttaagaatcaagcaagcagaccatataacatctaccctcacggaatcactgatgtccgtcctttgtattcaaggagattaccaaaaggtgtaaaacatttgaaggattttccaattctgccaggagaaatattcaaatataaatggacagtgactgtagaagatgggccaactaaatcagatcctcggtgcctgacccgctattactctagtttcgttaatatggagagagatctagcttcaggactcattggccctctcctcatctgctacaaagaatctgtagatcaaagaggaaaccagataatgtcagacaagaggaatgtcatcctgttttctgtatttgatgagaaccgaagctggtacctcacagagaatatacaacgctttctccccaatccagctggagtgcagcttgaggatccagagttccaagcctccaacatcatgcacagcatcaatggctatgtttttgatagtttgcagttgtcagtttgtttgcatgaggtggcatactggtacattctaagcattggagcacagactgacttcctttctgtcttcttctctggatataccttcaaacacaaaatggtctatgaagacacactcaccctattcccattctcaggagaaactgtcttcatgtcgatggaaaacccaggtctatggattctggggtgccacaactcagactttcggaacagaggcatgaccgccttactgaaggtttctagttgtgacaagaacactggtgattattacgaggacagttatgaagatatttcagcatacttgctgagtaaaaacaatgccattgaaccaagaagcttctctcaaaacccaccagtcttgaaacgccatcaacgggaaataactcgtactactcttcagtcagatcaagaggaaatcgattatgatgataccatatcagttgaaatgaagaaggaagattttgacatttatgatgaggatgaaaatcagagcccccgcagctttcaaaagaaaacacgacactattttattgctgcagtggagaggctctgggattatgggatgagtagctccccacatgttctaagaaacagggctcagggcgcgccaggtacacccggatcgggtacagcgtcatcgagccccggtgcgtcacctggtacgtcgagcacggggtcgccaggggcgtcccctgggacgtcctcaacaggctcgcccggtgcgtcacccggcacgtcgtccacgggttcacctggtagctccccttccgcgtccactggcaccgggcctggaactccggggagcggcacagcgagctcgtcgccgggagcatcgcctgggacatcgagcaccgggtcgccaggagcatcgcccggaacatccagcacaggaagccccggcgcgtcgcccgggacatcaagcacaggttccccgggatcgagcacgccgtccggagccactggatcaccagggagctcgacaccttccggcgcaacgggatcgcccggagccagcccgggtacgtcaagcactggctcccctgcctcgagcagggctcagagtggcagtgtccctcagttcaagaaagttgttttccaggaatttactgatggctcctttactcagcccttataccgtggagaactaaatgaacatttgggactcctggggccatatataagagcagaagttgaagataatatcatggtaactttcagaaatcaggcctctcgtccctattccttctattctagccttatttcttatgaggaagatcagaggcaaggagcagaacctagaaaaaactttgtcaagcctaatgaaaccaaaacttacttttggaaagtgcaacatcatatggcacccactaaagatgagtttgactgcaaagcctgggcttatttctctgatgttgacctggaaaaagatgtgcactcaggcctgattggaccccttctggtctgccacactaacacactgaaccctgctcatgggagacaagtgacagtacaggaatttgctctgtttttcaccatctttgatgagaccaaaagctggtacttcactgaaaatatggaaagaaactgcagggctccctgcaatatcggcgcgccaggtacacccggatcgggtacagcgtcatcgagccccggtgcgtcacctggtacgtcgagcacggggtcgccaggggcgtcccctgggacgtcctcaacaggctcgcccggtgcgtcacccggcacgtcgtccacgggttcacctggtagctccccttccgcgtccactggcaccgggcctggaactccggggagcggcacagcgagctcgtcgccgggagcatcgcctgggacatcgagcaccgggtcgccaggagcatcgcccggaacatccagcacaggaagccccggcgcgtcgcccgggacatcaagcacaggttccccgggatcgagcacgccgtccggagccactggatcaccagggagctcgacaccttccggcgcaacgggatcgcccggagccagcccgggtacgtcaagcactggctcccctgcctcgagccagatggaagatcccacttttaaagagaattatcgcttccatgcaatcaatggctacataatggatacactacctggcttagtaatggctcaggatcaaaggattcgatggtatctgctcagcatgggcagcaatgaaaacatccattctattcatttcagtggacatgtgttcactgtacgaaaaaaagaggagtataaaatggcactgtacaatctctatccaggtgtttttgagacagtggaaatgttaccatccaaagctggaatttggcgggtggaatgccttattggcgagcatctacatgctgggatgagcacactttttctggtgtacagcaataagtgtcagactcccctgggaatggcttctggacacattagagattttcagattacagcttcaggacaatatggacagtgggccccaaagctggccagacttcattattccggatcaatcaatgcctggagcaccaaggagcccttttcttggatcaaggtggatctgttggcaccaatgattattcacggcatcaagacccagggtgcccgtcagaagttctccagcctctacatctctcagtttatcatcatgtatagtcttgatgggaagaagtggcagacttatcgaggaaattccactggaaccttaatggtcttctttggcaatgtggattcatctgggataaaacacaatatttttaaccctccaattattgctcgatacatccgtttgcacccaactcattatagcattcgcagcactcttcgcatggagttgatgggctgtgatttaaatagttgcagcatgccattgggaatggagagtaaagcaatatcagatgcacagattactgcttcatcctactttaccaatatgtttgccacctggtctccttcaaaagctcgacttcacctccaagggaggagtaatgcctggagacctcaggtgaataatccaaaagagtggctgcaagtggacttccagaagacaatgaaagtcacaggagtaactactcagggagtaaaatctctgcttaccagcatgtatgtgaaggagttcctcatctccagcagtcaagatggccatcagtggactctcttttttcagaatggcaaagtaaaggtttttcagggaaatcaagactccttcacacctgtggtgaactctctagacccaccgttactgactcgctaccttcgaattcacccccagagttgggtgcaccagattgccctgaggatggaggttctgggctgcgaggcacaggacctctacggcgccggatcacctggggccgaaacggccgaacaaaaactcatctcagaagaggatctgtcacctgcaaccggtcatcatcaccatcaccattga

SEQ ID NO: 907 - protein, 1769 aa, synthetic construct
  REGION 1..1769: note = Description of Artificial Sequence: Synthetic polypeptide
ATRRYYLGAVELSWDYMQSDLGELPVDARFPPRVPKSFPFNTSVVYKKTLFVEFTDHLFNIAKPRPPWMGLLGPTIQAEVYDTVVITLKNMASHPVSLHAVGVSYWKASEGAEYDDQTSQREKEDDKVFPGGSHTYVWQVLKENGPMASDPLCLTYSYLSHVDLVKDLNSGLIGALLVCREGSLAKEKTQTLHKFILLFAVFDEGKSWHSETKNSLMQDRDAASARAWPKMHTVNGYVNRSLPGLIGCHRKSVYWHVIGMGTTPEVHSIFLEGHTFLVRNHRQASLEISPITFLTAQTLLMDLGQFLLFCHISSHQHDGMEAYVKVDSCPEEPQLRMKNNEEAEDYDDDLTDSEMDVVRFDDDNSPSFIQIRSVAKKHPKTWVHYIAAEEEDWDYAPLVLAPDDRSYKSQYLNNGPQRIGRKYKKVRFMAYTDETFKTREAIQHESGILGPLLYGEVGDTLLIIFKNQASRPYNIYPHGITDVRPLYSRRLPKGVKHLKDFPILPGEIFKYKWTVTVEDGPTKSDPRCLTRYYSSFVNMERDLASGLIGPLLICYKESVDQRGNQIMSDKRNVILFSVFDENRSWYLTENIQRFLPNPAGVQLEDPEFQASNIMHSINGYVFDSLQLSVCLHEVAYWYILSIGAQTDFLSVFFSGYTFKHKMVYEDTLTLFPFSGETVFMSMENPGLWILGCHNSDFRNRGMTALLKVSSCDKNTGDYYEDSYEDISAYLLSKNNAIEPRSFSQNPPVLKRHQREITRTTLQSDQEEIDYDDTISVEMKKEDFDIYDEDENQSPRSFQKKTRHYFIAAVERLWDYGMSSSPHVLRNRAQSGGAPTSESATPESGPGSEPATSGSETPGTSESATPESGPGSEPATSGSETPGTSESATPESGPGTSTEPSEGSAPGTSESATPESGPGSPAGSPTSTEEGSPAGSPTSTEEGSPAGSPTSTEEGTSESATPESGPGTSTEPSEGSAPGASSSVPQFKKVVFQEFTDGSFTQPLYRGELNEHLGLLGPYIRAEVEDNIMVTFRNQASRPYSFYSSLISYEEDQRQGAEPRKNFVKPNETKTYFWKVQHHMAPTKDEFDCKAWAYFSDVDLEKDVHSGLIGPLLVCHTNTLNPAHGRQVTVQEFALFFTIFDETKSWYFTENMERNCRAPCNIGAPGTPGSGTASSSPGASPGTSSTGSPGASPGTSSTGSPGASPGTSSTGSPGSSPSASTGTGPGTPGSGTASSSPGASPGTSSTGSPGASPGTSSTGSPGASPGTSSTGSPGSSTPSGATGSPGSSTPSGATGSPGASPGTSSTGSPASSQMEDPTFKENYRFHAINGYIMDTLPGLVMAQDQRIRWYLLSMGSNENIHSIHFSGHVFTVRKKEEYKMALYNLYPGVFETVEMLPSKAGIWRVECLIGEHLHAGMSTLFLVYSNKCQTPLGMASGHIRDFQITASGQYGQWAPKLARLHYSGSINAWSTKEPFSWIKVDLLAPMIIHGIKTQGARQKFSSLYISQFIIMYSLDGKKWQTYRGNSTGTLMVFFGNVDSSGIKHNIFNPPIIARYIRLHPTHYSIRSTLRMELMGCDLNSCSMPLGMESKAISDAQITASSYFTNMFATWSPSKARLHLQGRSNAWRPQVNNPKEWLQVDFQKTMKVTGVTTQGVKSLLTSMYVKEFLISSSQDGHQWTLFFQNGKVKVFQGNQDSFTPVVNSLDPPLLTRYLRIHPQSWVHQIALRMEVLGCEAQDLYGAGSPGAETAEQKLISEEDLSPATGHHHHHH

SEQ ID NO: 908 - DNA, 5310 bp, synthetic construct
  misc_feature 1..5310: note = Description of Artificial Sequence: Synthetic polynucleotide
  source 1..5310: mol_type = other DNA
gccaccagaagatactacctgggtgcagtggaactgtcatgggactatatgcaaagtgatctcggtgagctgcctgtggacgcaagatttcctcctagagtgccaaaatcttttccattcaacacctcagtcgtgtacaaaaagactctgtttgtagaattcacggatcaccttttcaacatcgctaagccaaggccaccctggatgggtctgctaggtcctaccatccaggctgaggtttatgatacagtggtcattacacttaagaacatggcttcccatcctgtcagtcttcatgctgttggtgtatcctactggaaagcttctgagggagctgaatatgatgatcagaccagtcaaagggagaaagaagatgataaagtcttccctggtggaagccatacatatgtctggcaggtcctgaaagagaatggtccaatggcctctgacccactgtgccttacctactcatatctttctcatgtggacctggtaaaagacttgaattcaggcctcattggagccctactagtatgtagagaagggagtctggccaaggaaaagacacagaccttgcacaaatttatactactttttgctgtatttgatgaagggaaaagttggcactcagaaacaaagaactccttgatgcaggatagggatgctgcatctgctcgggcctggcctaaaatgcacacagtcaatggttatgtaaacaggtctctgccaggtctgattggatgccacaggaaatcagtctattggcatgtgattggaatgggcaccactcctgaagtgcactcaatattcctcgaaggtcacacatttcttgtgaggaaccatcgccaggctagcttggaaatctcgccaataactttccttactgctcaaacactcttgatggaccttggacagtttctactgttttgtcatatctcttcccaccaacatgatggcatggaagcttatgtcaaagtagacagctgtccagaggaaccccaactacgaatgaaaaataatgaagaagcggaagactatgatgatgatcttactgattctgaaatggatgtggtcaggtttgatgatgacaactctccttcctttatccaaattcgctcagttgccaagaagcatcctaaaacttgggtacattacattgctgctgaagaggaggactgggactatgctcccttagtcctcgcccccgatgacagaagttataaaagtcaatatttgaacaatggccctcagcggattggtaggaagtacaaaaaagtccgatttatggcatacacagatgaaacctttaagactcgtgaagctattcagcatgaatcaggaatcttgggacctttactttatggggaagttggagacacactgttgattatatttaagaatcaagcaagcagaccatataacatctaccctcacggaatcactgatgtccgtcctttgtattcaaggagattaccaaaaggtgtaaaacatttgaaggattttccaattctgccaggagaaatattcaaatataaatggacagtgactgtagaagatgggccaactaaatcagatcctcggtgcctgacccgctattactctagtttcgttaatatggagagagatctagcttcaggactcattggccctctcctcatctgctacaaagaatctgtagatcaaagaggaaaccagataatgtcagacaagaggaatgtcatcctgttttctgtatttgatgagaaccgaagctggtacctcacagagaatatacaacgctttctccccaatccagctggagtgcagcttgaggatccagagttccaagcctccaacatcatgcacagcatcaatggctatgtttttgatagtttgcagttgtcagtttgtttgcatgaggtggcatactggtacattctaagcattggagcacagactgacttcctttctgtcttcttctctggatataccttcaaacacaaaatggtctatgaagacacactcaccctattcccattctcaggagaaactgtcttcatgtcgatggaaaacccaggtctatggattctggggtgccacaactcagactttcggaacagaggcatgaccgccttactgaaggtttctagttgtgacaagaacactggtgattattacgaggacagttatgaagatatttcagcatacttgctgagtaaaaacaatgccattgaaccaagaagcttctctcaaaacccaccagtcttgaaacgccatcaacgggaaataactcgtactactcttcagtcagatcaagaggaaatcgattatgatgataccatatcagttgaaatgaagaaggaagattttgacatttatgatgaggatgaaaatcagagcccccgcagctttcaaaagaaaacacgacactattttattgctgcagtggagaggctctgggattatgggatgagtagctccccacatgttctaagaaacagggctcagagtggcggcgcgccaacgtccgaaagtgctacccctgagtcaggccctggtagtgagcctgccacaagcggaagcgaaactccggggacctcagagtctgccactcccgaatcggggccaggctctgaaccggccacttcagggagcgaaacaccaggaacatcggagagcgctaccccggagagcgggccaggaactagtactgagcctagcgagggaagtgcacctggtacaagcgagtccgccacacccgagtctggccctggctctccagcgggctcacccacgagcactgaagagggctctcccgctggcagcccaacgtcgacagaagaaggatcaccagcaggctcccccacatcaacagaggagggtacatcagaatctgctactcccgagagtggacccggtacctccactgagcccagcgaggggagtgcaccaggtgcctcgagcagtgtccctcagttcaagaaagttgttttccaggaatttactgatggctcctttactcagcccttataccgtggagaactaaatgaacatttgggactcctggggccatatataagagcagaagttgaagataatatcatggtaactttcagaaatcaggcctctcgtccctattccttctattctagccttatttcttatgaggaagatcagaggcaaggagcagaacctagaaaaaactttgtcaagcctaatgaaaccaaaacttacttttggaaagtgcaacatcatatggcacccactaaagatgagtttgactgcaaagcctgggcttatttctctgatgttgacctggaaaaagatgtgcactcaggcctgattggaccccttctggtctgccacactaacacactgaaccctgctcatgggagacaagtgacagtacaggaatttgctctgtttttcaccatctttgatgagaccaaaagctggtacttcactgaaaatatggaaagaaactgcagggctccctgcaatatcggcgcgccaggtacacccggatcgggtacagcgtcatcgagccccggtgcgtcacctggtacgtcgagcacggggtcgccaggggcgtcccctgggacgtcctcaacaggctcgcccggtgcgtcacccggcacgtcgtccacgggttcacctggtagctccccttccgcgtccactggcaccgggcctggaactccggggagcggcacagcgagctcgtcgccgggagcatcgcctgggacatcgagcaccgggtcgccaggagcatcgcccggaacatccagcacaggaagccccggcgcgtcgcccgggacatcaagcacaggttccccgggatcgagcacgccgtccggagccactggatcaccagggagctcgacaccttccggcgcaacgggatcgcccggagccagcccgggtacgtcaagcactggctcccctgcctcgagccagatggaagatcccacttttaaagagaattatcgcttccatgcaatcaatggctacataatggatacactacctggcttagtaatggctcaggatcaaaggattcgatggtatctgctcagcatgggcagcaatgaaaacatccattctattcatttcagtggacatgtgttcactgtacgaaaaaaagaggagtataaaatggcactgtacaatctctatccaggtgtttttgagacagtggaaatgttaccatccaaagctggaatttggcgggtggaatgccttattggcgagcatctacatgctgggatgagcacactttttctggtgtacagcaataagtgtcagactcccctgggaatggcttctggacacattagagattttcagattacagcttcaggacaatatggacagtgggccccaaagctggccagacttcattattccggatcaatcaatgcctggagcaccaaggagcccttttcttggatcaaggtggatctgttggcaccaatgattattcacggcatcaagacccagggtgcccgtcagaagttctccagcctctacatctctcagtttatcatcatgtatagtcttgatgggaagaagtggcagacttatcgaggaaattccactggaaccttaatggtcttctttggcaatgtggattcatctgggataaaacacaatatttttaaccctccaattattgctcgatacatccgtttgcacccaactcattatagcattcgcagcactcttcgcatggagttgatgggctgtgatttaaatagttgcagcatgccattgggaatggagagtaaagcaatatcagatgcacagattactgcttcatcctactttaccaatatgtttgccacctggtctccttcaaaagctcgacttcacctccaagggaggagtaatgcctggagacctcaggtgaataatccaaaagagtggctgcaagtggacttccagaagacaatgaaagtcacaggagtaactactcagggagtaaaatctctgcttaccagcatgtatgtgaaggagttcctcatctccagcagtcaagatggccatcagtggactctcttttttcagaatggcaaagtaaaggtttttcagggaaatcaagactccttcacacctgtggtgaactctctagacccaccgttactgactcgctaccttcgaattcacccccagagttgggtgcaccagattgccctgaggatggaggttctgggctgcgaggcacaggacctctacggcgccggatcacctggggccgaaacggccgaacaaaaactcatctcagaagaggatctgtcacctgcaaccggtcatcatcaccatcaccattga

SEQ ID NO: 909 - protein, 1769 aa, synthetic construct
  REGION 1..1769: note = Description of Artificial Sequence: Synthetic polypeptide
ATRRYYLGAVELSWDYMQSDLGELPVGAPGSSPSASTGTGPGSSPSASTGTGPGASPGTSSTGSPGASPGTSSTGSPGSSTPSGATGSPGSSPSASTGTGPGASPGTSSTGSPGSSPSASTGTGPGTPGSGTASSSPGSSTPSGATGSPGSSTPSGATGSPGASPGTSSTGSPASSDARFPPRVPKSFPFNTSVVYKKTLFVEFTDHLFNIAKPRPPWMGLLGPTIQAEVYDTVVITLKNMASHPVSLHAVGVSYWKASEGAEYDDQTSQREKEDDKVFPGGSHTYVWQVLKENGPMASDPLCLTYSYLSHVDLVKDLNSGLIGALLVCREGSLAKEKTQTLHKFILLFAVFDEGKSWHSETKNSLMQDRDAASARAWPKMHTVNGYVNRSLPGLIGCHRKSVYWHVIGMGTTPEVHSIFLEGHTFLVRNHRQASLEISPITFLTAQTLLMDLGQFLLFCHISSHQHDGMEAYVKVDSCPEEPQLRMKNNEEAEDYDDDLTDSEMDVVRFDDDNSPSFIQIRSVAKKHPKTWVHYIAAEEEDWDYAPLVLAPDDRSYKSQYLNNGPQRIGRKYKKVRFMAYTDETFKTREAIQHESGILGPLLYGEVGDTLLIIFKNQASRPYNIYPHGITDVRPLYSRRLPKGVKHLKDFPILPGEIFKYKWTVTVEDGPTKSDPRCLTRYYSSFVNMERDLASGLIGPLLICYKESVDQRGNQIMSDKRNVILFSVFDENRSWYLTENIQRFLPNPAGVQLEDPEFQASNIMHSINGYVFDSLQLSVCLHEVAYWYILSIGAQTDFLSVFFSGYTFKHKMVYEDTLTLFPFSGETVFMSMENPGLWILGCHNSDFRNRGMTALLKVSSCDKNTGDYYEDSYEDISAYLLSKNNAIEPRSFSQNPPVLKRHQREITRTTLQGAPGTPGSGTASSSPGASPGTSSTGSPGASPGTSSTGSPGASPGTSSTGSPGSSPSASTGTGPGTPGSGTASSSPGASPGTSSTGSPGASPGTSSTGSPGASPGTSSTGSPGSSTPSGATGSPGSSTPSGATGSPGASPGTSSTGSPASSSDQEEIDYDDTISVEMKKEDFDIYDEDENQSPRSFQKKTRHYFIAAVERLWDYGMSSSPHVLRNRAQSGSVPQFKKVVFQEFTDGSFTQPLYRGELNEHLGLLGPYIRAEVEDNIMVTFRNQASRPYSFYSSLISYEEDQRQGAEPRKNFVKPNETKTYFWKVQHHMAPTKDEFDCKAWAYFSDVDLEKDVHSGLIGPLLVCHTNTLNPAHGRQVTVQEFALFFTIFDETKSWYFTENMERNCRAPCNIQMEDPTFKENYRFHAINGYIMDTLPGLVMAQDQRIRWYLLSMGSNENIHSIHFSGHVFTVRKKEEYKMALYNLYPGVFETVEMLPSKAGIWRVECLIGEHLHAGMSTLFLVYSNKCQTPLGMASGHIRDFQITASGQYGQWAPKLARLHYSGSINAWSTKEPFSWIKVDLLAPMIIHGIKTQGARQKFSSLYISQFIIMYSLDGKKWQTYRGNSTGTLMVFFGNVDSSGIKHNIFNPPIIARYIRLHPTHYSIRSTLRMELMGCDLNSCSMPLGMESKAISDAQITASSYFTNMFATWSPSKARLHLQGRSNAWRPQVNNPKEWLQVDFQKTMKVTGVTTQGVKSLLTSMYVKEFLISSSQDGHQWTLFFQNGKVKVFQGNQDSFTPVVNSLDPPLLTRYLRIHPQSWVHQIALRMEVLGCEAQDLYGAGSPGAETAEQKLISEEDLSPATGHHHHHH

SEQ ID NO: 910 - DNA, 5310 bp, synthetic construct
  misc_feature 1..5310: note = Description of Artificial Sequence: Synthetic polynucleotide
  source 1..5310: mol_type = other DNA
gccaccagaagatactacctgggtgcagtggaactgtcatgggactatatgcaaagtgatctcggtgagctgcctgtgggcgcgccaggctccagcccctccgcgagcacgggaaccggaccaggttcgtcaccctcagcatcaacggggacgggaccgggggcgtcaccaggaacgtcctccaccggctcgccgggtgcatcacccggaacgtcatcgaccggatcgccagggagctcgacgccatcaggcgcaacaggatcacctggctcaagccctagcgcgtcaaccggcacgggtccgggtgcctcccctggcacgtccagcaccggatcacccggatcgagcccatccgcctcaaccggaaccggacccggtacaccagggtcgggaacagcctcctcgtcaccaggctcctcaaccccctcgggagccacgggttcgcccggttcgtcaacgccttccggagcaactggtagccccggagcatcgccaggaacttcgagcacggggtcgcccgcctcgagcgacgcaagatttcctcctagagtgccaaaatcttttccattcaacacctcagtcgtgtacaaaaagactctgtttgtagaattcacggatcaccttttcaacatcgctaagccaaggccaccctggatgggtctgctaggtcctaccatccaggctgaggtttatgatacagtggtcattacacttaagaacatggcttcccatcctgtcagtcttcatgctgttggtgtatcctactggaaagcttctgagggagctgaatatgatgatcagaccagtcaaagggagaaagaagatgataaagtcttccctggtggaagccatacatatgtctggcaggtcctgaaagagaatggtccaatggcctctgacccactgtgccttacctactcatatctttctcatgtggacctggtaaaagacttgaattcaggcctcattggagccctactagtatgtagagaagggagtctggccaaggaaaagacacagaccttgcacaaatttatactactttttgctgtatttgatgaagggaaaagttggcactcagaaacaaagaactccttgatgcaggatagggatgctgcatctgctcgggcctggcctaaaatgcacacagtcaatggttatgtaaacaggtctctgccaggtctgattggatgccacaggaaatcagtctattggcatgtgattggaatgggcaccactcctgaagtgcactcaatattcctcgaaggtcacacatttcttgtgaggaaccatcgccaggctagcttggaaatctcgccaataactttccttactgctcaaacactcttgatggaccttggacagtttctactgttttgtcatatctcttcccaccaacatgatggcatggaagcttatgtcaaagtagacagctgtccagaggaaccccaactacgaatgaaaaataatgaagaagcggaagactatgatgatgatcttactgattctgaaatggatgtggtcaggtttgatgatgacaactctccttcctttatccaaattcgctcagttgccaagaagcatcctaaaacttgggtacattacattgctgctgaagaggaggactgggactatgctcccttagtcctcgcccccgatgacagaagttataaaagtcaatatttgaacaatggccctcagcggattggtaggaagtacaaaaaagtccgatttatggcatacacagatgaaacctttaagactcgtgaagctattcagcatgaatcaggaatcttgggacctttactttatggggaagttggagacacactgttgattatatttaagaatcaagcaagcagaccatataacatctaccctcacggaatcactgatgtccgtcctttgtattcaaggagattaccaaaaggtgtaaaacatttgaaggattttccaattctgccaggagaaatattcaaatataaatggacagtgactgtagaagatgggccaactaaatcagatcctcggtgcctgacccgctattactctagtttcgttaatatggagagagatctagcttcaggactcattggccctctcctcatctgctacaaagaatctgtagatcaaagaggaaaccagataatgtcagacaagaggaatgtcatcctgttttctgtatttgatgagaaccgaagctggtacctcacagagaatatacaacgctttctccccaatccagctggagtgcagcttgaggatccagagttccaagcctccaacatcatgcacagcatcaatggctatgtttttgatagtttgcagttgtcagtttgtttgcatgaggtggcatactggtacattctaagcattggagcacagactgacttcctttctgtcttcttctctggatataccttcaaacacaaaatggtctatgaagacacactcaccctattcccattctcaggagaaactgtcttcatgtcgatggaaaacccaggtctatggattctggggtgccacaactcagactttcggaacagaggcatgaccgccttactgaaggtttctagttgtgacaagaacactggtgattattacgaggacagttatgaagatatttcagcatacttgctgagtaaaaacaatgccattgaaccaagaagcttctctcaaaacccaccagtcttgaaacgccatcaacgggaaataactcgtactactcttcagggcgcgccaggtacacccggatcgggtacagcgtcatcgagccccggtgcgtcacctggtacgtcgagcacggggtcgccaggggcgtcccctgggacgtcctcaacaggctcgcccggtgcgtcacccggcacgtcgtccacgggttcacctggtagctccccttccgcgtccactggcaccgggcctggaactccggggagcggcacagcgagctcgtcgccgggagcatcgcctgggacatcgagcaccgggtcgccaggagcatcgcccggaacatccagcacaggaagccccggcgcgtcgcccgggacatcaagcacaggttccccgggatcgagcacgccgtccggagccactggatcaccagggagctcgacaccttccggcgcaacgggatcgcccggagccagcccgggtacgtcaagcactggctcccctgcctcgagctcagatcaagaggaaatcgattatgatgataccatatcagttgaaatgaagaaggaagattttgacatttatgatgaggatgaaaatcagagcccccgcagctttcaaaagaaaacacgacactattttattgctgcagtggagaggctctgggattatgggatgagtagctccccacatgttctaagaaacagggctcagagtggcagtgtccctcagttcaagaaagttgttttccaggaatttactgatggctcctttactcagcccttataccgtggagaactaaatgaacatttgggactcctggggccatatataagagcagaagttgaagataatatcatggtaactttcagaaatcaggcctctcgtccctattccttctattctagccttatttcttatgaggaagatcagaggcaaggagcagaacctagaaaaaactttgtcaagcctaatgaaaccaaaacttacttttggaaagtgcaacatcatatggcacccactaaagatgagtttgactgcaaagcctgggcttatttctctgatgttgacctggaaaaagatgtgcactcaggcctgattggaccccttctggtctgccacactaacacactgaaccctgctcatgggagacaagtgacagtacaggaatttgctctgtttttcaccatctttgatgagaccaaaagctggtacttcactgaaaatatggaaagaaactgcagggctccctgcaatatccagatggaagatcccacttttaaagagaattatcgcttccatgcaatcaatggctacataatggatacactacctggcttagtaatggctcaggatcaaaggattcgatggtatctgctcagcatgggcagcaatgaaaacatccattctattcatttcagtggacatgtgttcactgtacgaaaaaaagaggagtataaaatggcactgtacaatctctatccaggtgtttttgagacagtggaaatgttaccatccaaagctggaatttggcgggtggaatgccttattggcgagcatctacatgctgggatgagcacactttttctggtgtacagcaataagtgtcagactcccctgggaatggcttctggacacattagagattttcagattacagcttcaggacaatatggacagtgggccccaaagctggccagacttcattattccggatcaatcaatgcctggagcaccaaggagcccttttcttggatcaaggtggatctgttggcaccaatgattattcacggcatcaagacccagggtgcccgtcagaagttctccagcctctacatctctcagtttatcatcatgtatagtcttgatgggaagaagtggcagacttatcgaggaaattccactggaaccttaatggtcttctttggcaatgtggattcatctgggataaaacacaatatttttaaccctccaattattgctcgatacatccgtttgcacccaactcattatagcattcgcagcactcttcgcatggagttgatgggctgtgatttaaatagttgcagcatgccattgggaatggagagtaaagcaatatcagatgcacagattactgcttcatcctactttaccaatatgtttgccacctggtctccttcaaaagctcgacttcacctccaagggaggagtaatgcctggagacctcaggtgaataatccaaaagagtggctgcaagtggacttccagaagacaatgaaagtcacaggagtaactactcagggagtaaaatctctgcttaccagcatgtatgtgaaggagttcctcatctccagcagtcaagatggccatcagtggactctcttttttcagaatggcaaagtaaaggtttttcagggaaatcaagactccttcacacctgtggtgaactctctagacccaccgttactgactcgctaccttcgaattcacccccagagttgggtgcaccagattgccctgaggatggaggttctgggctgcgaggcacaggacctctacggcgccggatcacctggggccgaaacggccgaacaaaaactcatctcagaagaggatctgtcacctgcaaccggtcatcatcaccatcaccattga

SEQ ID NO: 911 - protein, 1769 aa, synthetic construct
  REGION 1..1769: note = Description of Artificial Sequence: Synthetic polypeptide
ATRRYYLGAVELSWDYMQGAPTSESATPESGPGSEPATSGSETPGTSESATPESGPGSEPATSGSETPGTSESATPESGPGTSTEPSEGSAPGSPAGSPTSTEEGTSESATPESGPGSEPATSGSETPGTSESATPESGPGSPAGSPTSTEEGSPAGSPTSTEEGASSSDLGELPVDARFPPRVPKSFPFNTSVVYKKTLFVEFTDHLFNIAKPRPPWMGLLGPTIQAEVYDTVVITLKNMASHPVSLHAVGVSYWKASEGAEYDDQTSQREKEDDKVFPGGSHTYVWQVLKENGPMASDPLCLTYSYLSHVDLVKDLNSGLIGALLVCREGSLAKEKTQTLHKFILLFAVFDEGKSWHSETKNSLMQDRDAASARAWPKMHTVNGYVNRSLPGLIGCHRKSVYWHVIGMGTTPEVHSIFLEGHTFLVRNHRQASLEISPITFLTAQTLLMDLGQFLLFCHISSHQHDGMEAYVKVDSCPEEPQLRMKNNEEAEDYDDDLTDSEMDVVRFDDDNSPSFIQIRSVAKKHPKTWVHYIAAEEEDWDYAPLVLAPDDRSYKSQYLNNGPQRIGRKYKKVRFMAYTDETFKTREAIQHESGILGPLLYGEVGDTLLIIFKNQASRPYNIYPHGITDVRPLYSRRLPKGVKHLKDFPILPGEIFKYKWTVTVEDGPTKSDPRCLTRYYSSFVNMERDLASGLIGPLLICYKESVDQRGNQIMSDKRNVILFSVFDENRSWYLTENIQRFLPNPAGVQLEDPEFQASNIMHSINGYVFDSLQLSVCLHEVAYWYILSIGAQTDFLSVFFSGYTFKHKMVYEDTLTLFPFSGETVFMSMENPGLWILGCHNSDFRNRGMTALLKVSSCDKNTGDYYEDSYEDISAYLLSKNNAIEPRSFSQNPPVLKRHQREITRTTLQGAPGTPGSGTASSSPGASPGTSSTGSPGASPGTSSTGSPGASPGTSSTGSPGSSPSASTGTGPGTPGSGTASSSPGASPGTSSTGSPGASPGTSSTGSPGASPGTSSTGSPGSSTPSGATGSPGSSTPSGATGSPGASPGTSSTGSPASSSDQEEIDYDDTISVEMKKEDFDIYDEDENQSPRSFQKKTRHYFIAAVERLWDYGMSSSPHVLRNRAQSGSVPQFKKVVFQEFTDGSFTQPLYRGELNEHLGLLGPYIRAEVEDNIMVTFRNQASRPYSFYSSLISYEEDQRQGAEPRKNFVKPNETKTYFWKVQHHMAPTKDEFDCKAWAYFSDVDLEKDVHSGLIGPLLVCHTNTLNPAHGRQVTVQEFALFFTIFDETKSWYFTENMERNCRAPCNIQMEDPTFKENYRFHAINGYIMDTLPGLVMAQDQRIRWYLLSMGSNENIHSIHFSGHVFTVRKKEEYKMALYNLYPGVFETVEMLPSKAGIWRVECLIGEHLHAGMSTLFLVYSNKCQTPLGMASGHIRDFQITASGQYGQWAPKLARLHYSGSINAWSTKEPFSWIKVDLLAPMIIHGIKTQGARQKFSSLYISQFIIMYSLDGKKWQTYRGNSTGTLMVFFGNVDSSGIKHNIFNPPIIARYIRLHPTHYSIRSTLRMELMGCDLNSCSMPLGMESKAISDAQITASSYFTNMFATWSPSKARLHLQGRSNAWRPQVNNPKEWLQVDFQKTMKVTGVTTQGVKSLLTSMYVKEFLISSSQDGHQWTLFFQNGKVKVFQGNQDSFTPVVNSLDPPLLTRYLRIHPQSWVHQIALRMEVLGCEAQDLYGAGSPGAETAEQKLISEEDLSPATGHHHHHH

SEQ ID NO: 912 - DNA, 5310 bp, synthetic construct
  misc_feature 1..5310: note = Description of Artificial Sequence: Synthetic polynucleotide
  source 1..5310: mol_type = other DNA
gccaccagaagatactacctgggtgcagtggaactgtcatgggactatatgcaaggcgcgccaacatcagagagcgccacccctgaaagtggtcccgggagcgagccagccacatctgggtcggaaacgccaggcacaagtgagtctgcaactcccgagtccggacctggctccgagcctgccactagcggctccgagactccgggaacttccgagagcgctacaccagaaagcggacccggaaccagtaccgaacctagcgagggctctgctccgggcagcccagccggctctcctacatccacggaggagggcacttccgaatccgccaccccggagtcagggccaggatctgaacccgctacctcaggcagtgagacgccaggaacgagcgagtccgctacaccggagagtgggccagggagccctgctggatctcctacgtccactgaggaagggtcaccagcgggctcgcccaccagcactgaagaaggtgcctcgagcagtgatctcggtgagctgcctgtggacgcaagatttcctcctagagtgccaaaatcttttccattcaacacctcagtcgtgtacaaaaagactctgtttgtagaattcacggatcaccttttcaacatcgctaagccaaggccaccctggatgggtctgctaggtcctaccatccaggctgaggtttatgatacagtggtcattacacttaagaacatggcttcccatcctgtcagtcttcatgctgttggtgtatcctactggaaagcttctgagggagctgaatatgatgatcagaccagtcaaagggagaaagaagatgataaagtcttccctggtggaagccatacatatgtctggcaggtcctgaaagagaatggtccaatggcctctgacccactgtgccttacctactcatatctttctcatgtggacctggtaaaagacttgaattcaggcctcattggagccctactagtatgtagagaagggagtctggccaaggaaaagacacagaccttgcacaaatttatactactttttgctgtatttgatgaagggaaaagttggcactcagaaacaaagaactccttgatgcaggatagggatgctgcatctgctcgggcctggcctaaaatgcacacagtcaatggttatgtaaacaggtctctgccaggtctgattggatgccacaggaaatcagtctattggcatgtgattggaatgggcaccactcctgaagtgcactcaatattcctcgaaggtcacacatttcttgtgaggaaccatcgccaggctagcttggaaatctcgccaataactttccttactgctcaaacactcttgatggaccttggacagtttctactgttttgtcatatctcttcccaccaacatgatggcatggaagcttatgtcaaagtagacagctgtccagaggaaccccaactacgaatgaaaaataatgaagaagcggaagactatgatgatgatcttactgattctgaaatggatgtggtcaggtttgatgatgacaactctccttcctttatccaaattcgctcagttgccaagaagcatcctaaaacttgggtacattacattgctgctgaagaggaggactgggactatgctcccttagtcctcgcccccgatgacagaagttataaaagtcaatatttgaacaatggccctcagcggattggtaggaagtacaaaaaagtccgatttatggcatacacagatgaaacctttaagactcgtgaagctattcagcatgaatcaggaatcttgggacctttactttatggggaagttggagacacactgttgattatatttaagaatcaagcaagcagaccatataacatctaccctcacggaatcactgatgtccgtcctttgtattcaaggagattaccaaaaggtgtaaaacatttgaaggattttccaattctgccaggagaaatattcaaatataaatggacagtgactgtagaagatgggccaactaaatcagatcctcggtgcctgacccgctattactctagtttcgttaatatggagagagatctagcttcaggactcattggccctctcctcatctgctacaaagaatctgtagatcaaagaggaaaccagataatgtcagacaagaggaatgtcatcctgttttctgtatttgatgagaaccgaagctggtacctcacagagaatatacaacgctttctccccaatccagctggagtgcagcttgaggatccagagttccaagcctccaacatcatgcacagcatcaatggctatgtttttgatagtttgcagttgtcagtttgtttgcatgaggtggcatactggtacattctaagcattggagcacagactgacttcctttctgtcttcttctctggatataccttcaaacacaaaatggtctatgaagacacactcaccctattcccattctcaggagaaactgtcttcatgtcgatggaaaacccaggtctatggattctggggtgccacaactcagactttcggaacagaggcatgaccgccttactgaaggtttctagttgtgacaagaacactggtgattattacgaggacagttatgaagatatttcagcatacttgctgagtaaaaacaatgccattgaaccaagaagcttctctcaaaacccaccagtcttgaaacgccatcaacgggaaataactcgtactactcttcagggcgcgccaggtacacccggatcgggtacagcgtcatcgagccccggtgcgtcacctggtacgtcgagcacggggtcgccaggggcgtcccctgggacgtcctcaacaggctcgcccggtgcgtcacccggcacgtcgtccacgggttcacctggtagctccccttccgcgtccactggcaccgggcctggaactccggggagcggcacagcgagctcgtcgccgggagcatcgcctgggacatcgagcaccgggtcgccaggagcatcgcccggaacatccagcacaggaagccccggcgcgtcgcccgggacatcaagcacaggttccccgggatcgagcacgccgtccggagccactggatcaccagggagctcgacaccttccggcgcaacgggatcgcccggagccagcccgggtacgtcaagcactggctcccctgcctcgagctcagatcaagaggaaatcgattatgatgataccatatcagttgaaatgaagaaggaagattttgacatttatgatgaggatgaaaatcagagcccccgcagctttcaaaagaaaacacgacactattttattgctgcagtggagaggctctgggattatgggatgagtagctccccacatgttctaagaaacagggctcagagtggcagtgtccctcagttcaagaaagttgttttccaggaatttactgatggctcctttactcagcccttataccgtggagaactaaatgaacatttgggactcctggggccatatataagagcagaagttgaagataatatcatggtaactttcagaaatcaggcctctcgtccctattccttctattctagccttatttcttatgaggaagatcagaggcaaggagcagaacctagaaaaaactttgtcaagcctaatgaaaccaaaacttacttttggaaagtgcaacatcatatggcacccactaaagatgagtttgactgcaaagcctgggcttatttctctgatgttgacctggaaaaagatgtgcactcaggcctgattggaccccttctggtctgccacactaacacactgaaccctgctcatgggagacaagtgacagtacaggaatttgctctgtttttcaccatctttgatgagaccaaaagctggtacttcactgaaaatatggaaagaaactgcagggctccctgcaatatccagatggaagatcccacttttaaagagaattatcgcttccatgcaatcaatggctacataatggatacactacctggcttagtaatggctcaggatcaaaggattcgatggtatctgctcagcatgggcagcaatgaaaacatccattctattcatttcagtggacatgtgttcactgtacgaaaaaaagaggagtataaaatggcactgtacaatctctatccaggtgtttttgagacagtggaaatgttaccatccaaagctggaatttggcgggtggaatgccttattggcgagcatctacatgctgggatgagcacactttttctggtgtacagcaataagtgtcagactcccctgggaatggcttctggacacattagagattttcagattacagcttcaggacaatatggacagtgggccccaaagctggccagacttcattattccggatcaatcaatgcctggagcaccaaggagcccttttcttggatcaaggtggatctgttggcaccaatgattattcacggcatcaagacccagggtgcccgtcagaagttctccagcctctacatctctcagtttatcatcatgtatagtcttgatgggaagaagtggcagacttatcgaggaaattccactggaaccttaatggtcttctttggcaatgtggattcatctgggataaaacacaatatttttaaccctccaattattgctcgatacatccgtttgcacccaactcattatagcattcgcagcactcttcgcatggagttgatgggctgtgatttaaatagttgcagcatgccattgggaatggagagtaaagcaatatcagatgcacagattactgcttcatcctactttaccaatatgtttgccacctggtctccttcaaaagctcgacttcacctccaagggaggagtaatgcctggagacctcaggtgaataatccaaaagagtggctgcaagtggacttccagaagacaatgaaagtcacaggagtaactactcagggagtaaaatctctgcttaccagcatgtatgtgaaggagttcctcatctccagcagtcaagatggccatcagtggactctcttttttcagaatggcaaagtaaaggtttttcagggaaatcaagactccttcacacctgtggtgaactctctagacccaccgttactgactcgctaccttcgaattcacccccagagttgggtgcaccagattgccctgaggatggaggttctgggctgcgaggcacaggacctctacggcgccggatcacctggggccgaaacggccgaacaaaaactcatctcagaagaggatctgtcacctgcaaccggtcatcatcaccatcaccattga

SEQ ID NO: 913 - protein, 1769 aa, synthetic construct
  REGION 1..1769: note = Description of Artificial Sequence: Synthetic polypeptide
ATRRYYLGAVELSWDYMQGAPGSSPSASTGTGPGSSPSASTGTGPGASPGTSSTGSPGASPGTSSTGSPGSSTPSGATGSPGSSPSASTGTGPGASPGTSSTGSPGSSPSASTGTGPGTPGSGTASSSPGSSTPSGATGSPGSSTPSGATGSPGASPGTSSTGSPASSSDLGELPVDARFPPRVPKSFPFNTSVVYKKTLFVEFTDHLFNIAKPRPPWMGLLGPTIQAEVYDTVVITLKNMASHPVSLHAVGVSYWKASEGAEYDDQTSQREKEDDKVFPGGSHTYVWQVLKENGPMASDPLCLTYSYLSHVDLVKDLNSGLIGALLVCREGSLAKEKTQTLHKFILLFAVFDEGKSWHSETKNSLMQDRDAASARAWPKMHTVNGYVNRSLPGLIGCHRKSVYWHVIGMGTTPEVHSIFLEGHTFLVRNHRQASLEISPITFLTAQTLLMDLGQFLLFCHISSHQHDGMEAYVKVDSCPEEPQLRMKNNEEAEDYDDDLTDSEMDVVRFDDDNSPSFIQIRSVAKKHPKTWVHYIAAEEEDWDYAPLVLAPDDRSYKSQYLNNGPQRIGRKYKKVRFMAYTDETFKTREAIQHESGILGPLLYGEVGDTLLIIFKNQASRPYNIYPHGITDVRPLYSRRLPKGVKHLKDFPILPGEIFKYKWTVTVEDGPTKSDPRCLTRYYSSFVNMERDLASGLIGPLLICYKESVDQRGNQIMSDKRNVILFSVFDENRSWYLTENIQRFLPNPAGVQLEDPEFQASNIMHSINGYVFDSLQLSVCLHEVAYWYILSIGAQTDFLSVFFSGYTFKHKMVYEDTLTLFPFSGETVFMSMENPGLWILGCHNSDFRNRGMTALLKVSSCDKNTGDYYEDSYEDISAYLLSKNNAIEPRSFSQNPPVLKRHQREITRTTLQGAPGTPGSGTASSSPGASPGTSSTGSPGASPGTSSTGSPGASPGTSSTGSPGSSPSASTGTGPGTPGSGTASSSPGASPGTSSTGSPGASPGTSSTGSPGASPGTSSTGSPGSSTPSGATGSPGSSTPSGATGSPGASPGTSSTGSPASSSDQEEIDYDDTISVEMKKEDFDIYDEDENQSPRSFQKKTRHYFIAAVERLWDYGMSSSPHVLRNRAQSGSVPQFKKVVFQEFTDGSFTQPLYRGELNEHLGLLGPYIRAEVEDNIMVTFRNQASRPYSFYSSLISYEEDQRQGAEPRKNFVKPNETKTYFWKVQHHMAPTKDEFDCKAWAYFSDVDLEKDVHSGLIGPLLVCHTNTLNPAHGRQVTVQEFALFFTIFDETKSWYFTENMERNCRAPCNIQMEDPTFKENYRFHAINGYIMDTLPGLVMAQDQRIRWYLLSMGSNENIHSIHFSGHVFTVRKKEEYKMALYNLYPGVFETVEMLPSKAGIWRVECLIGEHLHAGMSTLFLVYSNKCQTPLGMASGHIRDFQITASGQYGQWAPKLARLHYSGSINAWSTKEPFSWIKVDLLAPMIIHGIKTQGARQKFSSLYISQFIIMYSLDGKKWQTYRGNSTGTLMVFFGNVDSSGIKHNIFNPPIIARYIRLHPTHYSIRSTLRMELMGCDLNSCSMPLGMESKAISDAQITASSYFTNMFATWSPSKARLHLQGRSNAWRPQVNNPKEWLQVDFQKTMKVTGVTTQGVKSLLTSMYVKEFLISSSQDGHQWTLFFQNGKVKVFQGNQDSFTPVVNSLDPPLLTRYLRIHPQSWVHQIALRMEVLGCEAQDLYGAGSPGAETAEQKLISEEDLSPATGHHHHHH

SEQ ID NO: 914 - DNA, 5310 bp, synthetic construct
  misc_feature 1..5310: note = Description of Artificial Sequence: Synthetic polynucleotide
  source 1..5310: mol_type = other DNA
gccaccagaagatactacctgggtgcagtggaactgtcatgggactatatgcaaggcgcgccaggctccagcccctccgcgagcacgggaaccggaccaggttcgtcaccctcagcatcaacggggacgggaccgggggcgtcaccaggaacgtcctccaccggctcgccgggtgcatcacccggaacgtcatcgaccggatcgccagggagctcgacgccatcaggcgcaacaggatcacctggctcaagccctagcgcgtcaaccggcacgggtccgggtgcctcccctggcacgtccagcaccggatcacccggatcgagcccatccgcctcaaccggaaccggacccggtacaccagggtcgggaacagcctcctcgtcaccaggctcctcaaccccctcgggagccacgggttcgcccggttcgtcaacgccttccggagcaactggtagccccggagcatcgccaggaacttcgagcacggggtcgcccgcctcgagcagtgatctcggtgagctgcctgtggacgcaagatttcctcctagagtgccaaaatcttttccattcaacacctcagtcgtgtacaaaaagactctgtttgtagaattcacggatcaccttttcaacatcgctaagccaaggccaccctggatgggtctgctaggtcctaccatccaggctgaggtttatgatacagtggtcattacacttaagaacatggcttcccatcctgtcagtcttcatgctgttggtgtatcctactggaaagcttctgagggagctgaatatgatgatcagaccagtcaaagggagaaagaagatgataaagtcttccctggtggaagccatacatatgtctggcaggtcctgaaagagaatggtccaatggcctctgacccactgtgccttacctactcatatctttctcatgtggacctggtaaaagacttgaattcaggcctcattggagccctactagtatgtagagaagggagtctggccaaggaaaagacacagaccttgcacaaatttatactactttttgctgtatttgatgaagggaaaagttggcactcagaaacaaagaactccttgatgcaggatagggatgctgcatctgctcgggcctggcctaaaatgcacacagtcaatggttatgtaaacaggtctctgccaggtctgattggatgccacaggaaatcagtctattggcatgtgattggaatgggcaccactcctgaagtgcactcaatattcctcgaaggtcacacatttcttgtgaggaaccatcgccaggctagcttggaaatctcgccaataactttccttactgctcaaacactcttgatggaccttggacagtttctactgttttgtcatatctcttcccaccaacatgatggcatggaagcttatgtcaaagtagacagctgtccagaggaaccccaactacgaatgaaaaataatgaagaagcggaagactatgatgatgatcttactgattctgaaatggatgtggtcaggtttgatgatgacaactctccttcctttatccaaattcgctcagttgccaagaagcatcctaaaacttgggtacattacattgctgctgaagaggaggactgggactatgctcccttagtcctcgcccccgatgacagaagttataaaagtcaatatttgaacaatggccctcagcggattggtaggaagtacaaaaaagtccgatttatggcatacacagatgaaacctttaagactcgtgaagctattcagcatgaatcaggaatcttgggacctttactttatggggaagttggagacacactgttgattatatttaagaatcaagcaagcagaccatataacatctaccctcacggaatcactgatgtccgtcctttgtattcaaggagattaccaaaaggtgtaaaacatttgaaggattttccaattctgccaggagaaatattcaaatataaatggacagtgactgtagaagatgggccaactaaatcagatcctcggtgcctgacccgctattactctagtttcgttaatatggagagagatctagcttcaggactcattggccctctcctcatctgctacaaagaatctgtagatcaaagaggaaaccagataatgtcagacaagaggaatgtcatcctgttttctgtatttgatgagaaccgaagctggtacctcacagagaatatacaacgctttctccccaatccagctggagtgcagcttgaggatccagagttccaagcctccaacatcatgcacagcatcaatggctatgtttttgatagtttgcagttgtcagtttgtttgcatgaggtggcatactggtacattctaagcattggagcacagactgacttcctttctgtcttcttctctggatataccttcaaacacaaaatggtctatgaagacacactcaccctattcccattctcaggagaaactgtcttcatgtcgatggaaaacccaggtctatggattctggggtgccacaactcagactttcggaacagaggcatgaccgccttactgaaggtttctagttgtgacaagaacactggtgattattacgaggacagttatgaagatatttcagcatacttgctgagtaaaaacaatgccattgaaccaagaagcttctctcaaaacccaccagtcttgaaacgccatcaacgggaaataactcgtactactcttcagggcgcgccaggtacacccggatcgggtacagcgtcatcgagccccggtgcgtcacctggtacgtcgagcacggggtcgccaggggcgtcccctgggacgtcctcaacaggctcgcccggtgcgtcacccggcacgtcgtccacgggttcacctggtagctccccttccgcgtccactggcaccgggcctggaactccggggagcggcacagcgagctcgtcgccgggagcatcgcctgggacatcgagcaccgggtcgccaggagcatcgcccggaacatccagcacaggaagccccggcgcgtcgcccgggacatcaagcacaggttccccgggatcgagcacgccgtccggagccactggatcaccagggagctcgacaccttccggcgcaacgggatcgcccggagccagcccgggtacgtcaagcactggctcccctgcctcgagctcagatcaagaggaaatcgattatgatgataccatatcagttgaaatgaagaaggaagattttgacatttatgatgaggatgaaaatcagagcccccgcagctttcaaaagaaaacacgacactattttattgctgcagtggagaggctctgggattatgggatgagtagctccccacatgttctaagaaacagggctcagagtggcagtgtccctcagttcaagaaagttgttttccaggaatttactgatggctcctttactcagcccttataccgtggagaactaaatgaacatttgggactcctggggccatatataagagcagaagttgaagataatatcatggtaactttcagaaatcaggcctctcgtccctattccttctattctagccttatttcttatgaggaagatcagaggcaaggagcagaacctagaaaaaactttgtcaagcctaatgaaaccaaaacttacttttggaaagtgcaacatcatatggcacccactaaagatgagtttgactgcaaagcctgggcttatttctctgatgttgacctggaaaaagatgtgcactcaggcctgattggaccccttctggtctgccacactaacacactgaaccctgctcatgggagacaagtgacagtacaggaatttgctctgtttttcaccatctttgatgagaccaaaagctggtacttcactgaaaatatggaaagaaactgcagggctccctgcaatatccagatggaagatcccacttttaaagagaattatcgcttccatgcaatcaatggctacataatggatacactacctggcttagtaatggctcaggatcaaaggattcgatggtatctgctcagcatgggcagcaatgaaaacatccattctattcatttcagtggacatgtgttcactgtacgaaaaaaagaggagtataaaatggcactgtacaatctctatccaggtgtttttgagacagtggaaatgttaccatccaaagctggaatttggcgggtggaatgccttattggcgagcatctacatgctgggatgagcacactttttctggtgtacagcaataagtgtcagactcccctgggaatggcttctggacacattagagattttcagattacagcttcaggacaatatggacagtgggccccaaagctggccagacttcattattccggatcaatcaatgcctggagcaccaaggagcccttttcttggatcaaggtggatctgttggcaccaatgattattcacggcatcaagacccagggtgcccgtcagaagttctccagcctctacatctctcagtttatcatcatgtatagtcttgatgggaagaagtggcagacttatcgaggaaattccactggaaccttaatggtcttctttggcaatgtggattcatctgggataaaacacaatatttttaaccctccaattattgctcgatacatccgtttgcacccaactcattatagcattcgcagcactcttcgcatggagttgatgggctgtgatttaaatagttgcagcatgccattgggaatggagagtaaagcaatatcagatgcacagattactgcttcatcctactttaccaatatgtttgccacctggtctccttcaaaagctcgacttcacctccaagggaggagtaatgcctggagacctcaggtgaataatccaaaagagtggctgcaagtggacttccagaagacaatgaaagtcacaggagtaactactcagggagtaaaatctctgcttaccagcatgtatgtgaaggagttcctcatctccagcagtcaagatggccatcagtggactctcttttttcagaatggcaaagtaaaggtttttcagggaaatcaagactccttcacacctgtggtgaactctctagacccaccgttactgactcgctaccttcgaattcacccccagagttgggtgcaccagattgccctgaggatggaggttctgggctgcgaggcacaggacctctacggcgccggatcacctggggccgaaacggccgaacaaaaactcatctcagaagaggatctgtcacctgcaaccggtcatcatcaccatcaccattga

SEQ ID NO: 915 - protein, 1769 aa, synthetic construct
  REGION 1..1769: note = Description of Artificial Sequence: Synthetic polypeptide
ATRRYYLGAVELSWDYMQSDLGELPVDARFPPRVPKSFPFGAPTSESATPESGPGSEPATSGSETPGTSESATPESGPGSEPATSGSETPGTSESATPESGPGTSTEPSEGSAPGSPAGSPTSTEEGTSESATPESGPGSEPATSGSETPGTSESATPESGPGSPAGSPTSTEEGSPAGSPTSTEEGASSNTSVVYKKTLFVEFTDHLFNIAKPRPPWMGLLGPTIQAEVYDTVVITLKNMASHPVSLHAVGVSYWKASEGAEYDDQTSQREKEDDKVFPGGSHTYVWQVLKENGPMASDPLCLTYSYLSHVDLVKDLNSGLIGALLVCREGSLAKEKTQTLHKFILLFAVFDEGKSWHSETKNSLMQDRDAASARAWPKMHTVNGYVNRSLPGLIGCHRKSVYWHVIGMGTTPEVHSIFLEGHTFLVRNHRQASLEISPITFLTAQTLLMDLGQFLLFCHISSHQHDGMEAYVKVDSCPEEPQLRMKNNEEAEDYDDDLTDSEMDVVRFDDDNSPSFIQIRSVAKKHPKTWVHYIAAEEEDWDYAPLVLAPDDRSYKSQYLNNGPQRIGRKYKKVRFMAYTDETFKTREAIQHESGILGPLLYGEVGDTLLIIFKNQASRPYNIYPHGITDVRPLYSRRLPKGVKHLKDFPILPGEIFKYKWTVTVEDGPTKSDPRCLTRYYSSFVNMERDLASGLIGPLLICYKESVDQRGNQIMSDKRNVILFSVFDENRSWYLTENIQRFLPNPAGVQLEDPEFQASNIMHSINGYVFDSLQLSVCLHEVAYWYILSIGAQTDFLSVFFSGYTFKHKMVYEDTLTLFPFSGETVFMSMENPGLWILGCHNSDFRNRGMTALLKVSSCDKNTGDYYEDSYEDISAYLLSKNNAIEPRSFSQNPPVLKRHQREITRTTLQGAPGTPGSGTASSSPGASPGTSSTGSPGASPGTSSTGSPGASPGTSSTGSPGSSPSASTGTGPGTPGSGTASSSPGASPGTSSTGSPGASPGTSSTGSPGASPGTSSTGSPGSSTPSGATGSPGSSTPSGATGSPGASPGTSSTGSPASSSDQEEIDYDDTISVEMKKEDFDIYDEDENQSPRSFQKKTRHYFIAAVERLWDYGMSSSPHVLRNRAQSGSVPQFKKVVFQEFTDGSFTQPLYRGELNEHLGLLGPYIRAEVEDNIMVTFRNQASRPYSFYSSLISYEEDQRQGAEPRKNFVKPNETKTYFWKVQHHMAPTKDEFDCKAWAYFSDVDLEKDVHSGLIGPLLVCHTNTLNPAHGRQVTVQEFALFFTIFDETKSWYFTENMERNCRAPCNIQMEDPTFKENYRFHAINGYIMDTLPGLVMAQDQRIRWYLLSMGSNENIHSIHFSGHVFTVRKKEEYKMALYNLYPGVFETVEMLPSKAGIWRVECLIGEHLHAGMSTLFLVYSNKCQTPLGMASGHIRDFQITASGQYGQWAPKLARLHYSGSINAWSTKEPFSWIKVDLLAPMIIHGIKTQGARQKFSSLYISQFIIMYSLDGKKWQTYRGNSTGTLMVFFGNVDSSGIKHNIFNPPIIARYIRLHPTHYSIRSTLRMELMGCDLNSCSMPLGMESKAISDAQITASSYFTNMFATWSPSKARLHLQGRSNAWRPQVNNPKEWLQVDFQKTMKVTGVTTQGVKSLLTSMYVKEFLISSSQDGHQWTLFFQNGKVKVFQGNQDSFTPVVNSLDPPLLTRYLRIHPQSWVHQIALRMEVLGCEAQDLYGAGSPGAETAEQKLISEEDLSPATGHHHHHH

SEQ ID NO: 916 - DNA, 5310 bp, synthetic construct
  misc_feature 1..5310: note = Description of Artificial Sequence: Synthetic polynucleotide
  source 1..5310: mol_type = other DNA
gccaccagaagatactacctgggtgcagtggaactgtcatgggactatatgcaaagtgatctcggtgagctgcctgtggacgcaagatttcctcctagagtgccaaaatcttttccattcggcgcgccaacatcagagagcgccacccctgaaagtggtcccgggagcgagccagccacatctgggtcggaaacgccaggcacaagtgagtctgcaactcccgagtccggacctggctccgagcctgccactagcggctccgagactccgggaacttccgagagcgctacaccagaaagcggacccggaaccagtaccgaacctagcgagggctctgctccgggcagcccagccggctctcctacatccacggaggagggcacttccgaatccgccaccccggagtcagggccaggatctgaacccgctacctcaggcagtgagacgccaggaacgagcgagtccgctacaccggagagtgggccagggagccctgctggatctcctacgtccactgaggaagggtcaccagcgggctcgcccaccagcactgaagaaggtgcctcgagcaacacctcagtcgtgtacaaaaagactctgtttgtagaattcacggatcaccttttcaacatcgctaagccaaggccaccctggatgggtctgctaggtcctaccatccaggctgaggtttatgatacagtggtcattacacttaagaacatggcttcccatcctgtcagtcttcatgctgttggtgtatcctactggaaagcttctgagggagctgaatatgatgatcagaccagtcaaagggagaaagaagatgataaagtcttccctggtggaagccatacatatgtctggcaggtcctgaaagagaatggtccaatggcctctgacccactgtgccttacctactcatatctttctcatgtggacctggtaaaagacttgaattcaggcctcattggagccctactagtatgtagagaagggagtctggccaaggaaaagacacagaccttgcacaaatttatactactttttgctgtatttgatgaagggaaaagttggcactcagaaacaaagaactccttgatgcaggatagggatgctgcatctgctcgggcctggcctaaaatgcacacagtcaatggttatgtaaacaggtctctgccaggtctgattggatgccacaggaaatcagtctattggcatgtgattggaatgggcaccactcctgaagtgcactcaatattcctcgaaggtcacacatttcttgtgaggaaccatcgccaggctagcttggaaatctcgccaataactttccttactgctcaaacactcttgatggaccttggacagtttctactgttttgtcatatctcttcccaccaacatgatggcatggaagcttatgtcaaagtagacagctgtccagaggaaccccaactacgaatgaaaaataatgaagaagcggaagactatgatgatgatcttactgattctgaaatggatgtggtcaggtttgatgatgacaactctccttcctttatccaaattcgctcagttgccaagaagcatcctaaaacttgggtacattacattgctgctgaagaggaggactgggactatgctcccttagtcctcgcccccgatgacagaagttataaaagtcaatatttgaacaatggccctcagcggattggtaggaagtacaaaaaagtccgatttatggcatacacagatgaaacctttaagactcgtgaagctattcagcatgaatcaggaatcttgggacctttactttatggggaagttggagacacactgttgattatatttaagaatcaagcaagcagaccatataacatctaccctcacggaatcactgatgtccgtcctttgtattcaaggagattaccaaaaggtgtaaaacatttgaaggattttccaattctgccaggagaaatattcaaatataaatggacagtgactgtagaagatgggccaactaaatcagatcctcggtgcctgacccgctattactctagtttcgttaatatggagagagatctagcttcaggactcattggccctctcctcatctgctacaaagaatctgtagatcaaagaggaaaccagataatgtcagacaagaggaatgtcatcctgttttctgtatttgatgagaaccgaagctggtacctcacagagaatatacaacgctttctccccaatccagctggagtgcagcttgaggatccagagttccaagcctccaacatcatgcacagcatcaatggctatgtttttgatagtttgcagttgtcagtttgtttgcatgaggtggcatactggtacattctaagcattggagcacagactgacttcctttctgtcttcttctctggatataccttcaaacacaaaatggtctatgaagacacactcaccctattcccattctcaggagaaactgtcttcatgtcgatggaaaacccaggtctatggattctggggtgccacaactcagactttcggaacagaggcatgaccgccttactgaaggtttctagttgtgacaagaacactggtgattattacgaggacagttatgaagatatttcagcatacttgctgagtaaaaacaatgccattgaaccaagaagcttctctcaaaacccaccagtcttgaaacgccatcaacgggaaataactcgtactactcttcagggcgcgccaggtacacccggatcgggtacagcgtcatcgagccccggtgcgtcacctggtacgtcgagcacggggtcgccaggggcgtcccctgggacgtcctcaacaggctcgcccggtgcgtcacccggcacgtcgtccacgggttcacctggtagctccccttccgcgtccactggcaccgggcctggaactccggggagcggcacagcgagctcgtcgccgggagcatcgcctgggacatcgagcaccgggtcgccaggagcatcgcccggaacatccagcacaggaagccccggcgcgtcgcccgggacatcaagcacaggttccccgggatcgagcacgccgtccggagccactggatcaccagggagctcgacaccttccggcgcaacgggatcgcccggagccagcccgggtacgtcaagcactggctcccctgcctcgagctcagatcaagaggaaatcgattatgatgataccatatcagttgaaatgaagaaggaagattttgacatttatgatgaggatgaaaatcagagcccccgcagctttcaaaagaaaacacgacactattttattgctgcagtggagaggctctgggattatgggatgagtagctccccacatgttctaagaaacagggctcagagtggcagtgtccctcagttcaagaaagttgttttccaggaatttactgatggctcctttactcagcccttataccgtggagaactaaatgaacatttgggactcctggggccatatataagagcagaagttgaagataatatcatggtaactttcagaaatcaggcctctcgtccctattccttctattctagccttatttcttatgaggaagatcagaggcaaggagcagaacctagaaaaaactttgtcaagcctaatgaaaccaaaacttacttttggaaagtgcaacatcatatggcacccactaaagatgagtttgactgcaaagcctgggcttatttctctgatgttgacctggaaaaagatgtgcactcaggcctgattggaccccttctggtctgccacactaacacactgaaccctgctcatgggagacaagtgacagtacaggaatttgctctgtttttcaccatctttgatgagaccaaaagctggtacttcactgaaaatatggaaagaaactgcagggctccctgcaatatccagatggaagatcccacttttaaagagaattatcgcttccatgcaatcaatggctacataatggatacactacctggcttagtaatggctcaggatcaaaggattcgatggtatctgctcagcatgggcagcaatgaaaacatccattctattcatttcagtggacatgtgttcactgtacgaaaaaaagaggagtataaaatggcactgtacaatctctatccaggtgtttttgagacagtggaaatgttaccatccaaagctggaatttggcgggtggaatgccttattggcgagcatctacatgctgggatgagcacactttttctggtgtacagcaataagtgtcagactcccctgggaatggcttctggacacattagagattttcagattacagcttcaggacaatatggacagtgggccccaaagctggccagacttcattattccggatcaatcaatgcctggagcaccaaggagcccttttcttggatcaaggtggatctgttggcaccaatgattattcacggcatcaagacccagggtgcccgtcagaagttctccagcctctacatctctcagtttatcatcatgtatagtcttgatgggaagaagtggcagacttatcgaggaaattccactggaaccttaatggtcttctttggcaatgtggattcatctgggataaaacacaatatttttaaccctccaattattgctcgatacatccgtttgcacccaactcattatagcattcgcagcactcttcgcatggagttgatgggctgtgatttaaatagttgcagcatgccattgggaatggagagtaaagcaatatcagatgcacagattactgcttcatcctactttaccaatatgtttgccacctggtctccttcaaaagctcgacttcacctccaagggaggagtaatgcctggagacctcaggtgaataatccaaaagagtggctgcaagtggacttccagaagacaatgaaagtcacaggagtaactactcagggagtaaaatctctgcttaccagcatgtatgtgaaggagttcctcatctccagcagtcaagatggccatcagtggactctcttttttcagaatggcaaagtaaaggtttttcagggaaatcaagactccttcacacctgtggtgaactctctagacccaccgttactgactcgctaccttcgaattcacccccagagttgggtgcaccagattgccctgaggatggaggttctgggctgcgaggcacaggacctctacggcgccggatcacctggggccgaaacggccgaacaaaaactcatctcagaagaggatctgtcacctgcaaccggtcatcatcaccatcaccattga

SEQ ID NO: 917 - protein, 1769 aa, synthetic construct
  REGION 1..1769: note = Description of Artificial Sequence: Synthetic polypeptide
ATRRYYLGAVELSWDYMQSDLGELPVDARFPPRVPKSFPFGAPGSSPSASTGTGPGSSPSASTGTGPGASPGTSSTGSPGASPGTSSTGSPGSSTPSGATGSPGSSPSASTGTGPGASPGTSSTGSPGSSPSASTGTGPGTPGSGTASSSPGSSTPSGATGSPGSSTPSGATGSPGASPGTSSTGSPASSNTSVVYKKTLFVEFTDHLFNIAKPRPPWMGLLGPTIQAEVYDTVVITLKNMASHPVSLHAVGVSYWKASEGAEYDDQTSQREKEDDKVFPGGSHTYVWQVLKENGPMASDPLCLTYSYLSHVDLVKDLNSGLIGALLVCREGSLAKEKTQTLHKFILLFAVFDEGKSWHSETKNSLMQDRDAASARAWPKMHTVNGYVNRSLPGLIGCHRKSVYWHVIGMGTTPEVHSIFLEGHTFLVRNHRQASLEISPITFLTAQTLLMDLGQFLLFCHISSHQHDGMEAYVKVDSCPEEPQLRMKNNEEAEDYDDDLTDSEMDVVRFDDDNSPSFIQIRSVAKKHPKTWVHYIAAEEEDWDYAPLVLAPDDRSYKSQYLNNGPQRIGRKYKKVRFMAYTDETFKTREAIQHESGILGPLLYGEVGDTLLIIFKNQASRPYNIYPHGITDVRPLYSRRLPKGVKHLKDFPILPGEIFKYKWTVTVEDGPTKSDPRCLTRYYSSFVNMERDLASGLIGPLLICYKESVDQRGNQIMSDKRNVILFSVFDENRSWYLTENIQRFLPNPAGVQLEDPEFQASNIMHSINGYVFDSLQLSVCLHEVAYWYILSIGAQTDFLSVFFSGYTFKHKMVYEDTLTLFPFSGETVFMSMENPGLWILGCHNSDFRNRGMTALLKVSSCDKNTGDYYEDSYEDISAYLLSKNNAIEPRSFSQNPPVLKRHQREITRTTLQGAPGTPGSGTASSSPGASPGTSSTGSPGASPGTSSTGSPGASPGTSSTGSPGSSPSASTGTGPGTPGSGTASSSPGASPGTSSTGSPGASPGTSSTGSPGASPGTSSTGSPGSSTPSGATGSPGSSTPSGATGSPGASPGTSSTGSPASSSDQEEIDYDDTISVEMKKEDFDIYDEDENQSPRSFQKKTRHYFIAAVERLWDYGMSSSPHVLRNRAQSGSVPQFKKVVFQEFTDGSFTQPLYRGELNEHLGLLGPYIRAEVEDNIMVTFRNQASRPYSFYSSLISYEEDQRQGAEPRKNFVKPNETKTYFWKVQHHMAPTKDEFDCKAWAYFSDVDLEKDVHSGLIGPLLVCHTNTLNPAHGRQVTVQEFALFFTIFDETKSWYFTENMERNCRAPCNIQMEDPTFKENYRFHAINGYIMDTLPGLVMAQDQRIRWYLLSMGSNENIHSIHFSGHVFTVRKKEEYKMALYNLYPGVFETVEMLPSKAGIWRVECLIGEHLHAGMSTLFLVYSNKCQTPLGMASGHIRDFQITASGQYGQWAPKLARLHYSGSINAWSTKEPFSWIKVDLLAPMIIHGIKTQGARQKFSSLYISQFIIMYSLDGKKWQTYRGNSTGTLMVFFGNVDSSGIKHNIFNPPIIARYIRLHPTHYSIRSTLRMELMGCDLNSCSMPLGMESKAISDAQITASSYFTNMFATWSPSKARLHLQGRSNAWRPQVNNPKEWLQVDFQKTMKVTGVTTQGVKSLLTSMYVKEFLISSSQDGHQWTLFFQNGKVKVFQGNQDSFTPVVNSLDPPLLTRYLRIHPQSWVHQIALRMEVLGCEAQDLYGAGSPGAETAEQKLISEEDLSPATGHHHHHH

SEQ ID NO: 918 - DNA, 5310 bp, synthetic construct
  misc_feature 1..5310: note = Description of Artificial Sequence: Synthetic polynucleotide
  source 1..5310: mol_type = other DNA
gccaccagaagatactacctgggtgcagtggaactgtcatgggactatatgcaaagtgatctcggtgagctgcctgtggacgcaagatttcctcctagagtgccaaaatcttttccattcggcgcgccaggctccagcccctccgcgagcacgggaaccggaccaggttcgtcaccctcagcatcaacggggacgggaccgggggcgtcaccaggaacgtcctccaccggctcgccgggtgcatcacccggaacgtcatcgaccggatcgccagggagctcgacgccatcaggcgcaacaggatcacctggctcaagccctagcgcgtcaaccggcacgggtccgggtgcctcccctggcacgtccagcaccggatcacccggatcgagcccatccgcctcaaccggaaccggacccggtacaccagggtcgggaacagcctcctcgtcaccaggctcctcaaccccctcgggagccacgggttcgcccggttcgtcaacgccttccggagcaactggtagccccggagcatcgccaggaacttcgagcacggggtcgcccgcctcgagcaacacctcagtcgtgtacaaaaagactctgtttgtagaattcacggatcaccttttcaacatcgctaagccaaggccaccctggatgggtctgctaggtcctaccatccaggctgaggtttatgatacagtggtcattacacttaagaacatggcttcccatcctgtcagtcttcatgctgttggtgtatcctactggaaagcttctgagggagctgaatatgatgatcagaccagtcaaagggagaaagaagatgataaagtcttccctggtggaagccatacatatgtctggcaggtcctgaaagagaatggtccaatggcctctgacccactgtgccttacctactcatatctttctcatgtggacctggtaaaagacttgaattcaggcctcattggagccctactagtatgtagagaagggagtctggccaaggaaaagacacagaccttgcacaaatttatactactttttgctgtatttgatgaagggaaaagttggcactcagaaacaaagaactccttgatgcaggatagggatgctgcatctgctcgggcctggcctaaaatgcacacagtcaatggttatgtaaacaggtctctgccaggtctgattggatgccacaggaaatcagtctattggcatgtgattggaatgggcaccactcctgaagtgcactcaatattcctcgaaggtcacacatttcttgtgaggaaccatcgccaggctagcttggaaatctcgccaataactttccttactgctcaaacactcttgatggaccttggacagtttctactgttttgtcatatctcttcccaccaacatgatggcatggaagcttatgtcaaagtagacagctgtccagaggaaccccaactacgaatgaaaaataatgaagaagcggaagactatgatgatgatcttactgattctgaaatggatgtggtcaggtttgatgatgacaactctccttcctttatccaaattcgctcagttgccaagaagcatcctaaaacttgggtacattacattgctgctgaagaggaggactgggactatgctcccttagtcctcgcccccgatgacagaagttataaaagtcaatatttgaacaatggccctcagcggattggtaggaagtacaaaaaagtccgatttatggcatacacagatgaaacctttaagactcgtgaagctattcagcatgaatcaggaatcttgggacctttactttatggggaagttggagacacactgttgattatatttaagaatcaagcaagcagaccatataacatctaccctcacggaatcactgatgtccgtcctttgtattcaaggagattaccaaaaggtgtaaaacatttgaaggattttccaattctgccaggagaaatattcaaatataaatggacagtgactgtagaagatgggccaactaaatcagatcctcggtgcctgacccgctattactctagtttcgttaatatggagagagatctagcttcaggactcattggccctctcctcatctgctacaaagaatctgtagatcaaagaggaaaccagataatgtcagacaagaggaatgtcatcctgttttctgtatttgatgagaaccgaagctggtacctcacagagaatatacaacgctttctccccaatccagctggagtgcagcttgaggatccagagttccaagcctccaacatcatgcacagcatcaatggctatgtttttgatagtttgcagttgtcagtttgtttgcatgaggtggcatactggtacattctaagcattggagcacagactgacttcctttctgtcttcttctctggatataccttcaaacacaaaatggtctatgaagacacactcaccctattcccattctcaggagaaactgtcttcatgtcgatggaaaacccaggtctatggattctggggtgccacaactcagactttcggaacagaggcatgaccgccttactgaaggtttctagttgtgacaagaacactggtgattattacgaggacagttatgaagatatttcagcatacttgctgagtaaaaacaatgccattgaaccaagaagcttctctcaaaacccaccagtcttgaaacgccatcaacgggaaataactcgtactactcttcagggcgcgccaggtacacccggatcgggtacagcgtcatcgagccccggtgcgtcacctggtacgtcgagcacggggtcgccaggggcgtcccctgggacgtcctcaacaggctcgcccggtgcgtcacccggcacgtcgtccacgggttcacctggtagctccccttccgcgtccactggcaccgggcctggaactccggggagcggcacagcgagctcgtcgccgggagcatcgcctgggacatcgagcaccgggtcgccaggagcatcgcccggaacatccagcacaggaagccccggcgcgtcgcccgggacatcaagcacaggttccccgggatcgagcacgccgtccggagccactggatcaccagggagctcgacaccttccggcgcaacgggatcgcccggagccagcccgggtacgtcaagcactggctcccctgcctcgagctcagatcaagaggaaatcgattatgatgataccatatcagttgaaatgaagaaggaagattttgacatttatgatgaggatgaaaatcagagcccccgcagctttcaaaagaaaacacgacactattttattgctgcagtggagaggctctgggattatgggatgagtagctccccacatgttctaagaaacagggctcagagtggcagtgtccctcagttcaagaaagttgttttccaggaatttactgatggctcctttactcagcccttataccgtggagaactaaatgaacatttgggactcctggggccatatataagagcagaagttgaagataatatcatggtaactttcagaaatcaggcctctcgtccctattccttctattctagccttatttcttatgaggaagatcagaggcaaggagcagaacctagaaaaaactttgtcaagcctaatgaaaccaaaacttacttttggaaagtgcaacatcatatggcacccactaaagatgagtttgactgcaaagcctgggcttatttctctgatgttgacctggaaaaagatgtgcactcaggcctgattggaccccttctggtctgccacactaacacactgaaccctgctcatgggagacaagtgacagtacaggaatttgctctgtttttcaccatctttgatgagaccaaaagctggtacttcactgaaaatatggaaagaaactgcagggctccctgcaatatccagatggaagatcccacttttaaagagaattatcgcttccatgcaatcaatggctacataatggatacactacctggcttagtaatggctcaggatcaaaggattcgatggtatctgctcagcatgggcagcaatgaaaacatccattctattcatttcagtggacatgtgttcactgtacgaaaaaaagaggagtataaaatggcactgtacaatctctatccaggtgtttttgagacagtggaaatgttaccatccaaagctggaatttggcgggtggaatgccttattggcgagcatctacatgctgggatgagcacactttttctggtgtacagcaataagtgtcagactcccctgggaatggcttctggacacattagagattttcagattacagcttcaggacaatatggacagtgggccccaaagctggccagacttcattattccggatcaatcaatgcctggagcaccaaggagcccttttcttggatcaaggtggatctgttggcaccaatgattattcacggcatcaagacccagggtgcccgtcagaagttctccagcctctacatctctcagtttatcatcatgtatagtcttgatgggaagaagtggcagacttatcgaggaaattccactggaaccttaatggtcttctttggcaatgtggattcatctgggataaaacacaatatttttaaccctccaattattgctcgatacatccgtttgcacccaactcattatagcattcgcagcactcttcgcatggagttgatgggctgtgatttaaatagttgcagcatgccattgggaatggagagtaaagcaatatcagatgcacagattactgcttcatcctactttaccaatatgtttgccacctggtctccttcaaaagctcgacttcacctccaagggaggagtaatgcctggagacctcaggtgaataatccaaaagagtggctgcaagtggacttccagaagacaatgaaagtcacaggagtaactactcagggagtaaaatctctgcttaccagcatgtatgtgaaggagttcctcatctccagcagtcaagatggccatcagtggactctcttttttcagaatggcaaagtaaaggtttttcagggaaatcaagactccttcacacctgtggtgaactctctagacccaccgttactgactcgctaccttcgaattcacccccagagttgggtgcaccagattgccctgaggatggaggttctgggctgcgaggcacaggacctctacggcgccggatcacctggggccgaaacggccgaacaaaaactcatctcagaagaggatctgtcacctgcaaccggtcatcatcaccatcaccattga

SEQ ID NO: 919 - protein, 1769 aa, synthetic construct
  REGION 1..1769: note = Description of Artificial Sequence: Synthetic polypeptide
ATRRYYLGAVELSWDYMQSDLGELPVGAPTSESATPESGPGSEPATSGSETPGTSESATPESGPGSEPATSGSETPGTSESATPESGPGTSTEPSEGSAPGSPAGSPTSTEEGTSESATPESGPGSEPATSGSETPGTSESATPESGPGSPAGSPTSTEEGSPAGSPTSTEEGASSDARFPPRVPKSFPFNTSVVYKKTLFVEFTDHLFNIAKPRPPWMGLLGPTIQAEVYDTVVITLKNMASHPVSLHAVGVSYWKASEGAEYDDQTSQREKEDDKVFPGGSHTYVWQVLKENGPMASDPLCLTYSYLSHVDLVKDLNSGLIGALLVCREGSLAKEKTQTLHKFILLFAVFDEGKSWHSETKNSLMQDRDAASARAWPKMHTVNGYVNRSLPGLIGCHRKSVYWHVIGMGTTPEVHSIFLEGHTFLVRNHRQASLEISPITFLTAQTLLMDLGQFLLFCHISSHQHDGMEAYVKVDSCPEEPQLRMKNNEEAEDYDDDLTDSEMDVVRFDDDNSPSFIQIRSVAKKHPKTWVHYIAAEEEDWDYAPLVLAPDDRSYKSQYLNNGPQRIGRKYKKVRFMAYTDETFKTREAIQHESGILGPLLYGEVGDTLLIIFKNQASRPYNIYPHGITDVRPLYSRRLPKGVKHLKDFPILPGEIFKYKWTVTVEDGPTKSDPRCLTRYYSSFVNMERDLASGLIGPLLICYKESVDQRGNQIMSDKRNVILFSVFDENRSWYLTENIQRFLPNPAGVQLEDPEFQASNIMHSINGYVFDSLQLSVCLHEVAYWYILSIGAQTDFLSVFFSGYTFKHKMVYEDTLTLFPFSGETVFMSMENPGLWILGCHNSDFRNRGMTALLKVSSCDKNTGDYYEDSYEDISAYLLSKNNAIEPRSFSQNPPVLKRHQREITRTTLQGAPGTPGSGTASSSPGASPGTSSTGSPGASPGTSSTGSPGASPGTSSTGSPGSSPSASTGTGPGTPGSGTASSSPGASPGTSSTGSPGASPGTSSTGSPGASPGTSSTGSPGSSTPSGATGSPGSSTPSGATGSPGASPGTSSTGSPASSSDQEEIDYDDTISVEMKKEDFDIYDEDENQSPRSFQKKTRHYFIAAVERLWDYGMSSSPHVLRNRAQSGSVPQFKKVVFQEFTDGSFTQPLYRGELNEHLGLLGPYIRAEVEDNIMVTFRNQASRPYSFYSSLISYEEDQRQGAEPRKNFVKPNETKTYFWKVQHHMAPTKDEFDCKAWAYFSDVDLEKDVHSGLIGPLLVCHTNTLNPAHGRQVTVQEFALFFTIFDETKSWYFTENMERNCRAPCNIQMEDPTFKENYRFHAINGYIMDTLPGLVMAQDQRIRWYLLSMGSNENIHSIHFSGHVFTVRKKEEYKMALYNLYPGVFETVEMLPSKAGIWRVECLIGEHLHAGMSTLFLVYSNKCQTPLGMASGHIRDFQITASGQYGQWAPKLARLHYSGSINAWSTKEPFSWIKVDLLAPMIIHGIKTQGARQKFSSLYISQFIIMYSLDGKKWQTYRGNSTGTLMVFFGNVDSSGIKHNIFNPPIIARYIRLHPTHYSIRSTLRMELMGCDLNSCSMPLGMESKAISDAQITASSYFTNMFATWSPSKARLHLQGRSNAWRPQVNNPKEWLQVDFQKTMKVTGVTTQGVKSLLTSMYVKEFLISSSQDGHQWTLFFQNGKVKVFQGNQDSFTPVVNSLDPPLLTRYLRIHPQSWVHQIALRMEVLGCEAQDLYGAGSPGAETAEQKLISEEDLSPATGHHHHHH

SEQ ID NO: 920 - DNA, 5310 bp, synthetic construct
  misc_feature 1..5310: note = Description of Artificial Sequence: Synthetic polynucleotide
  source 1..5310: mol_type = other DNA
gccaccagaagatactacctgggtgcagtggaactgtcatgggactatatgcaaagtgatctcggtgagctgcctgtgggcgcgccaacatcagagagcgccacccctgaaagtggtcccgggagcgagccagccacatctgggtcggaaacgccaggcacaagtgagtctgcaactcccgagtccggacctggctccgagcctgccactagcggctccgagactccgggaacttccgagagcgctacaccagaaagcggacccggaaccagtaccgaacctagcgagggctctgctccgggcagcccagccggctctcctacatccacggaggagggcacttccgaatccgccaccccggagtcagggccaggatctgaacccgctacctcaggcagtgagacgccaggaacgagcgagtccgctacaccggagagtgggccagggagccctgctggatctcctacgtccactgaggaagggtcaccagcgggctcgcccaccagcactgaagaaggtgcctcgagcgacgcaagatttcctcctagagtgccaaaatcttttccattcaacacctcagtcgtgtacaaaaagactctgtttgtagaattcacggatcaccttttcaacatcgctaagccaaggccaccctggatgggtctgctaggtcctaccatccaggctgaggtttatgatacagtggtcattacacttaagaacatggcttcccatcctgtcagtcttcatgctgttggtgtatcctactggaaagcttctgagggagctgaatatgatgatcagaccagtcaaagggagaaagaagatgataaagtcttccctggtggaagccatacatatgtctggcaggtcctgaaagagaatggtccaatggcctctgacccactgtgccttacctactcatatctttctcatgtggacctggtaaaagacttgaattcaggcctcattggagccctactagtatgtagagaagggagtctggccaaggaaaagacacagaccttgcacaaatttatactactttttgctgtatttgatgaagggaaaagttggcactcagaaacaaagaactccttgatgcaggatagggatgctgcatctgctcgggcctggcctaaaatgcacacagtcaatggttatgtaaacaggtctctgccaggtctgattggatgccacaggaaatcagtctattggcatgtgattggaatgggcaccactcctgaagtgcactcaatattcctcgaaggtcacacatttcttgtgaggaaccatcgccaggctagcttggaaatctcgccaataactttccttactgctcaaacactcttgatggaccttggacagtttctactgttttgtcatatctcttcccaccaacatgatggcatggaagcttatgtcaaagtagacagctgtccagaggaaccccaactacgaatgaaaaataatgaagaagcggaagactatgatgatgatcttactgattctgaaatggatgtggtcaggtttgatgatgacaactctccttcctttatccaaattcgctcagttgccaagaagcatcctaaaacttgggtacattacattgctgctgaagaggaggactgggactatgctcccttagtcctcgcccccgatgacagaagttataaaagtcaatatttgaacaatggccctcagcggattggtaggaagtacaaaaaagtccgatttatggcatacacagatgaaacctttaagactcgtgaagctattcagcatgaatcaggaatcttgggacctttactttatggggaagttggagacacactgttgattatatttaagaatcaagcaagcagaccatataacatctaccctcacggaatcactgatgtccgtcctttgtattcaaggagattaccaaaaggtgtaaaacatttgaaggattttccaattctgccaggagaaatattcaaatataaatggacagtgactgtagaagatgggccaactaaatcagatcctcggtgcctgacccgctattactctagtttcgttaatatggagagagatctagcttcaggactcattggccctctcctcatctgctacaaagaatctgtagatcaaagaggaaaccagataatgtcagacaagaggaatgtcatcctgttttctgtatttgatgagaaccgaagctggtacctcacagagaatatacaacgctttctccccaatccagctggagtgcagcttgaggatccagagttccaagcctccaacatcatgcacagcatcaatggctatgtttttgatagtttgcagttgtcagtttgtttgcatgaggtggcatactggtacattctaagcattggagcacagactgacttcctttctgtcttcttctctggatataccttcaaacacaaaatggtctatgaagacacactcaccctattcccattctcaggagaaactgtcttcatgtcgatggaaaacccaggtctatggattctggggtgccacaactcagactttcggaacagaggcatgaccgccttactgaaggtttctagttgtgacaagaacactggtgattattacgaggacagttatgaagatatttcagcatacttgctgagtaaaaacaatgccattgaaccaagaagcttctctcaaaacccaccagtcttgaaacgccatcaacgggaaataactcgtactactcttcagggcgcgccaggtacacccggatcgggtacagcgtcatcgagccccggtgcgtcacctggtacgtcgagcacggggtcgccaggggcgtcccctgggacgtcctcaacaggctcgcccggtgcgtcacccggcacgtcgtccacgggttcacctggtagctccccttccgcgtccactggcaccgggcctggaactccggggagcggcacagcgagctcgtcgccgggagcatcgcctgggacatcgagcaccgggtcgccaggagcatcgcccggaacatccagcacaggaagccccggcgcgtcgcccgggacatcaagcacaggttccccgggatcgagcacgccgtccggagccactggatcaccagggagctcgacaccttccggcgcaacgggatcgcccggagccagcccgggtacgtcaagcactggctcccctgcctcgagctcagatcaagaggaaatcgattatgatgataccatatcagttgaaatgaagaaggaagattttgacatttatgatgaggatgaaaatcagagcccccgcagctttcaaaagaaaacacgacactattttattgctgcagtggagaggctctgggattatgggatgagtagctccccacatgttctaagaaacagggctcagagtggcagtgtccctcagttcaagaaagttgttttccaggaatttactgatggctcctttactcagcccttataccgtggagaactaaatgaacatttgggactcctggggccatatataagagcagaagttgaagataatatcatggtaactttcagaaatcaggcctctcgtccctattccttctattctagccttatttcttatgaggaagatcagaggcaaggagcagaacctagaaaaaactttgtcaagcctaatgaaaccaaaacttacttttggaaagtgcaacatcatatggcacccactaaagatgagtttgactgcaaagcctgggcttatttctctgatgttgacctggaaaaagatgtgcactcaggcctgattggaccccttctggtctgccacactaacacactgaaccctgctcatgggagacaagtgacagtacaggaatttgctctgtttttcaccatctttgatgagaccaaaagctggtacttcactgaaaatatggaaagaaactgcagggctccctgcaatatccagatggaagatcccacttttaaagagaattatcgcttccatgcaatcaatggctacataatggatacactacctggcttagtaatggctcaggatcaaaggattcgatggtatctgctcagcatgggcagcaatgaaaacatccattctattcatttcagtggacatgtgttcactgtacgaaaaaaagaggagtataaaatggcactgtacaatctctatccaggtgtttttgagacagtggaaatgttaccatccaaagctggaatttggcgggtggaatgccttattggcgagcatctacatgctgggatgagcacactttttctggtgtacagcaataagtgtcagactcccctgggaatggcttctggacacattagagattttcagattacagcttcaggacaatatggacagtgggccccaaagctggccagacttcattattccggatcaatcaatgcctggagcaccaaggagcccttttcttggatcaaggtggatctgttggcaccaatgattattcacggcatcaagacccagggtgcccgtcagaagttctccagcctctacatctctcagtttatcatcatgtatagtcttgatgggaagaagtggcagacttatcgaggaaattccactggaaccttaatggtcttctttggcaatgtggattcatctgggataaaacacaatatttttaaccctccaattattgctcgatacatccgtttgcacccaactcattatagcattcgcagcactcttcgcatggagttgatgggctgtgatttaaatagttgcagcatgccattgggaatggagagtaaagcaatatcagatgcacagattactgcttcatcctactttaccaatatgtttgccacctggtctccttcaaaagctcgacttcacctccaagggaggagtaatgcctggagacctcaggtgaataatccaaaagagtggctgcaagtggacttccagaagacaatgaaagtcacaggagtaactactcagggagtaaaatctctgcttaccagcatgtatgtgaaggagttcctcatctccagcagtcaagatggccatcagtggactctcttttttcagaatggcaaagtaaaggtttttcagggaaatcaagactccttcacacctgtggtgaactctctagacccaccgttactgactcgctaccttcgaattcacccccagagttgggtgcaccagattgccctgaggatggaggttctgggctgcgaggcacaggacctctacggcgccggatcacctggggccgaaacggccgaacaaaaactcatctcagaagaggatctgtcacctgcaaccggtcatcatcaccatcaccattga

SEQ ID NO: 921 - protein, 1769 aa, synthetic construct
  REGION 1..1769: note = Description of Artificial Sequence: Synthetic polypeptide
ATRRYYLGAVELSWDYMQSDLGELPVDARFPPRVPKSFPFNTSVVYKKTLFVEFTDHLFNIAKPRPPWMGLLGPTIQAEVYDTVVITLKNMASHPVSLHAVGVSYWKASEGAEYDDQTSQREKEDDKVFPGGSHTYVWQVLKENGPMASDPLCLTYSYLSHVDLVKDLNSGLIGALLVCREGSLAKEKTQTLHKFILLFAVFDEGKSWHSETKNSLMQDRDAASARAWPKMHTVNGYVNRSLPGLIGCHRKSVYWHVIGMGTTPEVHSIFLEGHTFLVRNHRQASLEISPITFLTAQTLLMDLGQFLLFCHISSHQHDGMEAYVKVDSCPEEPQLRMKNNEEAEDYDDDLTDSEMDVVRFDDDNSPSFIQIRSVAKKHPKTWVHYIAAEEEDWDYAPLVGAPTSTEPSEGSAPGSPAGSPTSTEEGTSTEPSEGSAPGTSTEPSEGSAPGTSESATPESGPGTSTEPSEGSAPGTSESATPESGPGSEPATSGSETPGTSTEPSEGSAPGTSTEPSEGSAPGTSESATPESGPGTSESATPESGPGASSLAPDDRSYKSQYLNNGPQRIGRKYKKVRFMAYTDETFKTREAIQHESGILGPLLYGEVGDTLLIIFKNQASRPYNIYPHGITDVRPLYSRRLPKGVKHLKDFPILPGEIFKYKWTVTVEDGPTKSDPRCLTRYYSSFVNMERDLASGLIGPLLICYKESVDQRGNQIMSDKRNVILFSVFDENRSWYLTENIQRFLPNPAGVQLEDPEFQASNIMHSINGYVFDSLQLSVCLHEVAYWYILSIGAQTDFLSVFFSGYTFKHKMVYEDTLTLFPFSGETVFMSMENPGLWILGCHNSDFRNRGMTALLKVSSCDKNTGDYYEDSYEDISAYLLSKNNAIEPRSFSQNPPVLKRHQREITRTTLQGAPGTPGSGTASSSPGASPGTSSTGSPGASPGTSSTGSPGASPGTSSTGSPGSSPSASTGTGPGTPGSGTASSSPGASPGTSSTGSPGASPGTSSTGSPGASPGTSSTGSPGSSTPSGATGSPGSSTPSGATGSPGASPGTSSTGSPASSSDQEEIDYDDTISVEMKKEDFDIYDEDENQSPRSFQKKTRHYFIAAVERLWDYGMSSSPHVLRNRAQSGSVPQFKKVVFQEFTDGSFTQPLYRGELNEHLGLLGPYIRAEVEDNIMVTFRNQASRPYSFYSSLISYEEDQRQGAEPRKNFVKPNETKTYFWKVQHHMAPTKDEFDCKAWAYFSDVDLEKDVHSGLIGPLLVCHTNTLNPAHGRQVTVQEFALFFTIFDETKSWYFTENMERNCRAPCNIQMEDPTFKENYRFHAINGYIMDTLPGLVMAQDQRIRWYLLSMGSNENIHSIHFSGHVFTVRKKEEYKMALYNLYPGVFETVEMLPSKAGIWRVECLIGEHLHAGMSTLFLVYSNKCQTPLGMASGHIRDFQITASGQYGQWAPKLARLHYSGSINAWSTKEPFSWIKVDLLAPMIIHGIKTQGARQKFSSLYISQFIIMYSLDGKKWQTYRGNSTGTLMVFFGNVDSSGIKHNIFNPPIIARYIRLHPTHYSIRSTLRMELMGCDLNSCSMPLGMESKAISDAQITASSYFTNMFATWSPSKARLHLQGRSNAWRPQVNNPKEWLQVDFQKTMKVTGVTTQGVKSLLTSMYVKEFLISSSQDGHQWTLFFQNGKVKVFQGNQDSFTPVVNSLDPPLLTRYLRIHPQSWVHQIALRMEVLGCEAQDLYGAGSPGAETAEQKLISEEDLSPATGHHHHHH

SEQ ID NO: 922 - DNA, 5310 bp, synthetic construct
  misc_feature 1..5310: note = Description of Artificial Sequence: Synthetic polynucleotide
  source 1..5310: mol_type = other DNA
gccaccagaagatactacctgggtgcagtggaactgtcatgggactatatgcaaagtgatctcggtgagctgcctgtggacgcaagatttcctcctagagtgccaaaatcttttccattcaacacctcagtcgtgtacaaaaagactctgtttgtagaattcacggatcaccttttcaacatcgctaagccaaggccaccctggatgggtctgctaggtcctaccatccaggctgaggtttatgatacagtggtcattacacttaagaacatggcttcccatcctgtcagtcttcatgctgttggtgtatcctactggaaagcttctgagggagctgaatatgatgatcagaccagtcaaagggagaaagaagatgataaagtcttccctggtggaagccatacatatgtctggcaggtcctgaaagagaatggtccaatggcctctgacccactgtgccttacctactcatatctttctcatgtggacctggtaaaagacttgaattcaggcctcattggagccctactagtatgtagagaagggagtctggccaaggaaaagacacagaccttgcacaaatttatactactttttgctgtatttgatgaagggaaaagttggcactcagaaacaaagaactccttgatgcaggatagggatgctgcatctgctcgggcctggcctaaaatgcacacagtcaatggttatgtaaacaggtctctgccaggtctgattggatgccacaggaaatcagtctattggcatgtgattggaatgggcaccactcctgaagtgcactcaatattcctcgaaggtcacacatttcttgtgaggaaccatcgccaggctagcttggaaatctcgccaataactttccttactgctcaaacactcttgatggaccttggacagtttctactgttttgtcatatctcttcccaccaacatgatggcatggaagcttatgtcaaagtagacagctgtccagaggaaccccaactacgaatgaaaaataatgaagaagcggaagactatgatgatgatcttactgattctgaaatggatgtggtcaggtttgatgatgacaactctccttcctttatccaaattcgctcagttgccaagaagcatcctaaaacttgggtacattacattgctgctgaagaggaggactgggactatgctcccttagtcggcgcgccaaccagtacggagccgtccgaggggagcgcaccaggaagcccggctgggagcccgacttctaccgaagagggtacatctaccgaaccaagtgaaggttcagcaccaggcacctcaacagaaccctctgagggctcggcgcctggtacaagtgagtccgccaccccagaatccgggcctgggacaagcacagaaccttcggaagggagtgcccctggaacatccgaatcggcaaccccagaatcagggccaggatctgagcccgcgacttcgggctccgagacgcctgggacatccaccgagccctccgaaggatcagccccaggcaccagcacggagccctctgagggaagcgcacctggtaccagcgaaagcgcaactcccgaatcaggtcccggtacgagcgagtcggcgaccccggagagcgggccaggtgcctcgagcctcgcccccgatgacagaagttataaaagtcaatatttgaacaatggccctcagcggattggtaggaagtacaaaaaagtccgatttatggcatacacagatgaaacctttaagactcgtgaagctattcagcatgaatcaggaatcttgggacctttactttatggggaagttggagacacactgttgattatatttaagaatcaagcaagcagaccatataacatctaccctcacggaatcactgatgtccgtcctttgtattcaaggagattaccaaaaggtgtaaaacatttgaaggattttccaattctgccaggagaaatattcaaatataaatggacagtgactgtagaagatgggccaactaaatcagatcctcggtgcctgacccgctattactctagtttcgttaatatggagagagatctagcttcaggactcattggccctctcctcatctgctacaaagaatctgtagatcaaagaggaaaccagataatgtcagacaagaggaatgtcatcctgttttctgtatttgatgagaaccgaagctggtacctcacagagaatatacaacgctttctccccaatccagctggagtgcagcttgaggatccagagttccaagcctccaacatcatgcacagcatcaatggctatgtttttgatagtttgcagttgtcagtttgtttgcatgaggtggcatactggtacattctaagcattggagcacagactgacttcctttctgtcttcttctctggatataccttcaaacacaaaatggtctatgaagacacactcaccctattcccattctcaggagaaactgtcttcatgtcgatggaaaacccaggtctatggattctggggtgccacaactcagactttcggaacagaggcatgaccgccttactgaaggtttctagttgtgacaagaacactggtgattattacgaggacagttatgaagatatttcagcatacttgctgagtaaaaacaatgccattgaaccaagaagcttctctcaaaacccaccagtcttgaaacgccatcaacgggaaataactcgtactactcttcagggcgcgccaggtacacccggatcgggtacagcgtcatcgagccccggtgcgtcacctggtacgtcgagcacggggtcgccaggggcgtcccctgggacgtcctcaacaggctcgcccggtgcgtcacccggcacgtcgtccacgggttcacctggtagctccccttccgcgtccactggcaccgggcctggaactccggggagcggcacagcgagctcgtcgccgggagcatcgcctgggacatcgagcaccgggtcgccaggagcatcgcccggaacatccagcacaggaagccccggcgcgtcgcccgggacatcaagcacaggttccccgggatcgagcacgccgtccggagccactggatcaccagggagctcgacaccttccggcgcaacgggatcgcccggagccagcccgggtacgtcaagcactggctcccctgcctcgagctcagatcaagaggaaatcgattatgatgataccatatcagttgaaatgaagaaggaagattttgacatttatgatgaggatgaaaatcagagcccccgcagctttcaaaagaaaacacgacactattttattgctgcagtggagaggctctgggattatgggatgagtagctccccacatgttctaagaaacagggctcagagtggcagtgtccctcagttcaagaaagttgttttccaggaatttactgatggctcctttactcagcccttataccgtggagaactaaatgaacatttgggactcctggggccatatataagagcagaagttgaagataatatcatggtaactttcagaaatcaggcctctcgtccctattccttctattctagccttatttcttatgaggaagatcagaggcaaggagcagaacctagaaaaaactttgtcaagcctaatgaaaccaaaacttacttttggaaagtgcaacatcatatggcacccactaaagatgagtttgactgcaaagcctgggcttatttctctgatgttgacctggaaaaagatgtgcactcaggcctgattggaccccttctggtctgccacactaacacactgaaccctgctcatgggagacaagtgacagtacaggaatttgctctgtttttcaccatctttgatgagaccaaaagctggtacttcactgaaaatatggaaagaaactgcagggctccctgcaatatccagatggaagatcccacttttaaagagaattatcgcttccatgcaatcaatggctacataatggatacactacctggcttagtaatggctcaggatcaaaggattcgatggtatctgctcagcatgggcagcaatgaaaacatccattctattcatttcagtggacatgtgttcactgtacgaaaaaaagaggagtataaaatggcactgtacaatctctatccaggtgtttttgagacagtggaaatgttaccatccaaagctggaatttggcgggtggaatgccttattggcgagcatctacatgctgggatgagcacactttttctggtgtacagcaataagtgtcagactcccctgggaatggcttctggacacattagagattttcagattacagcttcaggacaatatggacagtgggccccaaagctggccagacttcattattccggatcaatcaatgcctggagcaccaaggagcccttttcttggatcaaggtggatctgttggcaccaatgattattcacggcatcaagacccagggtgcccgtcagaagttctccagcctctacatctctcagtttatcatcatgtatagtcttgatgggaagaagtggcagacttatcgaggaaattccactggaaccttaatggtcttctttggcaatgtggattcatctgggataaaacacaatatttttaaccctccaattattgctcgatacatccgtttgcacccaactcattatagcattcgcagcactcttcgcatggagttgatgggctgtgatttaaatagttgcagcatgccattgggaatggagagtaaagcaatatcagatgcacagattactgcttcatcctactttaccaatatgtttgccacctggtctccttcaaaagctcgacttcacctccaagggaggagtaatgcctggagacctcaggtgaataatccaaaagagtggctgcaagtggacttccagaagacaatgaaagtcacaggagtaactactcagggagtaaaatctctgcttaccagcatgtatgtgaaggagttcctcatctccagcagtcaagatggccatcagtggactctcttttttcagaatggcaaagtaaaggtttttcagggaaatcaagactccttcacacctgtggtgaactctctagacccaccgttactgactcgctaccttcgaattcacccccagagttgggtgcaccagattgccctgaggatggaggttctgggctgcgaggcacaggacctctacggcgccggatcacctggggccgaaacggccgaacaaaaactcatctcagaagaggatctgtcacctgcaaccggtcatcatcaccatcaccattga

SEQ ID NO: 923 - protein, 1769 aa, synthetic construct
  REGION 1..1769: note = Description of Artificial Sequence: Synthetic polypeptide
ATRRYYLGAVELSWDYMQSDLGELPVDARFPPRVPKSFPFNTSVVYKKTLFVEFTDHLFNIAKPRPPWMGLLGPTIQAEVYDTVVITLKNMASHPVSLHAVGVSYWKASEGAEYDDQTSQREKEDDKVFPGGSHTYVWQVLKENGPMASDPLCLTYSYLSHVDLVKDLNSGLIGALLVCREGSLAKEKTQTLHKFILLFAVFDEGKSWHSETKNSLMQDRDAASARAWPKMHTVNGYVNRSLPGLIGCHRKSVYWHVIGMGTTPEVHSIFLEGHTFLVRNHRQASLEISPITFLTAQTLLMDLGQFLLFCHISSHQHDGMEAYVKVDSCPEEPQLRMKNNEEAEDYDDDLTDSEMDVVRFDDDNSPSFIQIRSVAKKHPKTWVHYIAAEEEDWDYAPLVLAPDGAPGASPGTSSTGSPGSSPSASTGTGPGSSPSASTGTGPGTPGSGTASSSPGSSTPSGATGSPGSSPSASTGTGPGASPGTSSTGSPGTPGSGTASSSPGSSTPSGATGSPGTPGSGTASSSPGASPGTSSTGSPGASPGTSSTGSPASSDRSYKSQYLNNGPQRIGRKYKKVRFMAYTDETFKTREAIQHESGILGPLLYGEVGDTLLIIFKNQASRPYNIYPHGITDVRPLYSRRLPKGVKHLKDFPILPGEIFKYKWTVTVEDGPTKSDPRCLTRYYSSFVNMERDLASGLIGPLLICYKESVDQRGNQIMSDKRNVILFSVFDENRSWYLTENIQRFLPNPAGVQLEDPEFQASNIMHSINGYVFDSLQLSVCLHEVAYWYILSIGAQTDFLSVFFSGYTFKHKMVYEDTLTLFPFSGETVFMSMENPGLWILGCHNSDFRNRGMTALLKVSSCDKNTGDYYEDSYEDISAYLLSKNNAIEPRSFSQNPPVLKRHQREITRTTLQGAPGTPGSGTASSSPGASPGTSSTGSPGASPGTSSTGSPGASPGTSSTGSPGSSPSASTGTGPGTPGSGTASSSPGASPGTSSTGSPGASPGTSSTGSPGASPGTSSTGSPGSSTPSGATGSPGSSTPSGATGSPGASPGTSSTGSPASSSDQEEIDYDDTISVEMKKEDFDIYDEDENQSPRSFQKKTRHYFIAAVERLWDYGMSSSPHVLRNRAQSGSVPQFKKVVFQEFTDGSFTQPLYRGELNEHLGLLGPYIRAEVEDNIMVTFRNQASRPYSFYSSLISYEEDQRQGAEPRKNFVKPNETKTYFWKVQHHMAPTKDEFDCKAWAYFSDVDLEKDVHSGLIGPLLVCHTNTLNPAHGRQVTVQEFALFFTIFDETKSWYFTENMERNCRAPCNIQMEDPTFKENYRFHAINGYIMDTLPGLVMAQDQRIRWYLLSMGSNENIHSIHFSGHVFTVRKKEEYKMALYNLYPGVFETVEMLPSKAGIWRVECLIGEHLHAGMSTLFLVYSNKCQTPLGMASGHIRDFQITASGQYGQWAPKLARLHYSGSINAWSTKEPFSWIKVDLLAPMIIHGIKTQGARQKFSSLYISQFIIMYSLDGKKWQTYRGNSTGTLMVFFGNVDSSGIKHNIFNPPIIARYIRLHPTHYSIRSTLRMELMGCDLNSCSMPLGMESKAISDAQITASSYFTNMFATWSPSKARLHLQGRSNAWRPQVNNPKEWLQVDFQKTMKVTGVTTQGVKSLLTSMYVKEFLISSSQDGHQWTLFFQNGKVKVFQGNQDSFTPVVNSLDPPLLTRYLRIHPQSWVHQIALRMEVLGCEAQDLYGAGSPGAETAEQKLISEEDLSPATGHHHHHH

SEQ ID NO: 924 - DNA, 5310 bp, synthetic construct
  misc_feature 1..5310: note = Description of Artificial Sequence: Synthetic polynucleotide
  source 1..5310: mol_type = other DNA
gccaccagaagatactacctgggtgcagtggaactgtcatgggactatatgcaaagtgatctcggtgagctgcctgtggacgcaagatttcctcctagagtgccaaaatcttttccattcaacacctcagtcgtgtacaaaaagactctgtttgtagaattcacggatcaccttttcaacatcgctaagccaaggccaccctggatgggtctgctaggtcctaccatccaggctgaggtttatgatacagtggtcattacacttaagaacatggcttcccatcctgtcagtcttcatgctgttggtgtatcctactggaaagcttctgagggagctgaatatgatgatcagaccagtcaaagggagaaagaagatgataaagtcttccctggtggaagccatacatatgtctggcaggtcctgaaagagaatggtccaatggcctctgacccactgtgccttacctactcatatctttctcatgtggacctggtaaaagacttgaattcaggcctcattggagccctactagtatgtagagaagggagtctggccaaggaaaagacacagaccttgcacaaatttatactactttttgctgtatttgatgaagggaaaagttggcactcagaaacaaagaactccttgatgcaggatagggatgctgcatctgctcgggcctggcctaaaatgcacacagtcaatggttatgtaaacaggtctctgccaggtctgattggatgccacaggaaatcagtctattggcatgtgattggaatgggcaccactcctgaagtgcactcaatattcctcgaaggtcacacatttcttgtgaggaaccatcgccaggctagcttggaaatctcgccaataactttccttactgctcaaacactcttgatggaccttggacagtttctactgttttgtcatatctcttcccaccaacatgatggcatggaagcttatgtcaaagtagacagctgtccagaggaaccccaactacgaatgaaaaataatgaagaagcggaagactatgatgatgatcttactgattctgaaatggatgtggtcaggtttgatgatgacaactctccttcctttatccaaattcgctcagttgccaagaagcatcctaaaacttgggtacattacattgctgctgaagaggaggactgggactatgctcccttagtcctcgcccccgatggcgcgccaggtgcctcgccgggaacatcatcaactggttcacccgggtcatccccctcggcctcaaccgggacgggtcccggctcatcccccagcgccagcactggaacaggtcctggcactcctggttccggtacggcatcgtcatccccgggaagctcaacaccgtccggagcgacaggatcacctggctcgtcaccttcggcgtcaactggaacggggccaggggcctcacccggaacgtcctcgactgggtcgcctggtacgccgggatcaggaacggcctcatcctcgcctgggtcctcaacgccctcgggtgcgactggttcgccgggaactcctggctcggggacggcctcgtcgtcgcctggggcatcaccggggacgagctccacggggtcccctggagcgtcaccggggacctcctcgacaggtagcccggcctcgagcgacagaagttataaaagtcaatatttgaacaatggccctcagcggattggtaggaagtacaaaaaagtccgatttatggcatacacagatgaaacctttaagactcgtgaagctattcagcatgaatcaggaatcttgggacctttactttatggggaagttggagacacactgttgattatatttaagaatcaagcaagcagaccatataacatctaccctcacggaatcactgatgtccgtcctttgtattcaaggagattaccaaaaggtgtaaaacatttgaaggattttccaattctgccaggagaaatattcaaatataaatggacagtgactgtagaagatgggccaactaaatcagatcctcggtgcctgacccgctattactctagtttcgttaatatggagagagatctagcttcaggactcattggccctctcctcatctgctacaaagaatctgtagatcaaagaggaaaccagataatgtcagacaagaggaatgtcatcctgttttctgtatttgatgagaaccgaagctggtacctcacagagaatatacaacgctttctccccaatccagctggagtgcagcttgaggatccagagttccaagcctccaacatcatgcacagcatcaatggctatgtttttgatagtttgcagttgtcagtttgtttgcatgaggtggcatactggtacattctaagcattggagcacagactgacttcctttctgtcttcttctctggatataccttcaaacacaaaatggtctatgaagacacactcaccctattcccattctcaggagaaactgtcttcatgtcgatggaaaacccaggtctatggattctggggtgccacaactcagactttcggaacagaggcatgaccgccttactgaaggtttctagttgtgacaagaacactggtgattattacgaggacagttatgaagatatttcagcatacttgctgagtaaaaacaatgccattgaaccaagaagcttctctcaaaacccaccagtcttgaaacgccatcaacgggaaataactcgtactactcttcagggcgcgccaggtacacccggatcgggtacagcgtcatcgagccccggtgcgtcacctggtacgtcgagcacggggtcgccaggggcgtcccctgggacgtcctcaacaggctcgcccggtgcgtcacccggcacgtcgtccacgggttcacctggtagctccccttccgcgtccactggcaccgggcctggaactccggggagcggcacagcgagctcgtcgccgggagcatcgcctgggacatcgagcaccgggtcgccaggagcatcgcccggaacatccagcacaggaagccccggcgcgtcgcccgggacatcaagcacaggttccccgggatcgagcacgccgtccggagccactggatcaccagggagctcgacaccttccggcgcaacgggatcgcccggagccagcccgggtacgtcaagcactggctcccctgcctcgagctcagatcaagaggaaatcgattatgatgataccatatcagttgaaatgaagaaggaagattttgacatttatgatgaggatgaaaatcagagcccccgcagctttcaaaagaaaacacgacactattttattgctgcagtggagaggctctgggattatgggatgagtagctccccacatgttctaagaaacagggctcagagtggcagtgtccctcagttcaagaaagttgttttccaggaatttactgatggctcctttactcagcccttataccgtggagaactaaatgaacatttgggactcctggggccatatataagagcagaagttgaagataatatcatggtaactttcagaaatcaggcctctcgtccctattccttctattctagccttatttcttatgaggaagatcagaggcaaggagcagaacctagaaaaaactttgtcaagcctaatgaaaccaaaacttacttttggaaagtgcaacatcatatggcacccactaaagatgagtttgactgcaaagcctgggcttatttctctgatgttgacctggaaaaagatgtgcactcaggcctgattggaccccttctggtctgccacactaacacactgaaccctgctcatgggagacaagtgacagtacaggaatttgctctgtttttcaccatctttgatgagaccaaaagctggtacttcactgaaaatatggaaagaaactgcagggctccctgcaatatccagatggaagatcccacttttaaagagaattatcgcttccatgcaatcaatggctacataatggatacactacctggcttagtaatggctcaggatcaaaggattcgatggtatctgctcagcatgggcagcaatgaaaacatccattctattcatttcagtggacatgtgttcactgtacgaaaaaaagaggagtataaaatggcactgtacaatctctatccaggtgtttttgagacagtggaaatgttaccatccaaagctggaatttggcgggtggaatgccttattggcgagcatctacatgctgggatgagcacactttttctggtgtacagcaataagtgtcagactcccctgggaatggcttctggacacattagagattttcagattacagcttcaggacaatatggacagtgggccccaaagctggccagacttcattattccggatcaatcaatgcctggagcaccaaggagcccttttcttggatcaaggtggatctgttggcaccaatgattattcacggcatcaagacccagggtgcccgtcagaagttctccagcctctacatctctcagtttatcatcatgtatagtcttgatgggaagaagtggcagacttatcgaggaaattccactggaaccttaatggtcttctttggcaatgtggattcatctgggataaaacacaatatttttaaccctccaattattgctcgatacatccgtttgcacccaactcattatagcattcgcagcactcttcgcatggagttgatgggctgtgatttaaatagttgcagcatgccattgggaatggagagtaaagcaatatcagatgcacagattactgcttcatcctactttaccaatatgtttgccacctggtctccttcaaaagctcgacttcacctccaagggaggagtaatgcctggagacctcaggtgaataatccaaaagagtggctgcaagtggacttccagaagacaatgaaagtcacaggagtaactactcagggagtaaaatctctgcttaccagcatgtatgtgaaggagttcctcatctccagcagtcaagatggccatcagtggactctcttttttcagaatggcaaagtaaaggtttttcagggaaatcaagactccttcacacctgtggtgaactctctagacccaccgttactgactcgctaccttcgaattcacccccagagttgggtgcaccagattgccctgaggatggaggttctgggctgcgaggcacaggacctctacggcgccggatcacctggggccgaaacggccgaacaaaaactcatctcagaagaggatctgtcacctgcaaccggtcatcatcaccatcaccattga

SEQ ID NO: 925 - protein, 1769 aa, synthetic construct
  REGION 1..1769: note = Description of Artificial Sequence: Synthetic polypeptide
ATRRYYLGAVELSWDYMQSDLGELPVDARFPPRVPKSFPFNTSVVYKKTLFVEFTDHLFNIAKPRPPWMGLLGPTIQAEVYDTVVITLKNMASHPVSLHAVGVSYWKASEGAEYDDQTSQREKEDDKVFPGGSHTYVWQVLKENGPMASDPLCLTYSYLSHVDLVKDLNSGLIGALLVCREGSLAKEKTQTLHKFILLFAVFDEGKSWHSETKNSLMQDRDAASARAWPKMHTVNGYVNRSLPGLIGCHRKSVYWHVIGMGTTPEVHSIFLEGHTFLVRNHRQASLEISPITFLTAQTLLMDLGQFLLFCHISSHQHDGMEAYVKVDSCPEEPQLRMKNNEEAEDYDDDLTDSEMDVVRFDDDNSPSFIQIRSVAKKHPKTWVHYIAAEEEDWDYAPLVLAPDGAPTSTEPSEGSAPGSPAGSPTSTEEGTSTEPSEGSAPGTSTEPSEGSAPGTSESATPESGPGTSTEPSEGSAPGTSESATPESGPGSEPATSGSETPGTSTEPSEGSAPGTSTEPSEGSAPGTSESATPESGPGTSESATPESGPGASSDRSYKSQYLNNGPQRIGRKYKKVRFMAYTDETFKTREAIQHESGILGPLLYGEVGDTLLIIFKNQASRPYNIYPHGITDVRPLYSRRLPKGVKHLKDFPILPGEIFKYKWTVTVEDGPTKSDPRCLTRYYSSFVNMERDLASGLIGPLLICYKESVDQRGNQIMSDKRNVILFSVFDENRSWYLTENIQRFLPNPAGVQLEDPEFQASNIMHSINGYVFDSLQLSVCLHEVAYWYILSIGAQTDFLSVFFSGYTFKHKMVYEDTLTLFPFSGETVFMSMENPGLWILGCHNSDFRNRGMTALLKVSSCDKNTGDYYEDSYEDISAYLLSKNNAIEPRSFSQNPPVLKRHQREITRTTLQGAPGTPGSGTASSSPGASPGTSSTGSPGASPGTSSTGSPGASPGTSSTGSPGSSPSASTGTGPGTPGSGTASSSPGASPGTSSTGSPGASPGTSSTGSPGASPGTSSTGSPGSSTPSGATGSPGSSTPSGATGSPGASPGTSSTGSPASSSDQEEIDYDDTISVEMKKEDFDIYDEDENQSPRSFQKKTRHYFIAAVERLWDYGMSSSPHVLRNRAQSGSVPQFKKVVFQEFTDGSFTQPLYRGELNEHLGLLGPYIRAEVEDNIMVTFRNQASRPYSFYSSLISYEEDQRQGAEPRKNFVKPNETKTYFWKVQHHMAPTKDEFDCKAWAYFSDVDLEKDVHSGLIGPLLVCHTNTLNPAHGRQVTVQEFALFFTIFDETKSWYFTENMERNCRAPCNIQMEDPTFKENYRFHAINGYIMDTLPGLVMAQDQRIRWYLLSMGSNENIHSIHFSGHVFTVRKKEEYKMALYNLYPGVFETVEMLPSKAGIWRVECLIGEHLHAGMSTLFLVYSNKCQTPLGMASGHIRDFQITASGQYGQWAPKLARLHYSGSINAWSTKEPFSWIKVDLLAPMIIHGIKTQGARQKFSSLYISQFIIMYSLDGKKWQTYRGNSTGTLMVFFGNVDSSGIKHNIFNPPIIARYIRLHPTHYSIRSTLRMELMGCDLNSCSMPLGMESKAISDAQITASSYFTNMFATWSPSKARLHLQGRSNAWRPQVNNPKEWLQVDFQKTMKVTGVTTQGVKSLLTSMYVKEFLISSSQDGHQWTLFFQNGKVKVFQGNQDSFTPVVNSLDPPLLTRYLRIHPQSWVHQIALRMEVLGCEAQDLYGAGSPGAETAEQKLISEEDLSPATGHHHHHH

SEQ ID NO: 926 - DNA, 5310 bp, synthetic construct
  misc_feature 1..5310: note = Description of Artificial Sequence: Synthetic polynucleotide
  source 1..5310: mol_type = other DNA
gccaccagaagatactacctgggtgcagtggaactgtcatgggactatatgcaaagtgatctcggtgagctgcctgtggacgcaagatttcctcctagagtgccaaaatcttttccattcaacacctcagtcgtgtacaaaaagactctgtttgtagaattcacggatcaccttttcaacatcgctaagccaaggccaccctggatgggtctgctaggtcctaccatccaggctgaggtttatgatacagtggtcattacacttaagaacatggcttcccatcctgtcagtcttcatgctgttggtgtatcctactggaaagcttctgagggagctgaatatgatgatcagaccagtcaaagggagaaagaagatgataaagtcttccctggtggaagccatacatatgtctggcaggtcctgaaagagaatggtccaatggcctctgacccactgtgccttacctactcatatctttctcatgtggacctggtaaaagacttgaattcaggcctcattggagccctactagtatgtagagaagggagtctggccaaggaaaagacacagaccttgcacaaatttatactactttttgctgtatttgatgaagggaaaagttggcactcagaaacaaagaactccttgatgcaggatagggatgctgcatctgctcgggcctggcctaaaatgcacacagtcaatggttatgtaaacaggtctctgccaggtctgattggatgccacaggaaatcagtctattggcatgtgattggaatgggcaccactcctgaagtgcactcaatattcctcgaaggtcacacatttcttgtgaggaaccatcgccaggctagcttggaaatctcgccaataactttccttactgctcaaacactcttgatggaccttggacagtttctactgttttgtcatatctcttcccaccaacatgatggcatggaagcttatgtcaaagtagacagctgtccagaggaaccccaactacgaatgaaaaataatgaagaagcggaagactatgatgatgatcttactgattctgaaatggatgtggtcaggtttgatgatgacaactctccttcctttatccaaattcgctcagttgccaagaagcatcctaaaacttgggtacattacattgctgctgaagaggaggactgggactatgctcccttagtcctcgcccccgatggcgcgccaaccagtacggagccgtccgaggggagcgcaccaggaagcccggctgggagcccgacttctaccgaagagggtacatctaccgaaccaagtgaaggttcagcaccaggcacctcaacagaaccctctgagggctcggcgcctggtacaagtgagtccgccaccccagaatccgggcctgggacaagcacagaaccttcggaagggagtgcccctggaacatccgaatcggcaaccccagaatcagggccaggatctgagcccgcgacttcgggctccgagacgcctgggacatccaccgagccctccgaaggatcagccccaggcaccagcacggagccctctgagggaagcgcacctggtaccagcgaaagcgcaactcccgaatcaggtcccggtacgagcgagtcggcgaccccggagagcgggccaggtgcctcgagcgacagaagttataaaagtcaatatttgaacaatggccctcagcggattggtaggaagtacaaaaaagtccgatttatggcatacacagatgaaacctttaagactcgtgaagctattcagcatgaatcaggaatcttgggacctttactttatggggaagttggagacacactgttgattatatttaagaatcaagcaagcagaccatataacatctaccctcacggaatcactgatgtccgtcctttgtattcaaggagattaccaaaaggtgtaaaacatttgaaggattttccaattctgccaggagaaatattcaaatataaatggacagtgactgtagaagatgggccaactaaatcagatcctcggtgcctgacccgctattactctagtttcgttaatatggagagagatctagcttcaggactcattggccctctcctcatctgctacaaagaatctgtagatcaaagaggaaaccagataatgtcagacaagaggaatgtcatcctgttttctgtatttgatgagaaccgaagctggtacctcacagagaatatacaacgctttctccccaatccagctggagtgcagcttgaggatccagagttccaagcctccaacatcatgcacagcatcaatggctatgtttttgatagtttgcagttgtcagtttgtttgcatgaggtggcatactggtacattctaagcattggagcacagactgacttcctttctgtcttcttctctggatataccttcaaacacaaaatggtctatgaagacacactcaccctattcccattctcaggagaaactgtcttcatgtcgatggaaaacccaggtctatggattctggggtgccacaactcagactttcggaacagaggcatgaccgccttactgaaggtttctagttgtgacaagaacactggtgattattacgaggacagttatgaagatatttcagcatacttgctgagtaaaaacaatgccattgaaccaagaagcttctctcaaaacccaccagtcttgaaacgccatcaacgggaaataactcgtactactcttcagggcgcgccaggtacacccggatcgggtacagcgtcatcgagccccggtgcgtcacctggtacgtcgagcacggggtcgccaggggcgtcccctgggacgtcctcaacaggctcgcccggtgcgtcacccggcacgtcgtccacgggttcacctggtagctccccttccgcgtccactggcaccgggcctggaactccggggagcggcacagcgagctcgtcgccgggagcatcgcctgggacatcgagcaccgggtcgccaggagcatcgcccggaacatccagcacaggaagccccggcgcgtcgcccgggacatcaagcacaggttccccgggatcgagcacgccgtccggagccactggatcaccagggagctcgacaccttccggcgcaacgggatcgcccggagccagcccgggtacgtcaagcactggctcccctgcctcgagctcagatcaagaggaaatcgattatgatgataccatatcagttgaaatgaagaaggaagattttgacatttatgatgaggatgaaaatcagagcccccgcagctttcaaaagaaaacacgacactattttattgctgcagtggagaggctctgggattatgggatgagtagctccccacatgttctaagaaacagggctcagagtggcagtgtccctcagttcaagaaagttgttttccaggaatttactgatggctcctttactcagcccttataccgtggagaactaaatgaacatttgggactcctggggccatatataagagcagaagttgaagataatatcatggtaactttcagaaatcaggcctctcgtccctattccttctattctagccttatttcttatgaggaagatcagaggcaaggagcagaacctagaaaaaactttgtcaagcctaatgaaaccaaaacttacttttggaaagtgcaacatcatatggcacccactaaagatgagtttgactgcaaagcctgggcttatttctctgatgttgacctggaaaaagatgtgcactcaggcctgattggaccccttctggtctgccacactaacacactgaaccctgctcatgggagacaagtgacagtacaggaatttgctctgtttttcaccatctttgatgagaccaaaagctggtacttcactgaaaatatggaaagaaactgcagggctccctgcaatatccagatggaagatcccacttttaaagagaattatcgcttccatgcaatcaatggctacataatggatacactacctggcttagtaatggctcaggatcaaaggattcgatggtatctgctcagcatgggcagcaatgaaaacatccattctattcatttcagtggacatgtgttcactgtacgaaaaaaagaggagtataaaatggcactgtacaatctctatccaggtgtttttgagacagtggaaatgttaccatccaaagctggaatttggcgggtggaatgccttattggcgagcatctacatgctgggatgagcacactttttctggtgtacagcaataagtgtcagactcccctgggaatggcttctggacacattagagattttcagattacagcttcaggacaatatggacagtgggccccaaagctggccagacttcattattccggatcaatcaatgcctggagcaccaaggagcccttttcttggatcaaggtggatctgttggcaccaatgattattcacggcatcaagacccagggtgcccgtcagaagttctccagcctctacatctctcagtttatcatcatgtatagtcttgatgggaagaagtggcagacttatcgaggaaattccactggaaccttaatggtcttctttggcaatgtggattcatctgggataaaacacaatatttttaaccctccaattattgctcgatacatccgtttgcacccaactcattatagcattcgcagcactcttcgcatggagttgatgggctgtgatttaaatagttgcagcatgccattgggaatggagagtaaagcaatatcagatgcacagattactgcttcatcctactttaccaatatgtttgccacctggtctccttcaaaagctcgacttcacctccaagggaggagtaatgcctggagacctcaggtgaataatccaaaagagtggctgcaagtggacttccagaagacaatgaaagtcacaggagtaactactcagggagtaaaatctctgcttaccagcatgtatgtgaaggagttcctcatctccagcagtcaagatggccatcagtggactctcttttttcagaatggcaaagtaaaggtttttcagggaaatcaagactccttcacacctgtggtgaactctctagacccaccgttactgactcgctaccttcgaattcacccccagagttgggtgcaccagattgccctgaggatggaggttctgggctgcgaggcacaggacctctacggcgccggatcacctggggccgaaacggccgaacaaaaactcatctcagaagaggatctgtcacctgcaaccggtcatcatcaccatcaccattga

SEQ ID NO: 927 - protein, 1769 aa, synthetic construct
  REGION 1..1769: note = Description of Artificial Sequence: Synthetic polypeptide
ATRRYYLGAVELSWDYMQSDLGELPVDARFPPRVPKSFPFNTSVVYKKTLFVEFTDHLFNIAKPRPPWMGLLGPTIQAEVYDTVVITLKNMASHPVSLHAVGVSYWKASEGAEYDDQTSQREKEDDKVFPGGSHTYVWQVLKENGPMASDPLCLTYSYLSHVDLVKDLNSGLIGALLVCREGSLAKEKTQTLHKFILLFAVFDEGKSWHSETKNSLMQDRDAASARAWPKMHTVNGYVNRSLPGLIGCHRKSVYWHVIGMGTTPEVHSIFLEGHTFLVRNHRQASLEISPITFLTAQTLLMDLGQFLLFCHISSHQHDGMEAYVKVDSCPEEPQLRMKNNEEAEDYDDDLTDSEMDVVRFDDDNSPSFIQIRSVAKKHPKTWVHYIAAEEEDWDYAPLVLAPDDRSYKSQYLNNGPQRIGRKYKKVRFMAYTDETFKTREAIQHESGILGPLLYGEVGDTLLIIFKNQASRPYNIYPHGITDVRPLYSRRLPKGVKHLKDFPILPGEIFKYKWTVTVEDGPTKSDPRCLTRYYSSFVNMERDLASGLIGPLLICYKESVDQRGNQIMSDKRNVILFSVFDENRSWYLTENIQRFLPNPAGVQLEDPEFQASNIMHSINGYVFDSLQLSVCLHEVAYWYILSIGAQTDFLSVFFSGYTFKHKMVYEDTLTLFPFSGETVFMSMENPGLWILGCHNSDFRNRGMTALLKVSSCDKNTGDYYEDSYEDISAYLLSKNNAIEPRSFSQNPPVLKRHQREITRTTLQGAPGTPGSGTASSSPGASPGTSSTGSPGASPGTSSTGSPGASPGTSSTGSPGSSPSASTGTGPGTPGSGTASSSPGASPGTSSTGSPGASPGTSSTGSPGASPGTSSTGSPGSSTPSGATGSPGSSTPSGATGSPGASPGTSSTGSPASSSDQEEIDYDDTISVEMKKEDFDIYDEDENQSPRSFQKKTRHYFIAAVERLWDYGMSSSPHVLRNRAQSGGAPTSESATPESGPGSEPATSGSETPGTSESATPESGPGSEPATSGSETPGTSESATPESGPGTSTEPSEGSAPGTSESATPESGPGSPAGSPTSTEEGSPAGSPTSTEEGSPAGSPTSTEEGTSESATPESGPGTSTEPSEGSAPGASSSVPQFKKVVFQEFTDGSFTQPLYRGELNEHLGLLGPYIRAEVEDNIMVTFRNQASRPYSFYSSLISYEEDQRQGAEPRKNFVKPNETKTYFWKVQHHMAPTKDEFDCKAWAYFSDVDLEKDVHSGLIGPLLVCHTNTLNPAHGRQVTVQEFALFFTIFDETKSWYFTENMERNCRAPCNIQMEDPTFKENYRFHAINGYIMDTLPGLVMAQDQRIRWYLLSMGSNENIHSIHFSGHVFTVRKKEEYKMALYNLYPGVFETVEMLPSKAGIWRVECLIGEHLHAGMSTLFLVYSNKCQTPLGMASGHIRDFQITASGQYGQWAPKLARLHYSGSINAWSTKEPFSWIKVDLLAPMIIHGIKTQGARQKFSSLYISQFIIMYSLDGKKWQTYRGNSTGTLMVFFGNVDSSGIKHNIFNPPIIARYIRLHPTHYSIRSTLRMELMGCDLNSCSMPLGMESKAISDAQITASSYFTNMFATWSPSKARLHLQGRSNAWRPQVNNPKEWLQVDFQKTMKVTGVTTQGVKSLLTSMYVKEFLISSSQDGHQWTLFFQNGKVKVFQGNQDSFTPVVNSLDPPLLTRYLRIHPQSWVHQIALRMEVLGCEAQDLYGAGSPGAETAEQKLISEEDLSPATGHHHHHH

SEQ ID NO: 928 - DNA, 5310 bp, synthetic construct
  misc_feature 1..5310: note = Description of Artificial Sequence: Synthetic polynucleotide
  source 1..5310: mol_type = other DNA
gccaccagaagatactacctgggtgcagtggaactgtcatgggactatatgcaaagtgatctcggtgagctgcctgtggacgcaagatttcctcctagagtgccaaaatcttttccattcaacacctcagtcgtgtacaaaaagactctgtttgtagaattcacggatcaccttttcaacatcgctaagccaaggccaccctggatgggtctgctaggtcctaccatccaggctgaggtttatgatacagtggtcattacacttaagaacatggcttcccatcctgtcagtcttcatgctgttggtgtatcctactggaaagcttctgagggagctgaatatgatgatcagaccagtcaaagggagaaagaagatgataaagtcttccctggtggaagccatacatatgtctggcaggtcctgaaagagaatggtccaatggcctctgacccactgtgccttacctactcatatctttctcatgtggacctggtaaaagacttgaattcaggcctcattggagccctactagtatgtagagaagggagtctggccaaggaaaagacacagaccttgcacaaatttatactactttttgctgtatttgatgaagggaaaagttggcactcagaaacaaagaactccttgatgcaggatagggatgctgcatctgctcgggcctggcctaaaatgcacacagtcaatggttatgtaaacaggtctctgccaggtctgattggatgccacaggaaatcagtctattggcatgtgattggaatgggcaccactcctgaagtgcactcaatattcctcgaaggtcacacatttcttgtgaggaaccatcgccaggctagcttggaaatctcgccaataactttccttactgctcaaacactcttgatggaccttggacagtttctactgttttgtcatatctcttcccaccaacatgatggcatggaagcttatgtcaaagtagacagctgtccagaggaaccccaactacgaatgaaaaataatgaagaagcggaagactatgatgatgatcttactgattctgaaatggatgtggtcaggtttgatgatgacaactctccttcctttatccaaattcgctcagttgccaagaagcatcctaaaacttgggtacattacattgctgctgaagaggaggactgggactatgctcccttagtcctcgcccccgatgacagaagttataaaagtcaatatttgaacaatggccctcagcggattggtaggaagtacaaaaaagtccgatttatggcatacacagatgaaacctttaagactcgtgaagctattcagcatgaatcaggaatcttgggacctttactttatggggaagttggagacacactgttgattatatttaagaatcaagcaagcagaccatataacatctaccctcacggaatcactgatgtccgtcctttgtattcaaggagattaccaaaaggtgtaaaacatttgaaggattttccaattctgccaggagaaatattcaaatataaatggacagtgactgtagaagatgggccaactaaatcagatcctcggtgcctgacccgctattactctagtttcgttaatatggagagagatctagcttcaggactcattggccctctcctcatctgctacaaagaatctgtagatcaaagaggaaaccagataatgtcagacaagaggaatgtcatcctgttttctgtatttgatgagaaccgaagctggtacctcacagagaatatacaacgctttctccccaatccagctggagtgcagcttgaggatccagagttccaagcctccaacatcatgcacagcatcaatggctatgtttttgatagtttgcagttgtcagtttgtttgcatgaggtggcatactggtacattctaagcattggagcacagactgacttcctttctgtcttcttctctggatataccttcaaacacaaaatggtctatgaagacacactcaccctattcccattctcaggagaaactgtcttcatgtcgatggaaaacccaggtctatggattctggggtgccacaactcagactttcggaacagaggcatgaccgccttactgaaggtttctagttgtgacaagaacactggtgattattacgaggacagttatgaagatatttcagcatacttgctgagtaaaaacaatgccattgaaccaagaagcttctctcaaaacccaccagtcttgaaacgccatcaacgggaaataactcgtactactcttcagggcgcgccaggtacacccggatcgggtacagcgtcatcgagccccggtgcgtcacctggtacgtcgagcacggggtcgccaggggcgtcccctgggacgtcctcaacaggctcgcccggtgcgtcacccggcacgtcgtccacgggttcacctggtagctccccttccgcgtccactggcaccgggcctggaactccggggagcggcacagcgagctcgtcgccgggagcatcgcctgggacatcgagcaccgggtcgccaggagcatcgcccggaacatccagcacaggaagccccggcgcgtcgcccgggacatcaagcacaggttccccgggatcgagcacgccgtccggagccactggatcaccagggagctcgacaccttccggcgcaacgggatcgcccggagccagcccgggtacgtcaagcactggctcccctgcctcgagctcagatcaagaggaaatcgattatgatgataccatatcagttgaaatgaagaaggaagattttgacatttatgatgaggatgaaaatcagagcccccgcagctttcaaaagaaaacacgacactattttattgctgcagtggagaggctctgggattatgggatgagtagctccccacatgttctaagaaacagggctcagagtggcggcgcgccaacgtccgaaagtgctacccctgagtcaggccctggtagtgagcctgccacaagcggaagcgaaactccggggacctcagagtctgccactcccgaatcggggccaggctctgaaccggccacttcagggagcgaaacaccaggaacatcggagagcgctaccccggagagcgggccaggaactagtactgagcctagcgagggaagtgcacctggtacaagcgagtccgccacacccgagtctggccctggctctccagcgggctcacccacgagcactgaagagggctctcccgctggcagcccaacgtcgacagaagaaggatcaccagcaggctcccccacatcaacagaggagggtacatcagaatctgctactcccgagagtggacccggtacctccactgagcccagcgaggggagtgcaccaggtgcctcgagcagtgtccctcagttcaagaaagttgttttccaggaatttactgatggctcctttactcagcccttataccgtggagaactaaatgaacatttgggactcctggggccatatataagagcagaagttgaagataatatcatggtaactttcagaaatcaggcctctcgtccctattccttctattctagccttatttcttatgaggaagatcagaggcaaggagcagaacctagaaaaaactttgtcaagcctaatgaaaccaaaacttacttttggaaagtgcaacatcatatggcacccactaaagatgagtttgactgcaaagcctgggcttatttctctgatgttgacctggaaaaagatgtgcactcaggcctgattggaccccttctggtctgccacactaacacactgaaccctgctcatgggagacaagtgacagtacaggaatttgctctgtttttcaccatctttgatgagaccaaaagctggtacttcactgaaaatatggaaagaaactgcagggctccctgcaatatccagatggaagatcccacttttaaagagaattatcgcttccatgcaatcaatggctacataatggatacactacctggcttagtaatggctcaggatcaaaggattcgatggtatctgctcagcatgggcagcaatgaaaacatccattctattcatttcagtggacatgtgttcactgtacgaaaaaaagaggagtataaaatggcactgtacaatctctatccaggtgtttttgagacagtggaaatgttaccatccaaagctggaatttggcgggtggaatgccttattggcgagcatctacatgctgggatgagcacactttttctggtgtacagcaataagtgtcagactcccctgggaatggcttctggacacattagagattttcagattacagcttcaggacaatatggacagtgggccccaaagctggccagacttcattattccggatcaatcaatgcctggagcaccaaggagcccttttcttggatcaaggtggatctgttggcaccaatgattattcacggcatcaagacccagggtgcccgtcagaagttctccagcctctacatctctcagtttatcatcatgtatagtcttgatgggaagaagtggcagacttatcgaggaaattccactggaaccttaatggtcttctttggcaatgtggattcatctgggataaaacacaatatttttaaccctccaattattgctcgatacatccgtttgcacccaactcattatagcattcgcagcactcttcgcatggagttgatgggctgtgatttaaatagttgcagcatgccattgggaatggagagtaaagcaatatcagatgcacagattactgcttcatcctactttaccaatatgtttgccacctggtctccttcaaaagctcgacttcacctccaagggaggagtaatgcctggagacctcaggtgaataatccaaaagagtggctgcaagtggacttccagaagacaatgaaagtcacaggagtaactactcagggagtaaaatctctgcttaccagcatgtatgtgaaggagttcctcatctccagcagtcaagatggccatcagtggactctcttttttcagaatggcaaagtaaaggtttttcagggaaatcaagactccttcacacctgtggtgaactctctagacccaccgttactgactcgctaccttcgaattcacccccagagttgggtgcaccagattgccctgaggatggaggttctgggctgcgaggcacaggacctctacggcgccggatcacctggggccgaaacggccgaacaaaaactcatctcagaagaggatctgtcacctgcaaccggtcatcatcaccatcaccattga

SEQ ID NO: 929 - protein, 1772 aa, synthetic construct
  REGION 1..1772: note = Description of Artificial Sequence: Synthetic polypeptide
ATRRYYLGAVELSWDYMQSDLGELPVDARFPPRVPKSFPFNTSVVYKKTLFVEFTDHLFNIAKPRPPWMGLLGPTIQAEVYDTVVITLKNMASHPVSLHAVGVSYWKASEGAEYDDQTSQREKEDDKVFPGGSHTYVWQVLKENGPMASDPLCLTYSYLSHVDLVKDLNSGLIGALLVCREGSLAKEKTQTLHKFILLFAVFDEGKSWHSETKNSLMQDRDAASARAWPKMHTVNGYVNRSLPGLIGCHRKSVYWHVIGMGTTPEVHSIFLEGHTFLVRNHRQASLEISPITFLTAQTLLMDLGQFLLFCHISSHQHDGMEAYVKVDSCPEEPQLRMKNNEEAEDYDDDLTDSEMDVVRFDDDNSPSFIQIRSVAKKHPKTWVHYIAAEEEDWDYAPLVLAPDDRSYKSQYLNNGPQRIGRKYKKVRFMAYTDETFKTREAIQHESGILGPLLYGEVGDTLLIIFKNQASRPYNIYPHGITDVRPLYSRRLPKGVKHLKDFPILPGEIFKYKWTVTVEDGPTKSDPRCLTRYYSSFVNMERDLASGLIGPLLICYKESVDQRGNQIMSDKRNVILFSVFDENRSWYLTENIQRFLPNPAGVQLEDPEFQASNIMHSINGYVFDSLQLSVCLHEVAYWYILSIGAQTDFLSVFFSGYTFKHKMVYEDTLTLFPFSGETVFMSMENPGLWILGCHNSDFRNRGMTALLKVSSCDKNTGDYYEDSYEDISAYLLSKNNAIEPRSFSQNPPVLKRHQREITRTTLQGAPGTPGSGTASSSPGASPGTSSTGSPGASPGTSSTGSPGASPGTSSTGSPGSSPSASTGTGPGTPGSGTASSSPGASPGTSSTGSPGASPGTSSTGSPGASPGTSSTGSPGSSTPSGATGSPGSSTPSGATGSPGASPGTSSTGSPASSSDQEEIDYDDTISVEMKKEDFDIYDEDENQSPRSFQKKTRHYFIAAVERLWDYGMSSSPHVLRNRAQGAPGTPGSGTASSSPGASPGTSSTGSPGASPGTSSTGSPGASPGTSSTGSPGSSPSASTGTGPGTPGSGTASSSPGASPGTSSTGSPGASPGTSSTGSPGASPGTSSTGSPGSSTPSGATGSPGSSTPSGATGSPGASPGTSSTGSPASSRAQSGSVPQFKKVVFQEFTDGSFTQPLYRGELNEHLGLLGPYIRAEVEDNIMVTFRNQASRPYSFYSSLISYEEDQRQGAEPRKNFVKPNETKTYFWKVQHHMAPTKDEFDCKAWAYFSDVDLEKDVHSGLIGPLLVCHTNTLNPAHGRQVTVQEFALFFTIFDETKSWYFTENMERNCRAPCNIQMEDPTFKENYRFHAINGYIMDTLPGLVMAQDQRIRWYLLSMGSNENIHSIHFSGHVFTVRKKEEYKMALYNLYPGVFETVEMLPSKAGIWRVECLIGEHLHAGMSTLFLVYSNKCQTPLGMASGHIRDFQITASGQYGQWAPKLARLHYSGSINAWSTKEPFSWIKVDLLAPMIIHGIKTQGARQKFSSLYISQFIIMYSLDGKKWQTYRGNSTGTLMVFFGNVDSSGIKHNIFNPPIIARYIRLHPTHYSIRSTLRMELMGCDLNSCSMPLGMESKAISDAQITASSYFTNMFATWSPSKARLHLQGRSNAWRPQVNNPKEWLQVDFQKTMKVTGVTTQGVKSLLTSMYVKEFLISSSQDGHQWTLFFQNGKVKVFQGNQDSFTPVVNSLDPPLLTRYLRIHPQSWVHQIALRMEVLGCEAQDLYGAGSPGAETAEQKLISEEDLSPATGHHHHHH

SEQ ID NO: 930 - DNA, 5319 bp, synthetic construct
  misc_feature 1..5319: note = Description of Artificial Sequence: Synthetic polynucleotide
  source 1..5319: mol_type = other DNA
gccaccagaagatactacctgggtgcagtggaactgtcatgggactatatgcaaagtgatctcggtgagctgcctgtggacgcaagatttcctcctagagtgccaaaatcttttccattcaacacctcagtcgtgtacaaaaagactctgtttgtagaattcacggatcaccttttcaacatcgctaagccaaggccaccctggatgggtctgctaggtcctaccatccaggctgaggtttatgatacagtggtcattacacttaagaacatggcttcccatcctgtcagtcttcatgctgttggtgtatcctactggaaagcttctgagggagctgaatatgatgatcagaccagtcaaagggagaaagaagatgataaagtcttccctggtggaagccatacatatgtctggcaggtcctgaaagagaatggtccaatggcctctgacccactgtgccttacctactcatatctttctcatgtggacctggtaaaagacttgaattcaggcctcattggagccctactagtatgtagagaagggagtctggccaaggaaaagacacagaccttgcacaaatttatactactttttgctgtatttgatgaagggaaaagttggcactcagaaacaaagaactccttgatgcaggatagggatgctgcatctgctcgggcctggcctaaaatgcacacagtcaatggttatgtaaacaggtctctgccaggtctgattggatgccacaggaaatcagtctattggcatgtgattggaatgggcaccactcctgaagtgcactcaatattcctcgaaggtcacacatttcttgtgaggaaccatcgccaggctagcttggaaatctcgccaataactttccttactgctcaaacactcttgatggaccttggacagtttctactgttttgtcatatctcttcccaccaacatgatggcatggaagcttatgtcaaagtagacagctgtccagaggaaccccaactacgaatgaaaaataatgaagaagcggaagactatgatgatgatcttactgattctgaaatggatgtggtcaggtttgatgatgacaactctccttcctttatccaaattcgctcagttgccaagaagcatcctaaaacttgggtacattacattgctgctgaagaggaggactgggactatgctcccttagtcctcgcccccgatgacagaagttataaaagtcaatatttgaacaatggccctcagcggattggtaggaagtacaaaaaagtccgatttatggcatacacagatgaaacctttaagactcgtgaagctattcagcatgaatcaggaatcttgggacctttactttatggggaagttggagacacactgttgattatatttaagaatcaagcaagcagaccatataacatctaccctcacggaatcactgatgtccgtcctttgtattcaaggagattaccaaaaggtgtaaaacatttgaaggattttccaattctgccaggagaaatattcaaatataaatggacagtgactgtagaagatgggccaactaaatcagatcctcggtgcctgacccgctattactctagtttcgttaatatggagagagatctagcttcaggactcattggccctctcctcatctgctacaaagaatctgtagatcaaagaggaaaccagataatgtcagacaagaggaatgtcatcctgttttctgtatttgatgagaaccgaagctggtacctcacagagaatatacaacgctttctccccaatccagctggagtgcagcttgaggatccagagttccaagcctccaacatcatgcacagcatcaatggctatgtttttgatagtttgcagttgtcagtttgtttgcatgaggtggcatactggtacattctaagcattggagcacagactgacttcctttctgtcttcttctctggatataccttcaaacacaaaatggtctatgaagacacactcaccctattcccattctcaggagaaactgtcttcatgtcgatggaaaacccaggtctatggattctggggtgccacaactcagactttcggaacagaggcatgaccgccttactgaaggtttctagttgtgacaagaacactggtgattattacgaggacagttatgaagatatttcagcatacttgctgagtaaaaacaatgccattgaaccaagaagcttctctcaaaacccaccagtcttgaaacgccatcaacgggaaataactcgtactactcttcagggcgcgccaggtacacccggatcgggtacagcgtcatcgagccccggtgcgtcacctggtacgtcgagcacggggtcgccaggggcgtcccctgggacgtcctcaacaggctcgcccggtgcgtcacccggcacgtcgtccacgggttcacctggtagctccccttccgcgtccactggcaccgggcctggaactccggggagcggcacagcgagctcgtcgccgggagcatcgcctgggacatcgagcaccgggtcgccaggagcatcgcccggaacatccagcacaggaagccccggcgcgtcgcccgggacatcaagcacaggttccccgggatcgagcacgccgtccggagccactggatcaccagggagctcgacaccttccggcgcaacgggatcgcccggagccagcccgggtacgtcaagcactggctcccctgcctcgagctcagatcaagaggaaatcgattatgatgataccatatcagttgaaatgaagaaggaagattttgacatttatgatgaggatgaaaatcagagcccccgcagctttcaaaagaaaacacgacactattttattgctgcagtggagaggctctgggattatgggatgagtagctccccacatgttctaagaaacagggctcagggcgcgccaggtacacccggatcgggtacagcgtcatcgagccccggtgcgtcacctggtacgtcgagcacggggtcgccaggggcgtcccctgggacgtcctcaacaggctcgcccggtgcgtcacccggcacgtcgtccacgggttcacctggtagctccccttccgcgtccactggcaccgggcctggaactccggggagcggcacagcgagctcgtcgccgggagcatcgcctgggacatcgagcaccgggtcgccaggagcatcgcccggaacatccagcacaggaagccccggcgcgtcgcccgggacatcaagcacaggttccccgggatcgagcacgccgtccggagccactggatcaccagggagctcgacaccttccggcgcaacgggatcgcccggagccagcccgggtacgtcaagcactggctcccctgcctcgagcagggctcagagtggcagtgtccctcagttcaagaaagttgttttccaggaatttactgatggctcctttactcagcccttataccgtggagaactaaatgaacatttgggactcctggggccatatataagagcagaagttgaagataatatcatggtaactttcagaaatcaggcctctcgtccctattccttctattctagccttatttcttatgaggaagatcagaggcaaggagcagaacctagaaaaaactttgtcaagcctaatgaaaccaaaacttacttttggaaagtgcaacatcatatggcacccactaaagatgagtttgactgcaaagcctgggcttatttctctgatgttgacctggaaaaagatgtgcactcaggcctgattggaccccttctggtctgccacactaacacactgaaccctgctcatgggagacaagtgacagtacaggaatttgctctgtttttcaccatctttgatgagaccaaaagctggtacttcactgaaaatatggaaagaaactgcagggctccctgcaatatccagatggaagatcccacttttaaagagaattatcgcttccatgcaatcaatggctacataatggatacactacctggcttagtaatggctcaggatcaaaggattcgatggtatctgctcagcatgggcagcaatgaaaacatccattctattcatttcagtggacatgtgttcactgtacgaaaaaaagaggagtataaaatggcactgtacaatctctatccaggtgtttttgagacagtggaaatgttaccatccaaagctggaatttggcgggtggaatgccttattggcgagcatctacatgctgggatgagcacactttttctggtgtacagcaataagtgtcagactcccctgggaatggcttctggacacattagagattttcagattacagcttcaggacaatatggacagtgggccccaaagctggccagacttcattattccggatcaatcaatgcctggagcaccaaggagcccttttcttggatcaaggtggatctgttggcaccaatgattattcacggcatcaagacccagggtgcccgtcagaagttctccagcctctacatctctcagtttatcatcatgtatagtcttgatgggaagaagtggcagacttatcgaggaaattccactggaaccttaatggtcttctttggcaatgtggattcatctgggataaaacacaatatttttaaccctccaattattgctcgatacatccgtttgcacccaactcattatagcattcgcagcactcttcgcatggagttgatgggctgtgatttaaatagttgcagcatgccattgggaatggagagtaaagcaatatcagatgcacagattactgcttcatcctactttaccaatatgtttgccacctggtctccttcaaaagctcgacttcacctccaagggaggagtaatgcctggagacctcaggtgaataatccaaaagagtggctgcaagtggacttccagaagacaatgaaagtcacaggagtaactactcagggagtaaaatctctgcttaccagcatgtatgtgaaggagttcctcatctccagcagtcaagatggccatcagtggactctcttttttcagaatggcaaagtaaaggtttttcagggaaatcaagactccttcacacctgtggtgaactctctagacccaccgttactgactcgctaccttcgaattcacccccagagttgggtgcaccagattgccctgaggatggaggttctgggctgcgaggcacaggacctctacggcgccggatcacctggggccgaaacggccgaacaaaaactcatctcagaagaggatctgtcacctgcaaccggtcatcatcaccatcaccattga

SEQ ID NO: 931 - protein, 1769 aa, synthetic construct
  REGION 1..1769: note = Description of Artificial Sequence: Synthetic polypeptide
ATRRYYLGAVELSWDYMQGAPTSESATPESGPGSEPATSGSETPGTSESATPESGPGSEPATSGSETPGTSESATPESGPGTSTEPSEGSAPGSPAGSPTSTEEGTSESATPESGPGSEPATSGSETPGTSESATPESGPGSPAGSPTSTEEGSPAGSPTSTEEGASSSDLGELPVDARFPPRVPKSFPFNTSVVYKKTLFVEFTDHLFNIAKPRPPWMGLLGPTIQAEVYDTVVITLKNMASHPVSLHAVGVSYWKASEGAEYDDQTSQREKEDDKVFPGGSHTYVWQVLKENGPMASDPLCLTYSYLSHVDLVKDLNSGLIGALLVCREGSLAKEKTQTLHKFILLFAVFDEGKSWHSETKNSLMQDRDAASARAWPKMHTVNGYVNRSLPGLIGCHRKSVYWHVIGMGTTPEVHSIFLEGHTFLVRNHRQASLEISPITFLTAQTLLMDLGQFLLFCHISSHQHDGMEAYVKVDSCPEEPQLRMKNNEEAEDYDDDLTDSEMDVVRFDDDNSPSFIQIRSVAKKHPKTWVHYIAAEEEDWDYAPLVLAPDDRSYKSQYLNNGPQRIGRKYKKVRFMAYTDETFKTREAIQHESGILGPLLYGEVGDTLLIIFKNQASRPYNIYPHGITDVRPLYSRRLPKGVKHLKDFPILPGEIFKYKWTVTVEDGPTKSDPRCLTRYYSSFVNMERDLASGLIGPLLICYKESVDQRGNQIMSDKRNVILFSVFDENRSWYLTENIQRFLPNPAGVQLEDPEFQASNIMHSINGYVFDSLQLSVCLHEVAYWYILSIGAQTDFLSVFFSGYTFKHKMVYEDTLTLFPFSGETVFMSMENPGLWILGCHNSDFRNRGMTALLKVSSCDKNTGDYYEDSYEDISAYLLSKNNAIEPRSFSQNPPVLKRHQREITRTTLQSDQEEIDYDDTISVEMKKEDFDIYDEDENQSPRSFQKKTRHYFIAAVERLWDYGMSSSPHVLRNRAQSGSVPQFKKVVFQEFTDGSFTQPLYRGELNEHLGLLGPYIRAEVEDNIMVTFRNQASRPYSFYSSLISYEEDQRQGAEPRKNFVKPNETKTYFWKVQHHMAPTKDEFDCKAWAYFSDVDLEKDVHSGLIGPLLVCHTNTLNPAHGRQVTVQEFALFFTIFDETKSWYFTENMERNCRGAPTSESATPESGPGSEPATSGSETPGTSESATPESGPGSEPATSGSETPGTSESATPESGPGTSTEPSEGSAPGTSESATPESGPGSPAGSPTSTEEGSPAGSPTSTEEGSPAGSPTSTEEGTSESATPESGPGTSTEPSEGSAPGASSAPCNIQMEDPTFKENYRFHAINGYIMDTLPGLVMAQDQRIRWYLLSMGSNENIHSIHFSGHVFTVRKKEEYKMALYNLYPGVFETVEMLPSKAGIWRVECLIGEHLHAGMSTLFLVYSNKCQTPLGMASGHIRDFQITASGQYGQWAPKLARLHYSGSINAWSTKEPFSWIKVDLLAPMIIHGIKTQGARQKFSSLYISQFIIMYSLDGKKWQTYRGNSTGTLMVFFGNVDSSGIKHNIFNPPIIARYIRLHPTHYSIRSTLRMELMGCDLNSCSMPLGMESKAISDAQITASSYFTNMFATWSPSKARLHLQGRSNAWRPQVNNPKEWLQVDFQKTMKVTGVTTQGVKSLLTSMYVKEFLISSSQDGHQWTLFFQNGKVKVFQGNQDSFTPVVNSLDPPLLTRYLRIHPQSWVHQIALRMEVLGCEAQDLYGAGSPGAETAEQKLISEEDLSPATGHHHHHH

SEQ ID NO: 932 - DNA, 5310 bp, synthetic construct
  misc_feature 1..5310: note = Description of Artificial Sequence: Synthetic polynucleotide
  source 1..5310: mol_type = other DNA
gccaccagaagatactacctgggtgcagtggaactgtcatgggactatatgcaaggcgcgccaacatcagagagcgccacccctgaaagtggtcccgggagcgagccagccacatctgggtcggaaacgccaggcacaagtgagtctgcaactcccgagtccggacctggctccgagcctgccactagcggctccgagactccgggaacttccgagagcgctacaccagaaagcggacccggaaccagtaccgaacctagcgagggctctgctccgggcagcccagccggctctcctacatccacggaggagggcacttccgaatccgccaccccggagtcagggccaggatctgaacccgctacctcaggcagtgagacgccaggaacgagcgagtccgctacaccggagagtgggccagggagccctgctggatctcctacgtccactgaggaagggtcaccagcgggctcgcccaccagcactgaagaaggtgcctcgagcagtgatctcggtgagctgcctgtggacgcaagatttcctcctagagtgccaaaatcttttccattcaacacctcagtcgtgtacaaaaagactctgtttgtagaattcacggatcaccttttcaacatcgctaagccaaggccaccctggatgggtctgctaggtcctaccatccaggctgaggtttatgatacagtggtcattacacttaagaacatggcttcccatcctgtcagtcttcatgctgttggtgtatcctactggaaagcttctgagggagctgaatatgatgatcagaccagtcaaagggagaaagaagatgataaagtcttccctggtggaagccatacatatgtctggcaggtcctgaaagagaatggtccaatggcctctgacccactgtgccttacctactcatatctttctcatgtggacctggtaaaagacttgaattcaggcctcattggagccctactagtatgtagagaagggagtctggccaaggaaaagacacagaccttgcacaaatttatactactttttgctgtatttgatgaagggaaaagttggcactcagaaacaaagaactccttgatgcaggatagggatgctgcatctgctcgggcctggcctaaaatgcacacagtcaatggttatgtaaacaggtctctgccaggtctgattggatgccacaggaaatcagtctattggcatgtgattggaatgggcaccactcctgaagtgcactcaatattcctcgaaggtcacacatttcttgtgaggaaccatcgccaggctagcttggaaatctcgccaataactttccttactgctcaaacactcttgatggaccttggacagtttctactgttttgtcatatctcttcccaccaacatgatggcatggaagcttatgtcaaagtagacagctgtccagaggaaccccaactacgaatgaaaaataatgaagaagcggaagactatgatgatgatcttactgattctgaaatggatgtggtcaggtttgatgatgacaactctccttcctttatccaaattcgctcagttgccaagaagcatcctaaaacttgggtacattacattgctgctgaagaggaggactgggactatgctcccttagtcctcgcccccgatgacagaagttataaaagtcaatatttgaacaatggccctcagcggattggtaggaagtacaaaaaagtccgatttatggcatacacagatgaaacctttaagactcgtgaagctattcagcatgaatcaggaatcttgggacctttactttatggggaagttggagacacactgttgattatatttaagaatcaagcaagcagaccatataacatctaccctcacggaatcactgatgtccgtcctttgtattcaaggagattaccaaaaggtgtaaaacatttgaaggattttccaattctgccaggagaaatattcaaatataaatggacagtgactgtagaagatgggccaactaaatcagatcctcggtgcctgacccgctattactctagtttcgttaatatggagagagatctagcttcaggactcattggccctctcctcatctgctacaaagaatctgtagatcaaagaggaaaccagataatgtcagacaagaggaatgtcatcctgttttctgtatttgatgagaaccgaagctggtacctcacagagaatatacaacgctttctccccaatccagctggagtgcagcttgaggatccagagttccaagcctccaacatcatgcacagcatcaatggctatgtttttgatagtttgcagttgtcagtttgtttgcatgaggtggcatactggtacattctaagcattggagcacagactgacttcctttctgtcttcttctctggatataccttcaaacacaaaatggtctatgaagacacactcaccctattcccattctcaggagaaactgtcttcatgtcgatggaaaacccaggtctatggattctggggtgccacaactcagactttcggaacagaggcatgaccgccttactgaaggtttctagttgtgacaagaacactggtgattattacgaggacagttatgaagatatttcagcatacttgctgagtaaaaacaatgccattgaaccaagaagcttctctcaaaacccaccagtcttgaaacgccatcaacgggaaataactcgtactactcttcagtcagatcaagaggaaatcgattatgatgataccatatcagttgaaatgaagaaggaagattttgacatttatgatgaggatgaaaatcagagcccccgcagctttcaaaagaaaacacgacactattttattgctgcagtggagaggctctgggattatgggatgagtagctccccacatgttctaagaaacagggctcagagtggcagtgtccctcagttcaagaaagttgttttccaggaatttactgatggctcctttactcagcccttataccgtggagaactaaatgaacatttgggactcctggggccatatataagagcagaagttgaagataatatcatggtaactttcagaaatcaggcctctcgtccctattccttctattctagccttatttcttatgaggaagatcagaggcaaggagcagaacctagaaaaaactttgtcaagcctaatgaaaccaaaacttacttttggaaagtgcaacatcatatggcacccactaaagatgagtttgactgcaaagcctgggcttatttctctgatgttgacctggaaaaagatgtgcactcaggcctgattggaccccttctggtctgccacactaacacactgaaccctgctcatgggagacaagtgacagtacaggaatttgctctgtttttcaccatctttgatgagaccaaaagctggtacttcactgaaaatatggaaagaaactgcaggggcgcgccaacgtccgaaagtgctacccctgagtcaggccctggtagtgagcctgccacaagcggaagcgaaactccggggacctcagagtctgccactcccgaatcggggccaggctctgaaccggccacttcagggagcgaaacaccaggaacatcggagagcgctaccccggagagcgggccaggaactagtactgagcctagcgagggaagtgcacctggtacaagcgagtccgccacacccgagtctggccctggctctccagcgggctcacccacgagcactgaagagggctctcccgctggcagcccaacgtcgacagaagaaggatcaccagcaggctcccccacatcaacagaggagggtacatcagaatctgctactcccgagagtggacccggtacctccactgagcccagcgaggggagtgcaccaggtgcctcgagcgctccctgcaatatccagatggaagatcccacttttaaagagaattatcgcttccatgcaatcaatggctacataatggatacactacctggcttagtaatggctcaggatcaaaggattcgatggtatctgctcagcatgggcagcaatgaaaacatccattctattcatttcagtggacatgtgttcactgtacgaaaaaaagaggagtataaaatggcactgtacaatctctatccaggtgtttttgagacagtggaaatgttaccatccaaagctggaatttggcgggtggaatgccttattggcgagcatctacatgctgggatgagcacactttttctggtgtacagcaataagtgtcagactcccctgggaatggcttctggacacattagagattttcagattacagcttcaggacaatatggacagtgggccccaaagctggccagacttcattattccggatcaatcaatgcctggagcaccaaggagcccttttcttggatcaaggtggatctgttggcaccaatgattattcacggcatcaagacccagggtgcccgtcagaagttctccagcctctacatctctcagtttatcatcatgtatagtcttgatgggaagaagtggcagacttatcgaggaaattccactggaaccttaatggtcttctttggcaatgtggattcatctgggataaaacacaatatttttaaccctccaattattgctcgatacatccgtttgcacccaactcattatagcattcgcagcactcttcgcatggagttgatgggctgtgatttaaatagttgcagcatgccattgggaatggagagtaaagcaatatcagatgcacagattactgcttcatcctactttaccaatatgtttgccacctggtctccttcaaaagctcgacttcacctccaagggaggagtaatgcctggagacctcaggtgaataatccaaaagagtggctgcaagtggacttccagaagacaatgaaagtcacaggagtaactactcagggagtaaaatctctgcttaccagcatgtatgtgaaggagttcctcatctccagcagtcaagatggccatcagtggactctcttttttcagaatggcaaagtaaaggtttttcagggaaatcaagactccttcacacctgtggtgaactctctagacccaccgttactgactcgctaccttcgaattcacccccagagttgggtgcaccagattgccctgaggatggaggttctgggctgcgaggcacaggacctctacggcgccggatcacctggggccgaaacggccgaacaaaaactcatctcagaagaggatctgtcacctgcaaccggtcatcatcaccatcaccattga

SEQ ID NO: 933 - protein, 1769 aa, synthetic construct
  REGION 1..1769: note = Description of Artificial Sequence: Synthetic polypeptide
ATRRYYLGAVELSWDYMQGAPGSSPSASTGTGPGSSPSASTGTGPGASPGTSSTGSPGASPGTSSTGSPGSSTPSGATGSPGSSPSASTGTGPGASPGTSSTGSPGSSPSASTGTGPGTPGSGTASSSPGSSTPSGATGSPGSSTPSGATGSPGASPGTSSTGSPASSSDLGELPVDARFPPRVPKSFPFNTSVVYKKTLFVEFTDHLFNIAKPRPPWMGLLGPTIQAEVYDTVVITLKNMASHPVSLHAVGVSYWKASEGAEYDDQTSQREKEDDKVFPGGSHTYVWQVLKENGPMASDPLCLTYSYLSHVDLVKDLNSGLIGALLVCREGSLAKEKTQTLHKFILLFAVFDEGKSWHSETKNSLMQDRDAASARAWPKMHTVNGYVNRSLPGLIGCHRKSVYWHVIGMGTTPEVHSIFLEGHTFLVRNHRQASLEISPITFLTAQTLLMDLGQFLLFCHISSHQHDGMEAYVKVDSCPEEPQLRMKNNEEAEDYDDDLTDSEMDVVRFDDDNSPSFIQIRSVAKKHPKTWVHYIAAEEEDWDYAPLVLAPDDRSYKSQYLNNGPQRIGRKYKKVRFMAYTDETFKTREAIQHESGILGPLLYGEVGDTLLIIFKNQASRPYNIYPHGITDVRPLYSRRLPKGVKHLKDFPILPGEIFKYKWTVTVEDGPTKSDPRCLTRYYSSFVNMERDLASGLIGPLLICYKESVDQRGNQIMSDKRNVILFSVFDENRSWYLTENIQRFLPNPAGVQLEDPEFQASNIMHSINGYVFDSLQLSVCLHEVAYWYILSIGAQTDFLSVFFSGYTFKHKMVYEDTLTLFPFSGETVFMSMENPGLWILGCHNSDFRNRGMTALLKVSSCDKNTGDYYEDSYEDISAYLLSKNNAIEPRSFSQNPPVLKRHQREITRTTLQSDQEEIDYDDTISVEMKKEDFDIYDEDENQSPRSFQKKTRHYFIAAVERLWDYGMSSSPHVLRNRAQSGSVPQFKKVVFQEFTDGSFTQPLYRGELNEHLGLLGPYIRAEVEDNIMVTFRNQASRPYSFYSSLISYEEDQRQGAEPRKNFVKPNETKTYFWKVQHHMAPTKDEFDCKAWAYFSDVDLEKDVHSGLIGPLLVCHTNTLNPAHGRQVTVQEFALFFTIFDETKSWYFTENMERNCRGAPTSESATPESGPGSEPATSGSETPGTSESATPESGPGSEPATSGSETPGTSESATPESGPGTSTEPSEGSAPGTSESATPESGPGSPAGSPTSTEEGSPAGSPTSTEEGSPAGSPTSTEEGTSESATPESGPGTSTEPSEGSAPGASSAPCNIQMEDPTFKENYRFHAINGYIMDTLPGLVMAQDQRIRWYLLSMGSNENIHSIHFSGHVFTVRKKEEYKMALYNLYPGVFETVEMLPSKAGIWRVECLIGEHLHAGMSTLFLVYSNKCQTPLGMASGHIRDFQITASGQYGQWAPKLARLHYSGSINAWSTKEPFSWIKVDLLAPMIIHGIKTQGARQKFSSLYISQFIIMYSLDGKKWQTYRGNSTGTLMVFFGNVDSSGIKHNIFNPPIIARYIRLHPTHYSIRSTLRMELMGCDLNSCSMPLGMESKAISDAQITASSYFTNMFATWSPSKARLHLQGRSNAWRPQVNNPKEWLQVDFQKTMKVTGVTTQGVKSLLTSMYVKEFLISSSQDGHQWTLFFQNGKVKVFQGNQDSFTPVVNSLDPPLLTRYLRIHPQSWVHQIALRMEVLGCEAQDLYGAGSPGAETAEQKLISEEDLSPATGHHHHHH

SEQ ID NO: 934 - DNA, 5310 bp, synthetic construct
  misc_feature 1..5310: note = Description of Artificial Sequence: Synthetic polynucleotide
  source 1..5310: mol_type = other DNA
gccaccagaagatactacctgggtgcagtggaactgtcatgggactatatgcaaggcgcgccaggctccagcccctccgcgagcacgggaaccggaccaggttcgtcaccctcagcatcaacggggacgggaccgggggcgtcaccaggaacgtcctccaccggctcgccgggtgcatcacccggaacgtcatcgaccggatcgccagggagctcgacgccatcaggcgcaacaggatcacctggctcaagccctagcgcgtcaaccggcacgggtccgggtgcctcccctggcacgtccagcaccggatcacccggatcgagcccatccgcctcaaccggaaccggacccggtacaccagggtcgggaacagcctcctcgtcaccaggctcctcaaccccctcgggagccacgggttcgcccggttcgtcaacgccttccggagcaactggtagccccggagcatcgccaggaacttcgagcacggggtcgcccgcctcgagcagtgatctcggtgagctgcctgtggacgcaagatttcctcctagagtgccaaaatcttttccattcaacacctcagtcgtgtacaaaaagactctgtttgtagaattcacggatcaccttttcaacatcgctaagccaaggccaccctggatgggtctgctaggtcctaccatccaggctgaggtttatgatacagtggtcattacacttaagaacatggcttcccatcctgtcagtcttcatgctgttggtgtatcctactggaaagcttctgagggagctgaatatgatgatcagaccagtcaaagggagaaagaagatgataaagtcttccctggtggaagccatacatatgtctggcaggtcctgaaagagaatggtccaatggcctctgacccactgtgccttacctactcatatctttctcatgtggacctggtaaaagacttgaattcaggcctcattggagccctactagtatgtagagaagggagtctggccaaggaaaagacacagaccttgcacaaatttatactactttttgctgtatttgatgaagggaaaagttggcactcagaaacaaagaactccttgatgcaggatagggatgctgcatctgctcgggcctggcctaaaatgcacacagtcaatggttatgtaaacaggtctctgccaggtctgattggatgccacaggaaatcagtctattggcatgtgattggaatgggcaccactcctgaagtgcactcaatattcctcgaaggtcacacatttcttgtgaggaaccatcgccaggctagcttggaaatctcgccaataactttccttactgctcaaacactcttgatggaccttggacagtttctactgttttgtcatatctcttcccaccaacatgatggcatggaagcttatgtcaaagtagacagctgtccagaggaaccccaactacgaatgaaaaataatgaagaagcggaagactatgatgatgatcttactgattctgaaatggatgtggtcaggtttgatgatgacaactctccttcctttatccaaattcgctcagttgccaagaagcatcctaaaacttgggtacattacattgctgctgaagaggaggactgggactatgctcccttagtcctcgcccccgatgacagaagttataaaagtcaatatttgaacaatggccctcagcggattggtaggaagtacaaaaaagtccgatttatggcatacacagatgaaacctttaagactcgtgaagctattcagcatgaatcaggaatcttgggacctttactttatggggaagttggagacacactgttgattatatttaagaatcaagcaagcagaccatataacatctaccctcacggaatcactgatgtccgtcctttgtattcaaggagattaccaaaaggtgtaaaacatttgaaggattttccaattctgccaggagaaatattcaaatataaatggacagtgactgtagaagatgggccaactaaatcagatcctcggtgcctgacccgctattactctagtttcgttaatatggagagagatctagcttcaggactcattggccctctcctcatctgctacaaagaatctgtagatcaaagaggaaaccagataatgtcagacaagaggaatgtcatcctgttttctgtatttgatgagaaccgaagctggtacctcacagagaatatacaacgctttctccccaatccagctggagtgcagcttgaggatccagagttccaagcctccaacatcatgcacagcatcaatggctatgtttttgatagtttgcagttgtcagtttgtttgcatgaggtggcatactggtacattctaagcattggagcacagactgacttcctttctgtcttcttctctggatataccttcaaacacaaaatggtctatgaagacacactcaccctattcccattctcaggagaaactgtcttcatgtcgatggaaaacccaggtctatggattctggggtgccacaactcagactttcggaacagaggcatgaccgccttactgaaggtttctagttgtgacaagaacactggtgattattacgaggacagttatgaagatatttcagcatacttgctgagtaaaaacaatgccattgaaccaagaagcttctctcaaaacccaccagtcttgaaacgccatcaacgggaaataactcgtactactcttcagtcagatcaagaggaaatcgattatgatgataccatatcagttgaaatgaagaaggaagattttgacatttatgatgaggatgaaaatcagagcccccgcagctttcaaaagaaaacacgacactattttattgctgcagtggagaggctctgggattatgggatgagtagctccccacatgttctaagaaacagggctcagagtggcagtgtccctcagttcaagaaagttgttttccaggaatttactgatggctcctttactcagcccttataccgtggagaactaaatgaacatttgggactcctggggccatatataagagcagaagttgaagataatatcatggtaactttcagaaatcaggcctctcgtccctattccttctattctagccttatttcttatgaggaagatcagaggcaaggagcagaacctagaaaaaactttgtcaagcctaatgaaaccaaaacttacttttggaaagtgcaacatcatatggcacccactaaagatgagtttgactgcaaagcctgggcttatttctctgatgttgacctggaaaaagatgtgcactcaggcctgattggaccccttctggtctgccacactaacacactgaaccctgctcatgggagacaagtgacagtacaggaatttgctctgtttttcaccatctttgatgagaccaaaagctggtacttcactgaaaatatggaaagaaactgcaggggcgcgccaacgtccgaaagtgctacccctgagtcaggccctggtagtgagcctgccacaagcggaagcgaaactccggggacctcagagtctgccactcccgaatcggggccaggctctgaaccggccacttcagggagcgaaacaccaggaacatcggagagcgctaccccggagagcgggccaggaactagtactgagcctagcgagggaagtgcacctggtacaagcgagtccgccacacccgagtctggccctggctctccagcgggctcacccacgagcactgaagagggctctcccgctggcagcccaacgtcgacagaagaaggatcaccagcaggctcccccacatcaacagaggagggtacatcagaatctgctactcccgagagtggacccggtacctccactgagcccagcgaggggagtgcaccaggtgcctcgagcgctccctgcaatatccagatggaagatcccacttttaaagagaattatcgcttccatgcaatcaatggctacataatggatacactacctggcttagtaatggctcaggatcaaaggattcgatggtatctgctcagcatgggcagcaatgaaaacatccattctattcatttcagtggacatgtgttcactgtacgaaaaaaagaggagtataaaatggcactgtacaatctctatccaggtgtttttgagacagtggaaatgttaccatccaaagctggaatttggcgggtggaatgccttattggcgagcatctacatgctgggatgagcacactttttctggtgtacagcaataagtgtcagactcccctgggaatggcttctggacacattagagattttcagattacagcttcaggacaatatggacagtgggccccaaagctggccagacttcattattccggatcaatcaatgcctggagcaccaaggagcccttttcttggatcaaggtggatctgttggcaccaatgattattcacggcatcaagacccagggtgcccgtcagaagttctccagcctctacatctctcagtttatcatcatgtatagtcttgatgggaagaagtggcagacttatcgaggaaattccactggaaccttaatggtcttctttggcaatgtggattcatctgggataaaacacaatatttttaaccctccaattattgctcgatacatccgtttgcacccaactcattatagcattcgcagcactcttcgcatggagttgatgggctgtgatttaaatagttgcagcatgccattgggaatggagagtaaagcaatatcagatgcacagattactgcttcatcctactttaccaatatgtttgccacctggtctccttcaaaagctcgacttcacctccaagggaggagtaatgcctggagacctcaggtgaataatccaaaagagtggctgcaagtggacttccagaagacaatgaaagtcacaggagtaactactcagggagtaaaatctctgcttaccagcatgtatgtgaaggagttcctcatctccagcagtcaagatggccatcagtggactctcttttttcagaatggcaaagtaaaggtttttcagggaaatcaagactccttcacacctgtggtgaactctctagacccaccgttactgactcgctaccttcgaattcacccccagagttgggtgcaccagattgccctgaggatggaggttctgggctgcgaggcacaggacctctacggcgccggatcacctggggccgaaacggccgaacaaaaactcatctcagaagaggatctgtcacctgcaaccggtcatcatcaccatcaccattga

SEQ ID NO: 935 - protein, 1769 aa, synthetic construct
  REGION 1..1769: note = Description of Artificial Sequence: Synthetic polypeptide
ATRRYYLGAVELSWDYMQSDLGELPVGAPTSESATPESGPGSEPATSGSETPGTSESATPESGPGSEPATSGSETPGTSESATPESGPGTSTEPSEGSAPGSPAGSPTSTEEGTSESATPESGPGSEPATSGSETPGTSESATPESGPGSPAGSPTSTEEGSPAGSPTSTEEGASSDARFPPRVPKSFPFNTSVVYKKTLFVEFTDHLFNIAKPRPPWMGLLGPTIQAEVYDTVVITLKNMASHPVSLHAVGVSYWKASEGAEYDDQTSQREKEDDKVFPGGSHTYVWQVLKENGPMASDPLCLTYSYLSHVDLVKDLNSGLIGALLVCREGSLAKEKTQTLHKFILLFAVFDEGKSWHSETKNSLMQDRDAASARAWPKMHTVNGYVNRSLPGLIGCHRKSVYWHVIGMGTTPEVHSIFLEGHTFLVRNHRQASLEISPITFLTAQTLLMDLGQFLLFCHISSHQHDGMEAYVKVDSCPEEPQLRMKNNEEAEDYDDDLTDSEMDVVRFDDDNSPSFIQIRSVAKKHPKTWVHYIAAEEEDWDYAPLVLAPDDRSYKSQYLNNGPQRIGRKYKKVRFMAYTDETFKTREAIQHESGILGPLLYGEVGDTLLIIFKNQASRPYNIYPHGITDVRPLYSRRLPKGVKHLKDFPILPGEIFKYKWTVTVEDGPTKSDPRCLTRYYSSFVNMERDLASGLIGPLLICYKESVDQRGNQIMSDKRNVILFSVFDENRSWYLTENIQRFLPNPAGVQLEDPEFQASNIMHSINGYVFDSLQLSVCLHEVAYWYILSIGAQTDFLSVFFSGYTFKHKMVYEDTLTLFPFSGETVFMSMENPGLWILGCHNSDFRNRGMTALLKVSSCDKNTGDYYEDSYEDISAYLLSKNNAIEPRSFSQNPPVLKRHQREITRTTLQSDQEEIDYDDTISVEMKKEDFDIYDEDENQSPRSFQKKTRHYFIAAVERLWDYGMSSSPHVLRNRAQSGSVPQFKKVVFQEFTDGSFTQPLYRGELNEHLGLLGPYIRAEVEDNIMVTFRNQASRPYSFYSSLISYEEDQRQGAEPRKNFVKPNETKTYFWKVQHHMAPTKDEFDCKAWAYFSDVDLEKDVHSGLIGPLLVCHTNTLNPAHGRQVTVQEFALFFTIFDETKSWYFTENMERNCRGAPTSESATPESGPGSEPATSGSETPGTSESATPESGPGSEPATSGSETPGTSESATPESGPGTSTEPSEGSAPGTSESATPESGPGSPAGSPTSTEEGSPAGSPTSTEEGSPAGSPTSTEEGTSESATPESGPGTSTEPSEGSAPGASSAPCNIQMEDPTFKENYRFHAINGYIMDTLPGLVMAQDQRIRWYLLSMGSNENIHSIHFSGHVFTVRKKEEYKMALYNLYPGVFETVEMLPSKAGIWRVECLIGEHLHAGMSTLFLVYSNKCQTPLGMASGHIRDFQITASGQYGQWAPKLARLHYSGSINAWSTKEPFSWIKVDLLAPMIIHGIKTQGARQKFSSLYISQFIIMYSLDGKKWQTYRGNSTGTLMVFFGNVDSSGIKHNIFNPPIIARYIRLHPTHYSIRSTLRMELMGCDLNSCSMPLGMESKAISDAQITASSYFTNMFATWSPSKARLHLQGRSNAWRPQVNNPKEWLQVDFQKTMKVTGVTTQGVKSLLTSMYVKEFLISSSQDGHQWTLFFQNGKVKVFQGNQDSFTPVVNSLDPPLLTRYLRIHPQSWVHQIALRMEVLGCEAQDLYGAGSPGAETAEQKLISEEDLSPATGHHHHHH

SEQ ID NO: 936 - DNA, 5310 bp, synthetic construct
  misc_feature 1..5310: note = Description of Artificial Sequence: Synthetic polynucleotide
  source 1..5310: mol_type = other DNA
gccaccagaagatactacctgggtgcagtggaactgtcatgggactatatgcaaagtgatctcggtgagctgcctgtgggcgcgccaacatcagagagcgccacccctgaaagtggtcccgggagcgagccagccacatctgggtcggaaacgccaggcacaagtgagtctgcaactcccgagtccggacctggctccgagcctgccactagcggctccgagactccgggaacttccgagagcgctacaccagaaagcggacccggaaccagtaccgaacctagcgagggctctgctccgggcagcccagccggctctcctacatccacggaggagggcacttccgaatccgccaccccggagtcagggccaggatctgaacccgctacctcaggcagtgagacgccaggaacgagcgagtccgctacaccggagagtgggccagggagccctgctggatctcctacgtccactgaggaagggtcaccagcgggctcgcccaccagcactgaagaaggtgcctcgagcgacgcaagatttcctcctagagtgccaaaatcttttccattcaacacctcagtcgtgtacaaaaagactctgtttgtagaattcacggatcaccttttcaacatcgctaagccaaggccaccctggatgggtctgctaggtcctaccatccaggctgaggtttatgatacagtggtcattacacttaagaacatggcttcccatcctgtcagtcttcatgctgttggtgtatcctactggaaagcttctgagggagctgaatatgatgatcagaccagtcaaagggagaaagaagatgataaagtcttccctggtggaagccatacatatgtctggcaggtcctgaaagagaatggtccaatggcctctgacccactgtgccttacctactcatatctttctcatgtggacctggtaaaagacttgaattcaggcctcattggagccctactagtatgtagagaagggagtctggccaaggaaaagacacagaccttgcacaaatttatactactttttgctgtatttgatgaagggaaaagttggcactcagaaacaaagaactccttgatgcaggatagggatgctgcatctgctcgggcctggcctaaaatgcacacagtcaatggttatgtaaacaggtctctgccaggtctgattggatgccacaggaaatcagtctattggcatgtgattggaatgggcaccactcctgaagtgcactcaatattcctcgaaggtcacacatttcttgtgaggaaccatcgccaggctagcttggaaatctcgccaataactttccttactgctcaaacactcttgatggaccttggacagtttctactgttttgtcatatctcttcccaccaacatgatggcatggaagcttatgtcaaagtagacagctgtccagaggaaccccaactacgaatgaaaaataatgaagaagcggaagactatgatgatgatcttactgattctgaaatggatgtggtcaggtttgatgatgacaactctccttcctttatccaaattcgctcagttgccaagaagcatcctaaaacttgggtacattacattgctgctgaagaggaggactgggactatgctcccttagtcctcgcccccgatgacagaagttataaaagtcaatatttgaacaatggccctcagcggattggtaggaagtacaaaaaagtccgatttatggcatacacagatgaaacctttaagactcgtgaagctattcagcatgaatcaggaatcttgggacctttactttatggggaagttggagacacactgttgattatatttaagaatcaagcaagcagaccatataacatctaccctcacggaatcactgatgtccgtcctttgtattcaaggagattaccaaaaggtgtaaaacatttgaaggattttccaattctgccaggagaaatattcaaatataaatggacagtgactgtagaagatgggccaactaaatcagatcctcggtgcctgacccgctattactctagtttcgttaatatggagagagatctagcttcaggactcattggccctctcctcatctgctacaaagaatctgtagatcaaagaggaaaccagataatgtcagacaagaggaatgtcatcctgttttctgtatttgatgagaaccgaagctggtacctcacagagaatatacaacgctttctccccaatccagctggagtgcagcttgaggatccagagttccaagcctccaacatcatgcacagcatcaatggctatgtttttgatagtttgcagttgtcagtttgtttgcatgaggtggcatactggtacattctaagcattggagcacagactgacttcctttctgtcttcttctctggatataccttcaaacacaaaatggtctatgaagacacactcaccctattcccattctcaggagaaactgtcttcatgtcgatggaaaacccaggtctatggattctggggtgccacaactcagactttcggaacagaggcatgaccgccttactgaaggtttctagttgtgacaagaacactggtgattattacgaggacagttatgaagatatttcagcatacttgctgagtaaaaacaatgccattgaaccaagaagcttctctcaaaacccaccagtcttgaaacgccatcaacgggaaataactcgtactactcttcagtcagatcaagaggaaatcgattatgatgataccatatcagttgaaatgaagaaggaagattttgacatttatgatgaggatgaaaatcagagcccccgcagctttcaaaagaaaacacgacactattttattgctgcagtggagaggctctgggattatgggatgagtagctccccacatgttctaagaaacagggctcagagtggcagtgtccctcagttcaagaaagttgttttccaggaatttactgatggctcctttactcagcccttataccgtggagaactaaatgaacatttgggactcctggggccatatataagagcagaagttgaagataatatcatggtaactttcagaaatcaggcctctcgtccctattccttctattctagccttatttcttatgaggaagatcagaggcaaggagcagaacctagaaaaaactttgtcaagcctaatgaaaccaaaacttacttttggaaagtgcaacatcatatggcacccactaaagatgagtttgactgcaaagcctgggcttatttctctgatgttgacctggaaaaagatgtgcactcaggcctgattggaccccttctggtctgccacactaacacactgaaccctgctcatgggagacaagtgacagtacaggaatttgctctgtttttcaccatctttgatgagaccaaaagctggtacttcactgaaaatatggaaagaaactgcaggggcgcgccaacgtccgaaagtgctacccctgagtcaggccctggtagtgagcctgccacaagcggaagcgaaactccggggacctcagagtctgccactcccgaatcggggccaggctctgaaccggccacttcagggagcgaaacaccaggaacatcggagagcgctaccccggagagcgggccaggaactagtactgagcctagcgagggaagtgcacctggtacaagcgagtccgccacacccgagtctggccctggctctccagcgggctcacccacgagcactgaagagggctctcccgctggcagcccaacgtcgacagaagaaggatcaccagcaggctcccccacatcaacagaggagggtacatcagaatctgctactcccgagagtggacccggtacctccactgagcccagcgaggggagtgcaccaggtgcctcgagcgctccctgcaatatccagatggaagatcccacttttaaagagaattatcgcttccatgcaatcaatggctacataatggatacactacctggcttagtaatggctcaggatcaaaggattcgatggtatctgctcagcatgggcagcaatgaaaacatccattctattcatttcagtggacatgtgttcactgtacgaaaaaaagaggagtataaaatggcactgtacaatctctatccaggtgtttttgagacagtggaaatgttaccatccaaagctggaatttggcgggtggaatgccttattggcgagcatctacatgctgggatgagcacactttttctggtgtacagcaataagtgtcagactcccctgggaatggcttctggacacattagagattttcagattacagcttcaggacaatatggacagtgggccccaaagctggccagacttcattattccggatcaatcaatgcctggagcaccaaggagcccttttcttggatcaaggtggatctgttggcaccaatgattattcacggcatcaagacccagggtgcccgtcagaagttctccagcctctacatctctcagtttatcatcatgtatagtcttgatgggaagaagtggcagacttatcgaggaaattccactggaaccttaatggtcttctttggcaatgtggattcatctgggataaaacacaatatttttaaccctccaattattgctcgatacatccgtttgcacccaactcattatagcattcgcagcactcttcgcatggagttgatgggctgtgatttaaatagttgcagcatgccattgggaatggagagtaaagcaatatcagatgcacagattactgcttcatcctactttaccaatatgtttgccacctggtctccttcaaaagctcgacttcacctccaagggaggagtaatgcctggagacctcaggtgaataatccaaaagagtggctgcaagtggacttccagaagacaatgaaagtcacaggagtaactactcagggagtaaaatctctgcttaccagcatgtatgtgaaggagttcctcatctccagcagtcaagatggccatcagtggactctcttttttcagaatggcaaagtaaaggtttttcagggaaatcaagactccttcacacctgtggtgaactctctagacccaccgttactgactcgctaccttcgaattcacccccagagttgggtgcaccagattgccctgaggatggaggttctgggctgcgaggcacaggacctctacggcgccggatcacctggggccgaaacggccgaacaaaaactcatctcagaagaggatctgtcacctgcaaccggtcatcatcaccatcaccattga

SEQ ID NO: 937 - protein, 1769 aa, synthetic construct
  REGION 1..1769: note = Description of Artificial Sequence: Synthetic polypeptide
ATRRYYLGAVELSWDYMQSDLGELPVGAPGSSPSASTGTGPGSSPSASTGTGPGASPGTSSTGSPGASPGTSSTGSPGSSTPSGATGSPGSSPSASTGTGPGASPGTSSTGSPGSSPSASTGTGPGTPGSGTASSSPGSSTPSGATGSPGSSTPSGATGSPGASPGTSSTGSPASSDARFPPRVPKSFPFNTSVVYKKTLFVEFTDHLFNIAKPRPPWMGLLGPTIQAEVYDTVVITLKNMASHPVSLHAVGVSYWKASEGAEYDDQTSQREKEDDKVFPGGSHTYVWQVLKENGPMASDPLCLTYSYLSHVDLVKDLNSGLIGALLVCREGSLAKEKTQTLHKFILLFAVFDEGKSWHSETKNSLMQDRDAASARAWPKMHTVNGYVNRSLPGLIGCHRKSVYWHVIGMGTTPEVHSIFLEGHTFLVRNHRQASLEISPITFLTAQTLLMDLGQFLLFCHISSHQHDGMEAYVKVDSCPEEPQLRMKNNEEAEDYDDDLTDSEMDVVRFDDDNSPSFIQIRSVAKKHPKTWVHYIAAEEEDWDYAPLVLAPDDRSYKSQYLNNGPQRIGRKYKKVRFMAYTDETFKTREAIQHESGILGPLLYGEVGDTLLIIFKNQASRPYNIYPHGITDVRPLYSRRLPKGVKHLKDFPILPGEIFKYKWTVTVEDGPTKSDPRCLTRYYSSFVNMERDLASGLIGPLLICYKESVDQRGNQIMSDKRNVILFSVFDENRSWYLTENIQRFLPNPAGVQLEDPEFQASNIMHSINGYVFDSLQLSVCLHEVAYWYILSIGAQTDFLSVFFSGYTFKHKMVYEDTLTLFPFSGETVFMSMENPGLWILGCHNSDFRNRGMTALLKVSSCDKNTGDYYEDSYEDISAYLLSKNNAIEPRSFSQNPPVLKRHQREITRTTLQSDQEEIDYDDTISVEMKKEDFDIYDEDENQSPRSFQKKTRHYFIAAVERLWDYGMSSSPHVLRNRAQSGSVPQFKKVVFQEFTDGSFTQPLYRGELNEHLGLLGPYIRAEVEDNIMVTFRNQASRPYSFYSSLISYEEDQRQGAEPRKNFVKPNETKTYFWKVQHHMAPTKDEFDCKAWAYFSDVDLEKDVHSGLIGPLLVCHTNTLNPAHGRQVTVQEFALFFTIFDETKSWYFTENMERNCRGAPTSESATPESGPGSEPATSGSETPGTSESATPESGPGSEPATSGSETPGTSESATPESGPGTSTEPSEGSAPGTSESATPESGPGSPAGSPTSTEEGSPAGSPTSTEEGSPAGSPTSTEEGTSESATPESGPGTSTEPSEGSAPGASSAPCNIQMEDPTFKENYRFHAINGYIMDTLPGLVMAQDQRIRWYLLSMGSNENIHSIHFSGHVFTVRKKEEYKMALYNLYPGVFETVEMLPSKAGIWRVECLIGEHLHAGMSTLFLVYSNKCQTPLGMASGHIRDFQITASGQYGQWAPKLARLHYSGSINAWSTKEPFSWIKVDLLAPMIIHGIKTQGARQKFSSLYISQFIIMYSLDGKKWQTYRGNSTGTLMVFFGNVDSSGIKHNIFNPPIIARYIRLHPTHYSIRSTLRMELMGCDLNSCSMPLGMESKAISDAQITASSYFTNMFATWSPSKARLHLQGRSNAWRPQVNNPKEWLQVDFQKTMKVTGVTTQGVKSLLTSMYVKEFLISSSQDGHQWTLFFQNGKVKVFQGNQDSFTPVVNSLDPPLLTRYLRIHPQSWVHQIALRMEVLGCEAQDLYGAGSPGAETAEQKLISEEDLSPATGHHHHHH

SEQ ID NO: 938 - DNA, 5310 bp, synthetic construct
  misc_feature 1..5310: note = Description of Artificial Sequence: Synthetic polynucleotide
  source 1..5310: mol_type = other DNA
gccaccagaagatactacctgggtgcagtggaactgtcatgggactatatgcaaagtgatctcggtgagctgcctgtgggcgcgccaggctccagcccctccgcgagcacgggaaccggaccaggttcgtcaccctcagcatcaacggggacgggaccgggggcgtcaccaggaacgtcctccaccggctcgccgggtgcatcacccggaacgtcatcgaccggatcgccagggagctcgacgccatcaggcgcaacaggatcacctggctcaagccctagcgcgtcaaccggcacgggtccgggtgcctcccctggcacgtccagcaccggatcacccggatcgagcccatccgcctcaaccggaaccggacccggtacaccagggtcgggaacagcctcctcgtcaccaggctcctcaaccccctcgggagccacgggttcgcccggttcgtcaacgccttccggagcaactggtagccccggagcatcgccaggaacttcgagcacggggtcgcccgcctcgagcgacgcaagatttcctcctagagtgccaaaatcttttccattcaacacctcagtcgtgtacaaaaagactctgtttgtagaattcacggatcaccttttcaacatcgctaagccaaggccaccctggatgggtctgctaggtcctaccatccaggctgaggtttatgatacagtggtcattacacttaagaacatggcttcccatcctgtcagtcttcatgctgttggtgtatcctactggaaagcttctgagggagctgaatatgatgatcagaccagtcaaagggagaaagaagatgataaagtcttccctggtggaagccatacatatgtctggcaggtcctgaaagagaatggtccaatggcctctgacccactgtgccttacctactcatatctttctcatgtggacctggtaaaagacttgaattcaggcctcattggagccctactagtatgtagagaagggagtctggccaaggaaaagacacagaccttgcacaaatttatactactttttgctgtatttgatgaagggaaaagttggcactcagaaacaaagaactccttgatgcaggatagggatgctgcatctgctcgggcctggcctaaaatgcacacagtcaatggttatgtaaacaggtctctgccaggtctgattggatgccacaggaaatcagtctattggcatgtgattggaatgggcaccactcctgaagtgcactcaatattcctcgaaggtcacacatttcttgtgaggaaccatcgccaggctagcttggaaatctcgccaataactttccttactgctcaaacactcttgatggaccttggacagtttctactgttttgtcatatctcttcccaccaacatgatggcatggaagcttatgtcaaagtagacagctgtccagaggaaccccaactacgaatgaaaaataatgaagaagcggaagactatgatgatgatcttactgattctgaaatggatgtggtcaggtttgatgatgacaactctccttcctttatccaaattcgctcagttgccaagaagcatcctaaaacttgggtacattacattgctgctgaagaggaggactgggactatgctcccttagtcctcgcccccgatgacagaagttataaaagtcaatatttgaacaatggccctcagcggattggtaggaagtacaaaaaagtccgatttatggcatacacagatgaaacctttaagactcgtgaagctattcagcatgaatcaggaatcttgggacctttactttatggggaagttggagacacactgttgattatatttaagaatcaagcaagcagaccatataacatctaccctcacggaatcactgatgtccgtcctttgtattcaaggagattaccaaaaggtgtaaaacatttgaaggattttccaattctgccaggagaaatattcaaatataaatggacagtgactgtagaagatgggccaactaaatcagatcctcggtgcctgacccgctattactctagtttcgttaatatggagagagatctagcttcaggactcattggccctctcctcatctgctacaaagaatctgtagatcaaagaggaaaccagataatgtcagacaagaggaatgtcatcctgttttctgtatttgatgagaaccgaagctggtacctcacagagaatatacaacgctttctccccaatccagctggagtgcagcttgaggatccagagttccaagcctccaacatcatgcacagcatcaatggctatgtttttgatagtttgcagttgtcagtttgtttgcatgaggtggcatactggtacattctaagcattggagcacagactgacttcctttctgtcttcttctctggatataccttcaaacacaaaatggtctatgaagacacactcaccctattcccattctcaggagaaactgtcttcatgtcgatggaaaacccaggtctatggattctggggtgccacaactcagactttcggaacagaggcatgaccgccttactgaaggtttctagttgtgacaagaacactggtgattattacgaggacagttatgaagatatttcagcatacttgctgagtaaaaacaatgccattgaaccaagaagcttctctcaaaacccaccagtcttgaaacgccatcaacgggaaataactcgtactactcttcagtcagatcaagaggaaatcgattatgatgataccatatcagttgaaatgaagaaggaagattttgacatttatgatgaggatgaaaatcagagcccccgcagctttcaaaagaaaacacgacactattttattgctgcagtggagaggctctgggattatgggatgagtagctccccacatgttctaagaaacagggctcagagtggcagtgtccctcagttcaagaaagttgttttccaggaatttactgatggctcctttactcagcccttataccgtggagaactaaatgaacatttgggactcctggggccatatataagagcagaagttgaagataatatcatggtaactttcagaaatcaggcctctcgtccctattccttctattctagccttatttcttatgaggaagatcagaggcaaggagcagaacctagaaaaaactttgtcaagcctaatgaaaccaaaacttacttttggaaagtgcaacatcatatggcacccactaaagatgagtttgactgcaaagcctgggcttatttctctgatgttgacctggaaaaagatgtgcactcaggcctgattggaccccttctggtctgccacactaacacactgaaccctgctcatgggagacaagtgacagtacaggaatttgctctgtttttcaccatctttgatgagaccaaaagctggtacttcactgaaaatatggaaagaaactgcaggggcgcgccaacgtccgaaagtgctacccctgagtcaggccctggtagtgagcctgccacaagcggaagcgaaactccggggacctcagagtctgccactcccgaatcggggccaggctctgaaccggccacttcagggagcgaaacaccaggaacatcggagagcgctaccccggagagcgggccaggaactagtactgagcctagcgagggaagtgcacctggtacaagcgagtccgccacacccgagtctggccctggctctccagcgggctcacccacgagcactgaagagggctctcccgctggcagcccaacgtcgacagaagaaggatcaccagcaggctcccccacatcaacagaggagggtacatcagaatctgctactcccgagagtggacccggtacctccactgagcccagcgaggggagtgcaccaggtgcctcgagcgctccctgcaatatccagatggaagatcccacttttaaagagaattatcgcttccatgcaatcaatggctacataatggatacactacctggcttagtaatggctcaggatcaaaggattcgatggtatctgctcagcatgggcagcaatgaaaacatccattctattcatttcagtggacatgtgttcactgtacgaaaaaaagaggagtataaaatggcactgtacaatctctatccaggtgtttttgagacagtggaaatgttaccatccaaagctggaatttggcgggtggaatgccttattggcgagcatctacatgctgggatgagcacactttttctggtgtacagcaataagtgtcagactcccctgggaatggcttctggacacattagagattttcagattacagcttcaggacaatatggacagtgggccccaaagctggccagacttcattattccggatcaatcaatgcctggagcaccaaggagcccttttcttggatcaaggtggatctgttggcaccaatgattattcacggcatcaagacccagggtgcccgtcagaagttctccagcctctacatctctcagtttatcatcatgtatagtcttgatgggaagaagtggcagacttatcgaggaaattccactggaaccttaatggtcttctttggcaatgtggattcatctgggataaaacacaatatttttaaccctccaattattgctcgatacatccgtttgcacccaactcattatagcattcgcagcactcttcgcatggagttgatgggctgtgatttaaatagttgcagcatgccattgggaatggagagtaaagcaatatcagatgcacagattactgcttcatcctactttaccaatatgtttgccacctggtctccttcaaaagctcgacttcacctccaagggaggagtaatgcctggagacctcaggtgaataatccaaaagagtggctgcaagtggacttccagaagacaatgaaagtcacaggagtaactactcagggagtaaaatctctgcttaccagcatgtatgtgaaggagttcctcatctccagcagtcaagatggccatcagtggactctcttttttcagaatggcaaagtaaaggtttttcagggaaatcaagactccttcacacctgtggtgaactctctagacccaccgttactgactcgctaccttcgaattcacccccagagttgggtgcaccagattgccctgaggatggaggttctgggctgcgaggcacaggacctctacggcgccggatcacctggggccgaaacggccgaacaaaaactcatctcagaagaggatctgtcacctgcaaccggtcatcatcaccatcaccattga

SEQ ID NO: 939 - protein, 1769 aa, synthetic construct
  REGION 1..1769: note = Description of Artificial Sequence: Synthetic polypeptide
ATRRYYLGAVELSWDYMQSDLGELPVDARFPPRVPKSFPFGAPGSSPSASTGTGPGSSPSASTGTGPGASPGTSSTGSPGASPGTSSTGSPGSSTPSGATGSPGSSPSASTGTGPGASPGTSSTGSPGSSPSASTGTGPGTPGSGTASSSPGSSTPSGATGSPGSSTPSGATGSPGASPGTSSTGSPASSNTSVVYKKTLFVEFTDHLFNIAKPRPPWMGLLGPTIQAEVYDTVVITLKNMASHPVSLHAVGVSYWKASEGAEYDDQTSQREKEDDKVFPGGSHTYVWQVLKENGPMASDPLCLTYSYLSHVDLVKDLNSGLIGALLVCREGSLAKEKTQTLHKFILLFAVFDEGKSWHSETKNSLMQDRDAASARAWPKMHTVNGYVNRSLPGLIGCHRKSVYWHVIGMGTTPEVHSIFLEGHTFLVRNHRQASLEISPITFLTAQTLLMDLGQFLLFCHISSHQHDGMEAYVKVDSCPEEPQLRMKNNEEAEDYDDDLTDSEMDVVRFDDDNSPSFIQIRSVAKKHPKTWVHYIAAEEEDWDYAPLVLAPDDRSYKSQYLNNGPQRIGRKYKKVRFMAYTDETFKTREAIQHESGILGPLLYGEVGDTLLIIFKNQASRPYNIYPHGITDVRPLYSRRLPKGVKHLKDFPILPGEIFKYKWTVTVEDGPTKSDPRCLTRYYSSFVNMERDLASGLIGPLLICYKESVDQRGNQIMSDKRNVILFSVFDENRSWYLTENIQRFLPNPAGVQLEDPEFQASNIMHSINGYVFDSLQLSVCLHEVAYWYILSIGAQTDFLSVFFSGYTFKHKMVYEDTLTLFPFSGETVFMSMENPGLWILGCHNSDFRNRGMTALLKVSSCDKNTGDYYEDSYEDISAYLLSKNNAIEPRSFSQNPPVLKRHQREITRTTLQSDQEEIDYDDTISVEMKKEDFDIYDEDENQSPRSFQKKTRHYFIAAVERLWDYGMSSSPHVLRNRAQSGSVPQFKKVVFQEFTDGSFTQPLYRGELNEHLGLLGPYIRAEVEDNIMVTFRNQASRPYSFYSSLISYEEDQRQGAEPRKNFVKPNETKTYFWKVQHHMAPTKDEFDCKAWAYFSDVDLEKDVHSGLIGPLLVCHTNTLNPAHGRQVTVQEFALFFTIFDETKSWYFTENMERNCRGAPTSESATPESGPGSEPATSGSETPGTSESATPESGPGSEPATSGSETPGTSESATPESGPGTSTEPSEGSAPGTSESATPESGPGSPAGSPTSTEEGSPAGSPTSTEEGSPAGSPTSTEEGTSESATPESGPGTSTEPSEGSAPGASSAPCNIQMEDPTFKENYRFHAINGYIMDTLPGLVMAQDQRIRWYLLSMGSNENIHSIHFSGHVFTVRKKEEYKMALYNLYPGVFETVEMLPSKAGIWRVECLIGEHLHAGMSTLFLVYSNKCQTPLGMASGHIRDFQITASGQYGQWAPKLARLHYSGSINAWSTKEPFSWIKVDLLAPMIIHGIKTQGARQKFSSLYISQFIIMYSLDGKKWQTYRGNSTGTLMVFFGNVDSSGIKHNIFNPPIIARYIRLHPTHYSIRSTLRMELMGCDLNSCSMPLGMESKAISDAQITASSYFTNMFATWSPSKARLHLQGRSNAWRPQVNNPKEWLQVDFQKTMKVTGVTTQGVKSLLTSMYVKEFLISSSQDGHQWTLFFQNGKVKVFQGNQDSFTPVVNSLDPPLLTRYLRIHPQSWVHQIALRMEVLGCEAQDLYGAGSPGAETAEQKLISEEDLSPATGHHHHHH

SEQ ID NO: 940 - DNA, 5310 bp, synthetic construct
  misc_feature 1..5310: note = Description of Artificial Sequence: Synthetic polynucleotide
  source 1..5310: mol_type = other DNA
gccaccagaagatactacctgggtgcagtggaactgtcatgggactatatgcaaagtgatctcggtgagctgcctgtggacgcaagatttcctcctagagtgccaaaatcttttccattcggcgcgccaggctccagcccctccgcgagcacgggaaccggaccaggttcgtcaccctcagcatcaacggggacgggaccgggggcgtcaccaggaacgtcctccaccggctcgccgggtgcatcacccggaacgtcatcgaccggatcgccagggagctcgacgccatcaggcgcaacaggatcacctggctcaagccctagcgcgtcaaccggcacgggtccgggtgcctcccctggcacgtccagcaccggatcacccggatcgagcccatccgcctcaaccggaaccggacccggtacaccagggtcgggaacagcctcctcgtcaccaggctcctcaaccccctcgggagccacgggttcgcccggttcgtcaacgccttccggagcaactggtagccccggagcatcgccaggaacttcgagcacggggtcgcccgcctcgagcaacacctcagtcgtgtacaaaaagactctgtttgtagaattcacggatcaccttttcaacatcgctaagccaaggccaccctggatgggtctgctaggtcctaccatccaggctgaggtttatgatacagtggtcattacacttaagaacatggcttcccatcctgtcagtcttcatgctgttggtgtatcctactggaaagcttctgagggagctgaatatgatgatcagaccagtcaaagggagaaagaagatgataaagtcttccctggtggaagccatacatatgtctggcaggtcctgaaagagaatggtccaatggcctctgacccactgtgccttacctactcatatctttctcatgtggacctggtaaaagacttgaattcaggcctcattggagccctactagtatgtagagaagggagtctggccaaggaaaagacacagaccttgcacaaatttatactactttttgctgtatttgatgaagggaaaagttggcactcagaaacaaagaactccttgatgcaggatagggatgctgcatctgctcgggcctggcctaaaatgcacacagtcaatggttatgtaaacaggtctctgccaggtctgattggatgccacaggaaatcagtctattggcatgtgattggaatgggcaccactcctgaagtgcactcaatattcctcgaaggtcacacatttcttgtgaggaaccatcgccaggctagcttggaaatctcgccaataactttccttactgctcaaacactcttgatggaccttggacagtttctactgttttgtcatatctcttcccaccaacatgatggcatggaagcttatgtcaaagtagacagctgtccagaggaaccccaactacgaatgaaaaataatgaagaagcggaagactatgatgatgatcttactgattctgaaatggatgtggtcaggtttgatgatgacaactctccttcctttatccaaattcgctcagttgccaagaagcatcctaaaacttgggtacattacattgctgctgaagaggaggactgggactatgctcccttagtcctcgcccccgatgacagaagttataaaagtcaatatttgaacaatggccctcagcggattggtaggaagtacaaaaaagtccgatttatggcatacacagatgaaacctttaagactcgtgaagctattcagcatgaatcaggaatcttgggacctttactttatggggaagttggagacacactgttgattatatttaagaatcaagcaagcagaccatataacatctaccctcacggaatcactgatgtccgtcctttgtattcaaggagattaccaaaaggtgtaaaacatttgaaggattttccaattctgccaggagaaatattcaaatataaatggacagtgactgtagaagatgggccaactaaatcagatcctcggtgcctgacccgctattactctagtttcgttaatatggagagagatctagcttcaggactcattggccctctcctcatctgctacaaagaatctgtagatcaaagaggaaaccagataatgtcagacaagaggaatgtcatcctgttttctgtatttgatgagaaccgaagctggtacctcacagagaatatacaacgctttctccccaatccagctggagtgcagcttgaggatccagagttccaagcctccaacatcatgcacagcatcaatggctatgtttttgatagtttgcagttgtcagtttgtttgcatgaggtggcatactggtacattctaagcattggagcacagactgacttcctttctgtcttcttctctggatataccttcaaacacaaaatggtctatgaagacacactcaccctattcccattctcaggagaaactgtcttcatgtcgatggaaaacccaggtctatggattctggggtgccacaactcagactttcggaacagaggcatgaccgccttactgaaggtttctagttgtgacaagaacactggtgattattacgaggacagttatgaagatatttcagcatacttgctgagtaaaaacaatgccattgaaccaagaagcttctctcaaaacccaccagtcttgaaacgccatcaacgggaaataactcgtactactcttcagtcagatcaagaggaaatcgattatgatgataccatatcagttgaaatgaagaaggaagattttgacatttatgatgaggatgaaaatcagagcccccgcagctttcaaaagaaaacacgacactattttattgctgcagtggagaggctctgggattatgggatgagtagctccccacatgttctaagaaacagggctcagagtggcagtgtccctcagttcaagaaagttgttttccaggaatttactgatggctcctttactcagcccttataccgtggagaactaaatgaacatttgggactcctggggccatatataagagcagaagttgaagataatatcatggtaactttcagaaatcaggcctctcgtccctattccttctattctagccttatttcttatgaggaagatcagaggcaaggagcagaacctagaaaaaactttgtcaagcctaatgaaaccaaaacttacttttggaaagtgcaacatcatatggcacccactaaagatgagtttgactgcaaagcctgggcttatttctctgatgttgacctggaaaaagatgtgcactcaggcctgattggaccccttctggtctgccacactaacacactgaaccctgctcatgggagacaagtgacagtacaggaatttgctctgtttttcaccatctttgatgagaccaaaagctggtacttcactgaaaatatggaaagaaactgcaggggcgcgccaacgtccgaaagtgctacccctgagtcaggccctggtagtgagcctgccacaagcggaagcgaaactccggggacctcagagtctgccactcccgaatcggggccaggctctgaaccggccacttcagggagcgaaacaccaggaacatcggagagcgctaccccggagagcgggccaggaactagtactgagcctagcgagggaagtgcacctggtacaagcgagtccgccacacccgagtctggccctggctctccagcgggctcacccacgagcactgaagagggctctcccgctggcagcccaacgtcgacagaagaaggatcaccagcaggctcccccacatcaacagaggagggtacatcagaatctgctactcccgagagtggacccggtacctccactgagcccagcgaggggagtgcaccaggtgcctcgagcgctccctgcaatatccagatggaagatcccacttttaaagagaattatcgcttccatgcaatcaatggctacataatggatacactacctggcttagtaatggctcaggatcaaaggattcgatggtatctgctcagcatgggcagcaatgaaaacatccattctattcatttcagtggacatgtgttcactgtacgaaaaaaagaggagtataaaatggcactgtacaatctctatccaggtgtttttgagacagtggaaatgttaccatccaaagctggaatttggcgggtggaatgccttattggcgagcatctacatgctgggatgagcacactttttctggtgtacagcaataagtgtcagactcccctgggaatggcttctggacacattagagattttcagattacagcttcaggacaatatggacagtgggccccaaagctggccagacttcattattccggatcaatcaatgcctggagcaccaaggagcccttttcttggatcaaggtggatctgttggcaccaatgattattcacggcatcaagacccagggtgcccgtcagaagttctccagcctctacatctctcagtttatcatcatgtatagtcttgatgggaagaagtggcagacttatcgaggaaattccactggaaccttaatggtcttctttggcaatgtggattcatctgggataaaacacaatatttttaaccctccaattattgctcgatacatccgtttgcacccaactcattatagcattcgcagcactcttcgcatggagttgatgggctgtgatttaaatagttgcagcatgccattgggaatggagagtaaagcaatatcagatgcacagattactgcttcatcctactttaccaatatgtttgccacctggtctccttcaaaagctcgacttcacctccaagggaggagtaatgcctggagacctcaggtgaataatccaaaagagtggctgcaagtggacttccagaagacaatgaaagtcacaggagtaactactcagggagtaaaatctctgcttaccagcatgtatgtgaaggagttcctcatctccagcagtcaagatggccatcagtggactctcttttttcagaatggcaaagtaaaggtttttcagggaaatcaagactccttcacacctgtggtgaactctctagacccaccgttactgactcgctaccttcgaattcacccccagagttgggtgcaccagattgccctgaggatggaggttctgggctgcgaggcacaggacctctacggcgccggatcacctggggccgaaacggccgaacaaaaactcatctcagaagaggatctgtcacctgcaaccggtcatcatcaccatcaccattga

SEQ ID NO: 941 - protein, 1769 aa, synthetic construct
  REGION 1..1769: note = Description of Artificial Sequence: Synthetic polypeptide
ATRRYYLGAVELSWDYMQSDLGELPVDARFPPRVPKSFPFGAPGSSPSASTGTGPGSSPSASTGTGPGASPGTSSTGSPGASPGTSSTGSPGSSTPSGATGSPGSSPSASTGTGPGASPGTSSTGSPGSSPSASTGTGPGTPGSGTASSSPGSSTPSGATGSPGSSTPSGATGSPGASPGTSSTGSPASSNTSVVYKKTLFVEFTDHLFNIAKPRPPWMGLLGPTIQAEVYDTVVITLKNMASHPVSLHAVGVSYWKASEGAEYDDQTSQREKEDDKVFPGGSHTYVWQVLKENGPMASDPLCLTYSYLSHVDLVKDLNSGLIGALLVCREGSLAKEKTQTLHKFILLFAVFDEGKSWHSETKNSLMQDRDAASARAWPKMHTVNGYVNRSLPGLIGCHRKSVYWHVIGMGTTPEVHSIFLEGHTFLVRNHRQASLEISPITFLTAQTLLMDLGQFLLFCHISSHQHDGMEAYVKVDSCPEEPQLRMKNNEEAEDYDDDLTDSEMDVVRFDDDNSPSFIQIRSVAKKHPKTWVHYIAAEEEDWDYAPLVLAPDDRSYKSQYLNNGPQRIGRKYKKVRFMAYTDETFKTREAIQHESGILGPLLYGEVGDTLLIIFKNQASRPYNIYPHGITDVRPLYSRRLPKGVKHLKDFPILPGEIFKYKWTVTVEDGPTKSDPRCLTRYYSSFVNMERDLASGLIGPLLICYKESVDQRGNQIMSDKRNVILFSVFDENRSWYLTENIQRFLPNPAGVQLEDPEFQASNIMHSINGYVFDSLQLSVCLHEVAYWYILSIGAQTDFLSVFFSGYTFKHKMVYEDTLTLFPFSGETVFMSMENPGLWILGCHNSDFRNRGMTALLKVSSCDKNTGDYYEDSYEDISAYLLSKNNAIEPRSFSQNPPVLKRHQREITRTTLQSDQEEIDYDDTISVEMKKEDFDIYDEDENQSPRSFQKKTRHYFIAAVERLWDYGMSSSPHVLRNRAQSGSVPQFKKVVFQEFTDGSFTQPLYRGELNEHLGLLGPYIRAEVEDNIMVTFRNQASRPYSFYSSLISYEEDQRQGAEPRKNFVKPNETKTYFWKVQHHMAPTKDEFDCKAWAYFSDVDLEKDVHSGLIGPLLVCHTNTLNPAHGRQVTVQEFALFFTIFDETKSWYFTENMERNCRGAPGTPGSGTASSSPGASPGTSSTGSPGASPGTSSTGSPGASPGTSSTGSPGSSPSASTGTGPGTPGSGTASSSPGASPGTSSTGSPGASPGTSSTGSPGASPGTSSTGSPGSSTPSGATGSPGSSTPSGATGSPGASPGTSSTGSPASSAPCNIQMEDPTFKENYRFHAINGYIMDTLPGLVMAQDQRIRWYLLSMGSNENIHSIHFSGHVFTVRKKEEYKMALYNLYPGVFETVEMLPSKAGIWRVECLIGEHLHAGMSTLFLVYSNKCQTPLGMASGHIRDFQITASGQYGQWAPKLARLHYSGSINAWSTKEPFSWIKVDLLAPMIIHGIKTQGARQKFSSLYISQFIIMYSLDGKKWQTYRGNSTGTLMVFFGNVDSSGIKHNIFNPPIIARYIRLHPTHYSIRSTLRMELMGCDLNSCSMPLGMESKAISDAQITASSYFTNMFATWSPSKARLHLQGRSNAWRPQVNNPKEWLQVDFQKTMKVTGVTTQGVKSLLTSMYVKEFLISSSQDGHQWTLFFQNGKVKVFQGNQDSFTPVVNSLDPPLLTRYLRIHPQSWVHQIALRMEVLGCEAQDLYGAGSPGAETAEQKLISEEDLSPATGHHHHHH

SEQ ID NO: 942 - DNA, 5310 bp, synthetic construct
  misc_feature 1..5310: note = Description of Artificial Sequence: Synthetic polynucleotide
  source 1..5310: mol_type = other DNA
gccaccagaagatactacctgggtgcagtggaactgtcatgggactatatgcaaagtgatctcggtgagctgcctgtggacgcaagatttcctcctagagtgccaaaatcttttccattcggcgcgccaggctccagcccctccgcgagcacgggaaccggaccaggttcgtcaccctcagcatcaacggggacgggaccgggggcgtcaccaggaacgtcctccaccggctcgccgggtgcatcacccggaacgtcatcgaccggatcgccagggagctcgacgccatcaggcgcaacaggatcacctggctcaagccctagcgcgtcaaccggcacgggtccgggtgcctcccctggcacgtccagcaccggatcacccggatcgagcccatccgcctcaaccggaaccggacccggtacaccagggtcgggaacagcctcctcgtcaccaggctcctcaaccccctcgggagccacgggttcgcccggttcgtcaacgccttccggagcaactggtagccccggagcatcgccaggaacttcgagcacggggtcgcccgcctcgagcaacacctcagtcgtgtacaaaaagactctgtttgtagaattcacggatcaccttttcaacatcgctaagccaaggccaccctggatgggtctgctaggtcctaccatccaggctgaggtttatgatacagtggtcattacacttaagaacatggcttcccatcctgtcagtcttcatgctgttggtgtatcctactggaaagcttctgagggagctgaatatgatgatcagaccagtcaaagggagaaagaagatgataaagtcttccctggtggaagccatacatatgtctggcaggtcctgaaagagaatggtccaatggcctctgacccactgtgccttacctactcatatctttctcatgtggacctggtaaaagacttgaattcaggcctcattggagccctactagtatgtagagaagggagtctggccaaggaaaagacacagaccttgcacaaatttatactactttttgctgtatttgatgaagggaaaagttggcactcagaaacaaagaactccttgatgcaggatagggatgctgcatctgctcgggcctggcctaaaatgcacacagtcaatggttatgtaaacaggtctctgccaggtctgattggatgccacaggaaatcagtctattggcatgtgattggaatgggcaccactcctgaagtgcactcaatattcctcgaaggtcacacatttcttgtgaggaaccatcgccaggctagcttggaaatctcgccaataactttccttactgctcaaacactcttgatggaccttggacagtttctactgttttgtcatatctcttcccaccaacatgatggcatggaagcttatgtcaaagtagacagctgtccagaggaaccccaactacgaatgaaaaataatgaagaagcggaagactatgatgatgatcttactgattctgaaatggatgtggtcaggtttgatgatgacaactctccttcctttatccaaattcgctcagttgccaagaagcatcctaaaacttgggtacattacattgctgctgaagaggaggactgggactatgctcccttagtcctcgcccccgatgacagaagttataaaagtcaatatttgaacaatggccctcagcggattggtaggaagtacaaaaaagtccgatttatggcatacacagatgaaacctttaagactcgtgaagctattcagcatgaatcaggaatcttgggacctttactttatggggaagttggagacacactgttgattatatttaagaatcaagcaagcagaccatataacatctaccctcacggaatcactgatgtccgtcctttgtattcaaggagattaccaaaaggtgtaaaacatttgaaggattttccaattctgccaggagaaatattcaaatataaatggacagtgactgtagaagatgggccaactaaatcagatcctcggtgcctgacccgctattactctagtttcgttaatatggagagagatctagcttcaggactcattggccctctcctcatctgctacaaagaatctgtagatcaaagaggaaaccagataatgtcagacaagaggaatgtcatcctgttttctgtatttgatgagaaccgaagctggtacctcacagagaatatacaacgctttctccccaatccagctggagtgcagcttgaggatccagagttccaagcctccaacatcatgcacagcatcaatggctatgtttttgatagtttgcagttgtcagtttgtttgcatgaggtggcatactggtacattctaagcattggagcacagactgacttcctttctgtcttcttctctggatataccttcaaacacaaaatggtctatgaagacacactcaccctattcccattctcaggagaaactgtcttcatgtcgatggaaaacccaggtctatggattctggggtgccacaactcagactttcggaacagaggcatgaccgccttactgaaggtttctagttgtgacaagaacactggtgattattacgaggacagttatgaagatatttcagcatacttgctgagtaaaaacaatgccattgaaccaagaagcttctctcaaaacccaccagtcttgaaacgccatcaacgggaaataactcgtactactcttcagtcagatcaagaggaaatcgattatgatgataccatatcagttgaaatgaagaaggaagattttgacatttatgatgaggatgaaaatcagagcccccgcagctttcaaaagaaaacacgacactattttattgctgcagtggagaggctctgggattatgggatgagtagctccccacatgttctaagaaacagggctcagagtggcagtgtccctcagttcaagaaagttgttttccaggaatttactgatggctcctttactcagcccttataccgtggagaactaaatgaacatttgggactcctggggccatatataagagcagaagttgaagataatatcatggtaactttcagaaatcaggcctctcgtccctattccttctattctagccttatttcttatgaggaagatcagaggcaaggagcagaacctagaaaaaactttgtcaagcctaatgaaaccaaaacttacttttggaaagtgcaacatcatatggcacccactaaagatgagtttgactgcaaagcctgggcttatttctctgatgttgacctggaaaaagatgtgcactcaggcctgattggaccccttctggtctgccacactaacacactgaaccctgctcatgggagacaagtgacagtacaggaatttgctctgtttttcaccatctttgatgagaccaaaagctggtacttcactgaaaatatggaaagaaactgcaggggcgcgccaggtacacccggatcgggtacagcgtcatcgagccccggtgcgtcacctggtacgtcgagcacggggtcgccaggggcgtcccctgggacgtcctcaacaggctcgcccggtgcgtcacccggcacgtcgtccacgggttcacctggtagctccccttccgcgtccactggcaccgggcctggaactccggggagcggcacagcgagctcgtcgccgggagcatcgcctgggacatcgagcaccgggtcgccaggagcatcgcccggaacatccagcacaggaagccccggcgcgtcgcccgggacatcaagcacaggttccccgggatcgagcacgccgtccggagccactggatcaccagggagctcgacaccttccggcgcaacgggatcgcccggagccagcccgggtacgtcaagcactggctcccctgcctcgagcgctccctgcaatatccagatggaagatcccacttttaaagagaattatcgcttccatgcaatcaatggctacataatggatacactacctggcttagtaatggctcaggatcaaaggattcgatggtatctgctcagcatgggcagcaatgaaaacatccattctattcatttcagtggacatgtgttcactgtacgaaaaaaagaggagtataaaatggcactgtacaatctctatccaggtgtttttgagacagtggaaatgttaccatccaaagctggaatttggcgggtggaatgccttattggcgagcatctacatgctgggatgagcacactttttctggtgtacagcaataagtgtcagactcccctgggaatggcttctggacacattagagattttcagattacagcttcaggacaatatggacagtgggccccaaagctggccagacttcattattccggatcaatcaatgcctggagcaccaaggagcccttttcttggatcaaggtggatctgttggcaccaatgattattcacggcatcaagacccagggtgcccgtcagaagttctccagcctctacatctctcagtttatcatcatgtatagtcttgatgggaagaagtggcagacttatcgaggaaattccactggaaccttaatggtcttctttggcaatgtggattcatctgggataaaacacaatatttttaaccctccaattattgctcgatacatccgtttgcacccaactcattatagcattcgcagcactcttcgcatggagttgatgggctgtgatttaaatagttgcagcatgccattgggaatggagagtaaagcaatatcagatgcacagattactgcttcatcctactttaccaatatgtttgccacctggtctccttcaaaagctcgacttcacctccaagggaggagtaatgcctggagacctcaggtgaataatccaaaagagtggctgcaagtggacttccagaagacaatgaaagtcacaggagtaactactcagggagtaaaatctctgcttaccagcatgtatgtgaaggagttcctcatctccagcagtcaagatggccatcagtggactctcttttttcagaatggcaaagtaaaggtttttcagggaaatcaagactccttcacacctgtggtgaactctctagacccaccgttactgactcgctaccttcgaattcacccccagagttgggtgcaccagattgccctgaggatggaggttctgggctgcgaggcacaggacctctacggcgccggatcacctggggccgaaacggccgaacaaaaactcatctcagaagaggatctgtcacctgcaaccggtcatcatcaccatcaccattga

SEQ ID NO: 943 - protein, 1769 aa, synthetic construct
  REGION 1..1769: note = Description of Artificial Sequence: Synthetic polypeptide
ATRRYYLGAVELSWDYMQSDLGELPVGAPGSSPSASTGTGPGSSPSASTGTGPGASPGTSSTGSPGASPGTSSTGSPGSSTPSGATGSPGSSPSASTGTGPGASPGTSSTGSPGSSPSASTGTGPGTPGSGTASSSPGSSTPSGATGSPGSSTPSGATGSPGASPGTSSTGSPASSDARFPPRVPKSFPFNTSVVYKKTLFVEFTDHLFNIAKPRPPWMGLLGPTIQAEVYDTVVITLKNMASHPVSLHAVGVSYWKASEGAEYDDQTSQREKEDDKVFPGGSHTYVWQVLKENGPMASDPLCLTYSYLSHVDLVKDLNSGLIGALLVCREGSLAKEKTQTLHKFILLFAVFDEGKSWHSETKNSLMQDRDAASARAWPKMHTVNGYVNRSLPGLIGCHRKSVYWHVIGMGTTPEVHSIFLEGHTFLVRNHRQASLEISPITFLTAQTLLMDLGQFLLFCHISSHQHDGMEAYVKVDSCPEEPQLRMKNNEEAEDYDDDLTDSEMDVVRFDDDNSPSFIQIRSVAKKHPKTWVHYIAAEEEDWDYAPLVLAPDDRSYKSQYLNNGPQRIGRKYKKVRFMAYTDETFKTREAIQHESGILGPLLYGEVGDTLLIIFKNQASRPYNIYPHGITDVRPLYSRRLPKGVKHLKDFPILPGEIFKYKWTVTVEDGPTKSDPRCLTRYYSSFVNMERDLASGLIGPLLICYKESVDQRGNQIMSDKRNVILFSVFDENRSWYLTENIQRFLPNPAGVQLEDPEFQASNIMHSINGYVFDSLQLSVCLHEVAYWYILSIGAQTDFLSVFFSGYTFKHKMVYEDTLTLFPFSGETVFMSMENPGLWILGCHNSDFRNRGMTALLKVSSCDKNTGDYYEDSYEDISAYLLSKNNAIEPRSFSQNPPVLKRHQREITRTTLQSDQEEIDYDDTISVEMKKEDFDIYDEDENQSPRSFQKKTRHYFIAAVERLWDYGMSSSPHVLRNRAQSGSVPQFKKVVFQEFTDGSFTQPLYRGELNEHLGLLGPYIRAEVEDNIMVTFRNQASRPYSFYSSLISYEEDQRQGAEPRKNFVKPNETKTYFWKVQHHMAPTKDEFDCKAWAYFSDVDLEKDVHSGLIGPLLVCHTNTLNPAHGRQVTVQEFALFFTIFDETKSWYFTENMERNCRGAPGTPGSGTASSSPGASPGTSSTGSPGASPGTSSTGSPGASPGTSSTGSPGSSPSASTGTGPGTPGSGTASSSPGASPGTSSTGSPGASPGTSSTGSPGASPGTSSTGSPGSSTPSGATGSPGSSTPSGATGSPGASPGTSSTGSPASSAPCNIQMEDPTFKENYRFHAINGYIMDTLPGLVMAQDQRIRWYLLSMGSNENIHSIHFSGHVFTVRKKEEYKMALYNLYPGVFETVEMLPSKAGIWRVECLIGEHLHAGMSTLFLVYSNKCQTPLGMASGHIRDFQITASGQYGQWAPKLARLHYSGSINAWSTKEPFSWIKVDLLAPMIIHGIKTQGARQKFSSLYISQFIIMYSLDGKKWQTYRGNSTGTLMVFFGNVDSSGIKHNIFNPPIIARYIRLHPTHYSIRSTLRMELMGCDLNSCSMPLGMESKAISDAQITASSYFTNMFATWSPSKARLHLQGRSNAWRPQVNNPKEWLQVDFQKTMKVTGVTTQGVKSLLTSMYVKEFLISSSQDGHQWTLFFQNGKVKVFQGNQDSFTPVVNSLDPPLLTRYLRIHPQSWVHQIALRMEVLGCEAQDLYGAGSPGAETAEQKLISEEDLSPATGHHHHHH

SEQ ID NO: 944 - DNA, 5310 bp, synthetic construct
  misc_feature 1..5310: note = Description of Artificial Sequence: Synthetic polynucleotide
  source 1..5310: mol_type = other DNA
gccaccagaagatactacctgggtgcagtggaactgtcatgggactatatgcaaagtgatctcggtgagctgcctgtgggcgcgccaggctccagcccctccgcgagcacgggaaccggaccaggttcgtcaccctcagcatcaacggggacgggaccgggggcgtcaccaggaacgtcctccaccggctcgccgggtgcatcacccggaacgtcatcgaccggatcgccagggagctcgacgccatcaggcgcaacaggatcacctggctcaagccctagcgcgtcaaccggcacgggtccgggtgcctcccctggcacgtccagcaccggatcacccggatcgagcccatccgcctcaaccggaaccggacccggtacaccagggtcgggaacagcctcctcgtcaccaggctcctcaaccccctcgggagccacgggttcgcccggttcgtcaacgccttccggagcaactggtagccccggagcatcgccaggaacttcgagcacggggtcgcccgcctcgagcgacgcaagatttcctcctagagtgccaaaatcttttccattcaacacctcagtcgtgtacaaaaagactctgtttgtagaattcacggatcaccttttcaacatcgctaagccaaggccaccctggatgggtctgctaggtcctaccatccaggctgaggtttatgatacagtggtcattacacttaagaacatggcttcccatcctgtcagtcttcatgctgttggtgtatcctactggaaagcttctgagggagctgaatatgatgatcagaccagtcaaagggagaaagaagatgataaagtcttccctggtggaagccatacatatgtctggcaggtcctgaaagagaatggtccaatggcctctgacccactgtgccttacctactcatatctttctcatgtggacctggtaaaagacttgaattcaggcctcattggagccctactagtatgtagagaagggagtctggccaaggaaaagacacagaccttgcacaaatttatactactttttgctgtatttgatgaagggaaaagttggcactcagaaacaaagaactccttgatgcaggatagggatgctgcatctgctcgggcctggcctaaaatgcacacagtcaatggttatgtaaacaggtctctgccaggtctgattggatgccacaggaaatcagtctattggcatgtgattggaatgggcaccactcctgaagtgcactcaatattcctcgaaggtcacacatttcttgtgaggaaccatcgccaggctagcttggaaatctcgccaataactttccttactgctcaaacactcttgatggaccttggacagtttctactgttttgtcatatctcttcccaccaacatgatggcatggaagcttatgtcaaagtagacagctgtccagaggaaccccaactacgaatgaaaaataatgaagaagcggaagactatgatgatgatcttactgattctgaaatggatgtggtcaggtttgatgatgacaactctccttcctttatccaaattcgctcagttgccaagaagcatcctaaaacttgggtacattacattgctgctgaagaggaggactgggactatgctcccttagtcctcgcccccgatgacagaagttataaaagtcaatatttgaacaatggccctcagcggattggtaggaagtacaaaaaagtccgatttatggcatacacagatgaaacctttaagactcgtgaagctattcagcatgaatcaggaatcttgggacctttactttatggggaagttggagacacactgttgattatatttaagaatcaagcaagcagaccatataacatctaccctcacggaatcactgatgtccgtcctttgtattcaaggagattaccaaaaggtgtaaaacatttgaaggattttccaattctgccaggagaaatattcaaatataaatggacagtgactgtagaagatgggccaactaaatcagatcctcggtgcctgacccgctattactctagtttcgttaatatggagagagatctagcttcaggactcattggccctctcctcatctgctacaaagaatctgtagatcaaagaggaaaccagataatgtcagacaagaggaatgtcatcctgttttctgtatttgatgagaaccgaagctggtacctcacagagaatatacaacgctttctccccaatccagctggagtgcagcttgaggatccagagttccaagcctccaacatcatgcacagcatcaatggctatgtttttgatagtttgcagttgtcagtttgtttgcatgaggtggcatactggtacattctaagcattggagcacagactgacttcctttctgtcttcttctctggatataccttcaaacacaaaatggtctatgaagacacactcaccctattcccattctcaggagaaactgtcttcatgtcgatggaaaacccaggtctatggattctggggtgccacaactcagactttcggaacagaggcatgaccgccttactgaaggtttctagttgtgacaagaacactggtgattattacgaggacagttatgaagatatttcagcatacttgctgagtaaaaacaatgccattgaaccaagaagcttctctcaaaacccaccagtcttgaaacgccatcaacgggaaataactcgtactactcttcagtcagatcaagaggaaatcgattatgatgataccatatcagttgaaatgaagaaggaagattttgacatttatgatgaggatgaaaatcagagcccccgcagctttcaaaagaaaacacgacactattttattgctgcagtggagaggctctgggattatgggatgagtagctccccacatgttctaagaaacagggctcagagtggcagtgtccctcagttcaagaaagttgttttccaggaatttactgatggctcctttactcagcccttataccgtggagaactaaatgaacatttgggactcctggggccatatataagagcagaagttgaagataatatcatggtaactttcagaaatcaggcctctcgtccctattccttctattctagccttatttcttatgaggaagatcagaggcaaggagcagaacctagaaaaaactttgtcaagcctaatgaaaccaaaacttacttttggaaagtgcaacatcatatggcacccactaaagatgagtttgactgcaaagcctgggcttatttctctgatgttgacctggaaaaagatgtgcactcaggcctgattggaccccttctggtctgccacactaacacactgaaccctgctcatgggagacaagtgacagtacaggaatttgctctgtttttcaccatctttgatgagaccaaaagctggtacttcactgaaaatatggaaagaaactgcaggggcgcgccaggtacacccggatcgggtacagcgtcatcgagccccggtgcgtcacctggtacgtcgagcacggggtcgccaggggcgtcccctgggacgtcctcaacaggctcgcccggtgcgtcacccggcacgtcgtccacgggttcacctggtagctccccttccgcgtccactggcaccgggcctggaactccggggagcggcacagcgagctcgtcgccgggagcatcgcctgggacatcgagcaccgggtcgccaggagcatcgcccggaacatccagcacaggaagccccggcgcgtcgcccgggacatcaagcacaggttccccgggatcgagcacgccgtccggagccactggatcaccagggagctcgacaccttccggcgcaacgggatcgcccggagccagcccgggtacgtcaagcactggctcccctgcctcgagcgctccctgcaatatccagatggaagatcccacttttaaagagaattatcgcttccatgcaatcaatggctacataatggatacactacctggcttagtaatggctcaggatcaaaggattcgatggtatctgctcagcatgggcagcaatgaaaacatccattctattcatttcagtggacatgtgttcactgtacgaaaaaaagaggagtataaaatggcactgtacaatctctatccaggtgtttttgagacagtggaaatgttaccatccaaagctggaatttggcgggtggaatgccttattggcgagcatctacatgctgggatgagcacactttttctggtgtacagcaataagtgtcagactcccctgggaatggcttctggacacattagagattttcagattacagcttcaggacaatatggacagtgggccccaaagctggccagacttcattattccggatcaatcaatgcctggagcaccaaggagcccttttcttggatcaaggtggatctgttggcaccaatgattattcacggcatcaagacccagggtgcccgtcagaagttctccagcctctacatctctcagtttatcatcatgtatagtcttgatgggaagaagtggcagacttatcgaggaaattccactggaaccttaatggtcttctttggcaatgtggattcatctgggataaaacacaatatttttaaccctccaattattgctcgatacatccgtttgcacccaactcattatagcattcgcagcactcttcgcatggagttgatgggctgtgatttaaatagttgcagcatgccattgggaatggagagtaaagcaatatcagatgcacagattactgcttcatcctactttaccaatatgtttgccacctggtctccttcaaaagctcgacttcacctccaagggaggagtaatgcctggagacctcaggtgaataatccaaaagagtggctgcaagtggacttccagaagacaatgaaagtcacaggagtaactactcagggagtaaaatctctgcttaccagcatgtatgtgaaggagttcctcatctccagcagtcaagatggccatcagtggactctcttttttcagaatggcaaagtaaaggtttttcagggaaatcaagactccttcacacctgtggtgaactctctagacccaccgttactgactcgctaccttcgaattcacccccagagttgggtgcaccagattgccctgaggatggaggttctgggctgcgaggcacaggacctctacggcgccggatcacctggggccgaaacggccgaacaaaaactcatctcagaagaggatctgtcacctgcaaccggtcatcatcaccatcaccattga

SEQ ID NO: 945 - protein, 1769 aa, synthetic construct
  REGION 1..1769: note = Description of Artificial Sequence: Synthetic polypeptide
ATRRYYLGAVELSWDYMQGAPGSSPSASTGTGPGSSPSASTGTGPGASPGTSSTGSPGASPGTSSTGSPGSSTPSGATGSPGSSPSASTGTGPGASPGTSSTGSPGSSPSASTGTGPGTPGSGTASSSPGSSTPSGATGSPGSSTPSGATGSPGASPGTSSTGSPASSSDLGELPVDARFPPRVPKSFPFNTSVVYKKTLFVEFTDHLFNIAKPRPPWMGLLGPTIQAEVYDTVVITLKNMASHPVSLHAVGVSYWKASEGAEYDDQTSQREKEDDKVFPGGSHTYVWQVLKENGPMASDPLCLTYSYLSHVDLVKDLNSGLIGALLVCREGSLAKEKTQTLHKFILLFAVFDEGKSWHSETKNSLMQDRDAASARAWPKMHTVNGYVNRSLPGLIGCHRKSVYWHVIGMGTTPEVHSIFLEGHTFLVRNHRQASLEISPITFLTAQTLLMDLGQFLLFCHISSHQHDGMEAYVKVDSCPEEPQLRMKNNEEAEDYDDDLTDSEMDVVRFDDDNSPSFIQIRSVAKKHPKTWVHYIAAEEEDWDYAPLVLAPDDRSYKSQYLNNGPQRIGRKYKKVRFMAYTDETFKTREAIQHESGILGPLLYGEVGDTLLIIFKNQASRPYNIYPHGITDVRPLYSRRLPKGVKHLKDFPILPGEIFKYKWTVTVEDGPTKSDPRCLTRYYSSFVNMERDLASGLIGPLLICYKESVDQRGNQIMSDKRNVILFSVFDENRSWYLTENIQRFLPNPAGVQLEDPEFQASNIMHSINGYVFDSLQLSVCLHEVAYWYILSIGAQTDFLSVFFSGYTFKHKMVYEDTLTLFPFSGETVFMSMENPGLWILGCHNSDFRNRGMTALLKVSSCDKNTGDYYEDSYEDISAYLLSKNNAIEPRSFSQNPPVLKRHQREITRTTLQSDQEEIDYDDTISVEMKKEDFDIYDEDENQSPRSFQKKTRHYFIAAVERLWDYGMSSSPHVLRNRAQSGSVPQFKKVVFQEFTDGSFTQPLYRGELNEHLGLLGPYIRAEVEDNIMVTFRNQASRPYSFYSSLISYEEDQRQGAEPRKNFVKPNETKTYFWKVQHHMAPTKDEFDCKAWAYFSDVDLEKDVHSGLIGPLLVCHTNTLNPAHGRQVTVQEFALFFTIFDETKSWYFTENMERNCRAPCNIGAPGTPGSGTASSSPGASPGTSSTGSPGASPGTSSTGSPGASPGTSSTGSPGSSPSASTGTGPGTPGSGTASSSPGASPGTSSTGSPGASPGTSSTGSPGASPGTSSTGSPGSSTPSGATGSPGSSTPSGATGSPGASPGTSSTGSPASSQMEDPTFKENYRFHAINGYIMDTLPGLVMAQDQRIRWYLLSMGSNENIHSIHFSGHVFTVRKKEEYKMALYNLYPGVFETVEMLPSKAGIWRVECLIGEHLHAGMSTLFLVYSNKCQTPLGMASGHIRDFQITASGQYGQWAPKLARLHYSGSINAWSTKEPFSWIKVDLLAPMIIHGIKTQGARQKFSSLYISQFIIMYSLDGKKWQTYRGNSTGTLMVFFGNVDSSGIKHNIFNPPIIARYIRLHPTHYSIRSTLRMELMGCDLNSCSMPLGMESKAISDAQITASSYFTNMFATWSPSKARLHLQGRSNAWRPQVNNPKEWLQVDFQKTMKVTGVTTQGVKSLLTSMYVKEFLISSSQDGHQWTLFFQNGKVKVFQGNQDSFTPVVNSLDPPLLTRYLRIHPQSWVHQIALRMEVLGCEAQDLYGAGSPGAETAEQKLISEEDLSPATGHHHHHH

SEQ ID NO: 946 - DNA, 5310 bp, synthetic construct
  misc_feature 1..5310: note = Description of Artificial Sequence: Synthetic polynucleotide
  source 1..5310: mol_type = other DNA
gccaccagaagatactacctgggtgcagtggaactgtcatgggactatatgcaaggcgcgccaggctccagcccctccgcgagcacgggaaccggaccaggttcgtcaccctcagcatcaacggggacgggaccgggggcgtcaccaggaacgtcctccaccggctcgccgggtgcatcacccggaacgtcatcgaccggatcgccagggagctcgacgccatcaggcgcaacaggatcacctggctcaagccctagcgcgtcaaccggcacgggtccgggtgcctcccctggcacgtccagcaccggatcacccggatcgagcccatccgcctcaaccggaaccggacccggtacaccagggtcgggaacagcctcctcgtcaccaggctcctcaaccccctcgggagccacgggttcgcccggttcgtcaacgccttccggagcaactggtagccccggagcatcgccaggaacttcgagcacggggtcgcccgcctcgagcagtgatctcggtgagctgcctgtggacgcaagatttcctcctagagtgccaaaatcttttccattcaacacctcagtcgtgtacaaaaagactctgtttgtagaattcacggatcaccttttcaacatcgctaagccaaggccaccctggatgggtctgctaggtcctaccatccaggctgaggtttatgatacagtggtcattacacttaagaacatggcttcccatcctgtcagtcttcatgctgttggtgtatcctactggaaagcttctgagggagctgaatatgatgatcagaccagtcaaagggagaaagaagatgataaagtcttccctggtggaagccatacatatgtctggcaggtcctgaaagagaatggtccaatggcctctgacccactgtgccttacctactcatatctttctcatgtggacctggtaaaagacttgaattcaggcctcattggagccctactagtatgtagagaagggagtctggccaaggaaaagacacagaccttgcacaaatttatactactttttgctgtatttgatgaagggaaaagttggcactcagaaacaaagaactccttgatgcaggatagggatgctgcatctgctcgggcctggcctaaaatgcacacagtcaatggttatgtaaacaggtctctgccaggtctgattggatgccacaggaaatcagtctattggcatgtgattggaatgggcaccactcctgaagtgcactcaatattcctcgaaggtcacacatttcttgtgaggaaccatcgccaggctagcttggaaatctcgccaataactttccttactgctcaaacactcttgatggaccttggacagtttctactgttttgtcatatctcttcccaccaacatgatggcatggaagcttatgtcaaagtagacagctgtccagaggaaccccaactacgaatgaaaaataatgaagaagcggaagactatgatgatgatcttactgattctgaaatggatgtggtcaggtttgatgatgacaactctccttcctttatccaaattcgctcagttgccaagaagcatcctaaaacttgggtacattacattgctgctgaagaggaggactgggactatgctcccttagtcctcgcccccgatgacagaagttataaaagtcaatatttgaacaatggccctcagcggattggtaggaagtacaaaaaagtccgatttatggcatacacagatgaaacctttaagactcgtgaagctattcagcatgaatcaggaatcttgggacctttactttatggggaagttggagacacactgttgattatatttaagaatcaagcaagcagaccatataacatctaccctcacggaatcactgatgtccgtcctttgtattcaaggagattaccaaaaggtgtaaaacatttgaaggattttccaattctgccaggagaaatattcaaatataaatggacagtgactgtagaagatgggccaactaaatcagatcctcggtgcctgacccgctattactctagtttcgttaatatggagagagatctagcttcaggactcattggccctctcctcatctgctacaaagaatctgtagatcaaagaggaaaccagataatgtcagacaagaggaatgtcatcctgttttctgtatttgatgagaaccgaagctggtacctcacagagaatatacaacgctttctccccaatccagctggagtgcagcttgaggatccagagttccaagcctccaacatcatgcacagcatcaatggctatgtttttgatagtttgcagttgtcagtttgtttgcatgaggtggcatactggtacattctaagcattggagcacagactgacttcctttctgtcttcttctctggatataccttcaaacacaaaatggtctatgaagacacactcaccctattcccattctcaggagaaactgtcttcatgtcgatggaaaacccaggtctatggattctggggtgccacaactcagactttcggaacagaggcatgaccgccttactgaaggtttctagttgtgacaagaacactggtgattattacgaggacagttatgaagatatttcagcatacttgctgagtaaaaacaatgccattgaaccaagaagcttctctcaaaacccaccagtcttgaaacgccatcaacgggaaataactcgtactactcttcagtcagatcaagaggaaatcgattatgatgataccatatcagttgaaatgaagaaggaagattttgacatttatgatgaggatgaaaatcagagcccccgcagctttcaaaagaaaacacgacactattttattgctgcagtggagaggctctgggattatgggatgagtagctccccacatgttctaagaaacagggctcagagtggcagtgtccctcagttcaagaaagttgttttccaggaatttactgatggctcctttactcagcccttataccgtggagaactaaatgaacatttgggactcctggggccatatataagagcagaagttgaagataatatcatggtaactttcagaaatcaggcctctcgtccctattccttctattctagccttatttcttatgaggaagatcagaggcaaggagcagaacctagaaaaaactttgtcaagcctaatgaaaccaaaacttacttttggaaagtgcaacatcatatggcacccactaaagatgagtttgactgcaaagcctgggcttatttctctgatgttgacctggaaaaagatgtgcactcaggcctgattggaccccttctggtctgccacactaacacactgaaccctgctcatgggagacaagtgacagtacaggaatttgctctgtttttcaccatctttgatgagaccaaaagctggtacttcactgaaaatatggaaagaaactgcagggctccctgcaatatcggcgcgccaggtacacccggatcgggtacagcgtcatcgagccccggtgcgtcacctggtacgtcgagcacggggtcgccaggggcgtcccctgggacgtcctcaacaggctcgcccggtgcgtcacccggcacgtcgtccacgggttcacctggtagctccccttccgcgtccactggcaccgggcctggaactccggggagcggcacagcgagctcgtcgccgggagcatcgcctgggacatcgagcaccgggtcgccaggagcatcgcccggaacatccagcacaggaagccccggcgcgtcgcccgggacatcaagcacaggttccccgggatcgagcacgccgtccggagccactggatcaccagggagctcgacaccttccggcgcaacgggatcgcccggagccagcccgggtacgtcaagcactggctcccctgcctcgagccagatggaagatcccacttttaaagagaattatcgcttccatgcaatcaatggctacataatggatacactacctggcttagtaatggctcaggatcaaaggattcgatggtatctgctcagcatgggcagcaatgaaaacatccattctattcatttcagtggacatgtgttcactgtacgaaaaaaagaggagtataaaatggcactgtacaatctctatccaggtgtttttgagacagtggaaatgttaccatccaaagctggaatttggcgggtggaatgccttattggcgagcatctacatgctgggatgagcacactttttctggtgtacagcaataagtgtcagactcccctgggaatggcttctggacacattagagattttcagattacagcttcaggacaatatggacagtgggccccaaagctggccagacttcattattccggatcaatcaatgcctggagcaccaaggagcccttttcttggatcaaggtggatctgttggcaccaatgattattcacggcatcaagacccagggtgcccgtcagaagttctccagcctctacatctctcagtttatcatcatgtatagtcttgatgggaagaagtggcagacttatcgaggaaattccactggaaccttaatggtcttctttggcaatgtggattcatctgggataaaacacaatatttttaaccctccaattattgctcgatacatccgtttgcacccaactcattatagcattcgcagcactcttcgcatggagttgatgggctgtgatttaaatagttgcagcatgccattgggaatggagagtaaagcaatatcagatgcacagattactgcttcatcctactttaccaatatgtttgccacctggtctccttcaaaagctcgacttcacctccaagggaggagtaatgcctggagacctcaggtgaataatccaaaagagtggctgcaagtggacttccagaagacaatgaaagtcacaggagtaactactcagggagtaaaatctctgcttaccagcatgtatgtgaaggagttcctcatctccagcagtcaagatggccatcagtggactctcttttttcagaatggcaaagtaaaggtttttcagggaaatcaagactccttcacacctgtggtgaactctctagacccaccgttactgactcgctaccttcgaattcacccccagagttgggtgcaccagattgccctgaggatggaggttctgggctgcgaggcacaggacctctacggcgccggatcacctggggccgaaacggccgaacaaaaactcatctcagaagaggatctgtcacctgcaaccggtcatcatcaccatcaccattga

SEQ ID NO: 947 - protein, 1769 aa, synthetic construct
  REGION 1..1769: note = Description of Artificial Sequence: Synthetic polypeptide
ATRRYYLGAVELSWDYMQSDLGELPVDARFPPRVPKSFPFGAPGSSPSASTGTGPGSSPSASTGTGPGASPGTSSTGSPGASPGTSSTGSPGSSTPSGATGSPGSSPSASTGTGPGASPGTSSTGSPGSSPSASTGTGPGTPGSGTASSSPGSSTPSGATGSPGSSTPSGATGSPGASPGTSSTGSPASSNTSVVYKKTLFVEFTDHLFNIAKPRPPWMGLLGPTIQAEVYDTVVITLKNMASHPVSLHAVGVSYWKASEGAEYDDQTSQREKEDDKVFPGGSHTYVWQVLKENGPMASDPLCLTYSYLSHVDLVKDLNSGLIGALLVCREGSLAKEKTQTLHKFILLFAVFDEGKSWHSETKNSLMQDRDAASARAWPKMHTVNGYVNRSLPGLIGCHRKSVYWHVIGMGTTPEVHSIFLEGHTFLVRNHRQASLEISPITFLTAQTLLMDLGQFLLFCHISSHQHDGMEAYVKVDSCPEEPQLRMKNNEEAEDYDDDLTDSEMDVVRFDDDNSPSFIQIRSVAKKHPKTWVHYIAAEEEDWDYAPLVLAPDDRSYKSQYLNNGPQRIGRKYKKVRFMAYTDETFKTREAIQHESGILGPLLYGEVGDTLLIIFKNQASRPYNIYPHGITDVRPLYSRRLPKGVKHLKDFPILPGEIFKYKWTVTVEDGPTKSDPRCLTRYYSSFVNMERDLASGLIGPLLICYKESVDQRGNQIMSDKRNVILFSVFDENRSWYLTENIQRFLPNPAGVQLEDPEFQASNIMHSINGYVFDSLQLSVCLHEVAYWYILSIGAQTDFLSVFFSGYTFKHKMVYEDTLTLFPFSGETVFMSMENPGLWILGCHNSDFRNRGMTALLKVSSCDKNTGDYYEDSYEDISAYLLSKNNAIEPRSFSQNPPVLKRHQREITRTTLQSDQEEIDYDDTISVEMKKEDFDIYDEDENQSPRSFQKKTRHYFIAAVERLWDYGMSSSPHVLRNRAQSGSVPQFKKVVFQEFTDGSFTQPLYRGELNEHLGLLGPYIRAEVEDNIMVTFRNQASRPYSFYSSLISYEEDQRQGAEPRKNFVKPNETKTYFWKVQHHMAPTKDEFDCKAWAYFSDVDLEKDVHSGLIGPLLVCHTNTLNPAHGRQVTVQEFALFFTIFDETKSWYFTENMERNCRAPCNIGAPGTPGSGTASSSPGASPGTSSTGSPGASPGTSSTGSPGASPGTSSTGSPGSSPSASTGTGPGTPGSGTASSSPGASPGTSSTGSPGASPGTSSTGSPGASPGTSSTGSPGSSTPSGATGSPGSSTPSGATGSPGASPGTSSTGSPASSQMEDPTFKENYRFHAINGYIMDTLPGLVMAQDQRIRWYLLSMGSNENIHSIHFSGHVFTVRKKEEYKMALYNLYPGVFETVEMLPSKAGIWRVECLIGEHLHAGMSTLFLVYSNKCQTPLGMASGHIRDFQITASGQYGQWAPKLARLHYSGSINAWSTKEPFSWIKVDLLAPMIIHGIKTQGARQKFSSLYISQFIIMYSLDGKKWQTYRGNSTGTLMVFFGNVDSSGIKHNIFNPPIIARYIRLHPTHYSIRSTLRMELMGCDLNSCSMPLGMESKAISDAQITASSYFTNMFATWSPSKARLHLQGRSNAWRPQVNNPKEWLQVDFQKTMKVTGVTTQGVKSLLTSMYVKEFLISSSQDGHQWTLFFQNGKVKVFQGNQDSFTPVVNSLDPPLLTRYLRIHPQSWVHQIALRMEVLGCEAQDLYGAGSPGAETAEQKLISEEDLSPATGHHHHHH

SEQ ID NO: 948 - DNA, 5310 bp, synthetic construct
  misc_feature 1..5310: note = Description of Artificial Sequence: Synthetic polynucleotide
  source 1..5310: mol_type = other DNA
gccaccagaagatactacctgggtgcagtggaactgtcatgggactatatgcaaagtgatctcggtgagctgcctgtggacgcaagatttcctcctagagtgccaaaatcttttccattcggcgcgccaggctccagcccctccgcgagcacgggaaccggaccaggttcgtcaccctcagcatcaacggggacgggaccgggggcgtcaccaggaacgtcctccaccggctcgccgggtgcatcacccggaacgtcatcgaccggatcgccagggagctcgacgccatcaggcgcaacaggatcacctggctcaagccctagcgcgtcaaccggcacgggtccgggtgcctcccctggcacgtccagcaccggatcacccggatcgagcccatccgcctcaaccggaaccggacccggtacaccagggtcgggaacagcctcctcgtcaccaggctcctcaaccccctcgggagccacgggttcgcccggttcgtcaacgccttccggagcaactggtagccccggagcatcgccaggaacttcgagcacggggtcgcccgcctcgagcaacacctcagtcgtgtacaaaaagactctgtttgtagaattcacggatcaccttttcaacatcgctaagccaaggccaccctggatgggtctgctaggtcctaccatccaggctgaggtttatgatacagtggtcattacacttaagaacatggcttcccatcctgtcagtcttcatgctgttggtgtatcctactggaaagcttctgagggagctgaatatgatgatcagaccagtcaaagggagaaagaagatgataaagtcttccctggtggaagccatacatatgtctggcaggtcctgaaagagaatggtccaatggcctctgacccactgtgccttacctactcatatctttctcatgtggacctggtaaaagacttgaattcaggcctcattggagccctactagtatgtagagaagggagtctggccaaggaaaagacacagaccttgcacaaatttatactactttttgctgtatttgatgaagggaaaagttggcactcagaaacaaagaactccttgatgcaggatagggatgctgcatctgctcgggcctggcctaaaatgcacacagtcaatggttatgtaaacaggtctctgccaggtctgattggatgccacaggaaatcagtctattggcatgtgattggaatgggcaccactcctgaagtgcactcaatattcctcgaaggtcacacatttcttgtgaggaaccatcgccaggctagcttggaaatctcgccaataactttccttactgctcaaacactcttgatggaccttggacagtttctactgttttgtcatatctcttcccaccaacatgatggcatggaagcttatgtcaaagtagacagctgtccagaggaaccccaactacgaatgaaaaataatgaagaagcggaagactatgatgatgatcttactgattctgaaatggatgtggtcaggtttgatgatgacaactctccttcctttatccaaattcgctcagttgccaagaagcatcctaaaacttgggtacattacattgctgctgaagaggaggactgggactatgctcccttagtcctcgcccccgatgacagaagttataaaagtcaatatttgaacaatggccctcagcggattggtaggaagtacaaaaaagtccgatttatggcatacacagatgaaacctttaagactcgtgaagctattcagcatgaatcaggaatcttgggacctttactttatggggaagttggagacacactgttgattatatttaagaatcaagcaagcagaccatataacatctaccctcacggaatcactgatgtccgtcctttgtattcaaggagattaccaaaaggtgtaaaacatttgaaggattttccaattctgccaggagaaatattcaaatataaatggacagtgactgtagaagatgggccaactaaatcagatcctcggtgcctgacccgctattactctagtttcgttaatatggagagagatctagcttcaggactcattggccctctcctcatctgctacaaagaatctgtagatcaaagaggaaaccagataatgtcagacaagaggaatgtcatcctgttttctgtatttgatgagaaccgaagctggtacctcacagagaatatacaacgctttctccccaatccagctggagtgcagcttgaggatccagagttccaagcctccaacatcatgcacagcatcaatggctatgtttttgatagtttgcagttgtcagtttgtttgcatgaggtggcatactggtacattctaagcattggagcacagactgacttcctttctgtcttcttctctggatataccttcaaacacaaaatggtctatgaagacacactcaccctattcccattctcaggagaaactgtcttcatgtcgatggaaaacccaggtctatggattctggggtgccacaactcagactttcggaacagaggcatgaccgccttactgaaggtttctagttgtgacaagaacactggtgattattacgaggacagttatgaagatatttcagcatacttgctgagtaaaaacaatgccattgaaccaagaagcttctctcaaaacccaccagtcttgaaacgccatcaacgggaaataactcgtactactcttcagtcagatcaagaggaaatcgattatgatgataccatatcagttgaaatgaagaaggaagattttgacatttatgatgaggatgaaaatcagagcccccgcagctttcaaaagaaaacacgacactattttattgctgcagtggagaggctctgggattatgggatgagtagctccccacatgttctaagaaacagggctcagagtggcagtgtccctcagttcaagaaagttgttttccaggaatttactgatggctcctttactcagcccttataccgtggagaactaaatgaacatttgggactcctggggccatatataagagcagaagttgaagataatatcatggtaactttcagaaatcaggcctctcgtccctattccttctattctagccttatttcttatgaggaagatcagaggcaaggagcagaacctagaaaaaactttgtcaagcctaatgaaaccaaaacttacttttggaaagtgcaacatcatatggcacccactaaagatgagtttgactgcaaagcctgggcttatttctctgatgttgacctggaaaaagatgtgcactcaggcctgattggaccccttctggtctgccacactaacacactgaaccctgctcatgggagacaagtgacagtacaggaatttgctctgtttttcaccatctttgatgagaccaaaagctggtacttcactgaaaatatggaaagaaactgcagggctccctgcaatatcggcgcgccaggtacacccggatcgggtacagcgtcatcgagccccggtgcgtcacctggtacgtcgagcacggggtcgccaggggcgtcccctgggacgtcctcaacaggctcgcccggtgcgtcacccggcacgtcgtccacgggttcacctggtagctccccttccgcgtccactggcaccgggcctggaactccggggagcggcacagcgagctcgtcgccgggagcatcgcctgggacatcgagcaccgggtcgccaggagcatcgcccggaacatccagcacaggaagccccggcgcgtcgcccgggacatcaagcacaggttccccgggatcgagcacgccgtccggagccactggatcaccagggagctcgacaccttccggcgcaacgggatcgcccggagccagcccgggtacgtcaagcactggctcccctgcctcgagccagatggaagatcccacttttaaagagaattatcgcttccatgcaatcaatggctacataatggatacactacctggcttagtaatggctcaggatcaaaggattcgatggtatctgctcagcatgggcagcaatgaaaacatccattctattcatttcagtggacatgtgttcactgtacgaaaaaaagaggagtataaaatggcactgtacaatctctatccaggtgtttttgagacagtggaaatgttaccatccaaagctggaatttggcgggtggaatgccttattggcgagcatctacatgctgggatgagcacactttttctggtgtacagcaataagtgtcagactcccctgggaatggcttctggacacattagagattttcagattacagcttcaggacaatatggacagtgggccccaaagctggccagacttcattattccggatcaatcaatgcctggagcaccaaggagcccttttcttggatcaaggtggatctgttggcaccaatgattattcacggcatcaagacccagggtgcccgtcagaagttctccagcctctacatctctcagtttatcatcatgtatagtcttgatgggaagaagtggcagacttatcgaggaaattccactggaaccttaatggtcttctttggcaatgtggattcatctgggataaaacacaatatttttaaccctccaattattgctcgatacatccgtttgcacccaactcattatagcattcgcagcactcttcgcatggagttgatgggctgtgatttaaatagttgcagcatgccattgggaatggagagtaaagcaatatcagatgcacagattactgcttcatcctactttaccaatatgtttgccacctggtctccttcaaaagctcgacttcacctccaagggaggagtaatgcctggagacctcaggtgaataatccaaaagagtggctgcaagtggacttccagaagacaatgaaagtcacaggagtaactactcagggagtaaaatctctgcttaccagcatgtatgtgaaggagttcctcatctccagcagtcaagatggccatcagtggactctcttttttcagaatggcaaagtaaaggtttttcagggaaatcaagactccttcacacctgtggtgaactctctagacccaccgttactgactcgctaccttcgaattcacccccagagttgggtgcaccagattgccctgaggatggaggttctgggctgcgaggcacaggacctctacggcgccggatcacctggggccgaaacggccgaacaaaaactcatctcagaagaggatctgtcacctgcaaccggtcatcatcaccatcaccattga

SEQ ID NO: 949 - protein, 1769 aa, synthetic construct
  REGION 1..1769: note = Description of Artificial Sequence: Synthetic polypeptide
ATRRYYLGAVELSWDYMQSDLGELPVGAPGSSPSASTGTGPGSSPSASTGTGPGASPGTSSTGSPGASPGTSSTGSPGSSTPSGATGSPGSSPSASTGTGPGASPGTSSTGSPGSSPSASTGTGPGTPGSGTASSSPGSSTPSGATGSPGSSTPSGATGSPGASPGTSSTGSPASSDARFPPRVPKSFPFNTSVVYKKTLFVEFTDHLFNIAKPRPPWMGLLGPTIQAEVYDTVVITLKNMASHPVSLHAVGVSYWKASEGAEYDDQTSQREKEDDKVFPGGSHTYVWQVLKENGPMASDPLCLTYSYLSHVDLVKDLNSGLIGALLVCREGSLAKEKTQTLHKFILLFAVFDEGKSWHSETKNSLMQDRDAASARAWPKMHTVNGYVNRSLPGLIGCHRKSVYWHVIGMGTTPEVHSIFLEGHTFLVRNHRQASLEISPITFLTAQTLLMDLGQFLLFCHISSHQHDGMEAYVKVDSCPEEPQLRMKNNEEAEDYDDDLTDSEMDVVRFDDDNSPSFIQIRSVAKKHPKTWVHYIAAEEEDWDYAPLVLAPDDRSYKSQYLNNGPQRIGRKYKKVRFMAYTDETFKTREAIQHESGILGPLLYGEVGDTLLIIFKNQASRPYNIYPHGITDVRPLYSRRLPKGVKHLKDFPILPGEIFKYKWTVTVEDGPTKSDPRCLTRYYSSFVNMERDLASGLIGPLLICYKESVDQRGNQIMSDKRNVILFSVFDENRSWYLTENIQRFLPNPAGVQLEDPEFQASNIMHSINGYVFDSLQLSVCLHEVAYWYILSIGAQTDFLSVFFSGYTFKHKMVYEDTLTLFPFSGETVFMSMENPGLWILGCHNSDFRNRGMTALLKVSSCDKNTGDYYEDSYEDISAYLLSKNNAIEPRSFSQNPPVLKRHQREITRTTLQSDQEEIDYDDTISVEMKKEDFDIYDEDENQSPRSFQKKTRHYFIAAVERLWDYGMSSSPHVLRNRAQSGSVPQFKKVVFQEFTDGSFTQPLYRGELNEHLGLLGPYIRAEVEDNIMVTFRNQASRPYSFYSSLISYEEDQRQGAEPRKNFVKPNETKTYFWKVQHHMAPTKDEFDCKAWAYFSDVDLEKDVHSGLIGPLLVCHTNTLNPAHGRQVTVQEFALFFTIFDETKSWYFTENMERNCRAPCNIGAPGTPGSGTASSSPGASPGTSSTGSPGASPGTSSTGSPGASPGTSSTGSPGSSPSASTGTGPGTPGSGTASSSPGASPGTSSTGSPGASPGTSSTGSPGASPGTSSTGSPGSSTPSGATGSPGSSTPSGATGSPGASPGTSSTGSPASSQMEDPTFKENYRFHAINGYIMDTLPGLVMAQDQRIRWYLLSMGSNENIHSIHFSGHVFTVRKKEEYKMALYNLYPGVFETVEMLPSKAGIWRVECLIGEHLHAGMSTLFLVYSNKCQTPLGMASGHIRDFQITASGQYGQWAPKLARLHYSGSINAWSTKEPFSWIKVDLLAPMIIHGIKTQGARQKFSSLYISQFIIMYSLDGKKWQTYRGNSTGTLMVFFGNVDSSGIKHNIFNPPIIARYIRLHPTHYSIRSTLRMELMGCDLNSCSMPLGMESKAISDAQITASSYFTNMFATWSPSKARLHLQGRSNAWRPQVNNPKEWLQVDFQKTMKVTGVTTQGVKSLLTSMYVKEFLISSSQDGHQWTLFFQNGKVKVFQGNQDSFTPVVNSLDPPLLTRYLRIHPQSWVHQIALRMEVLGCEAQDLYGAGSPGAETAEQKLISEEDLSPATGHHHHHH

SEQ ID NO: 950 - DNA, 5310 bp, synthetic construct
  misc_feature 1..5310: note = Description of Artificial Sequence: Synthetic polynucleotide
  source 1..5310: mol_type = other DNA
gccaccagaagatactacctgggtgcagtggaactgtcatgggactatatgcaaagtgatctcggtgagctgcctgtgggcgcgccaggctccagcccctccgcgagcacgggaaccggaccaggttcgtcaccctcagcatcaacggggacgggaccgggggcgtcaccaggaacgtcctccaccggctcgccgggtgcatcacccggaacgtcatcgaccggatcgccagggagctcgacgccatcaggcgcaacaggatcacctggctcaagccctagcgcgtcaaccggcacgggtccgggtgcctcccctggcacgtccagcaccggatcacccggatcgagcccatccgcctcaaccggaaccggacccggtacaccagggtcgggaacagcctcctcgtcaccaggctcctcaaccccctcgggagccacgggttcgcccggttcgtcaacgccttccggagcaactggtagccccggagcatcgccaggaacttcgagcacggggtcgcccgcctcgagcgacgcaagatttcctcctagagtgccaaaatcttttccattcaacacctcagtcgtgtacaaaaagactctgtttgtagaattcacggatcaccttttcaacatcgctaagccaaggccaccctggatgggtctgctaggtcctaccatccaggctgaggtttatgatacagtggtcattacacttaagaacatggcttcccatcctgtcagtcttcatgctgttggtgtatcctactggaaagcttctgagggagctgaatatgatgatcagaccagtcaaagggagaaagaagatgataaagtcttccctggtggaagccatacatatgtctggcaggtcctgaaagagaatggtccaatggcctctgacccactgtgccttacctactcatatctttctcatgtggacctggtaaaagacttgaattcaggcctcattggagccctactagtatgtagagaagggagtctggccaaggaaaagacacagaccttgcacaaatttatactactttttgctgtatttgatgaagggaaaagttggcactcagaaacaaagaactccttgatgcaggatagggatgctgcatctgctcgggcctggcctaaaatgcacacagtcaatggttatgtaaacaggtctctgccaggtctgattggatgccacaggaaatcagtctattggcatgtgattggaatgggcaccactcctgaagtgcactcaatattcctcgaaggtcacacatttcttgtgaggaaccatcgccaggctagcttggaaatctcgccaataactttccttactgctcaaacactcttgatggaccttggacagtttctactgttttgtcatatctcttcccaccaacatgatggcatggaagcttatgtcaaagtagacagctgtccagaggaaccccaactacgaatgaaaaataatgaagaagcggaagactatgatgatgatcttactgattctgaaatggatgtggtcaggtttgatgatgacaactctccttcctttatccaaattcgctcagttgccaagaagcatcctaaaacttgggtacattacattgctgctgaagaggaggactgggactatgctcccttagtcctcgcccccgatgacagaagttataaaagtcaatatttgaacaatggccctcagcggattggtaggaagtacaaaaaagtccgatttatggcatacacagatgaaacctttaagactcgtgaagctattcagcatgaatcaggaatcttgggacctttactttatggggaagttggagacacactgttgattatatttaagaatcaagcaagcagaccatataacatctaccctcacggaatcactgatgtccgtcctttgtattcaaggagattaccaaaaggtgtaaaacatttgaaggattttccaattctgccaggagaaatattcaaatataaatggacagtgactgtagaagatgggccaactaaatcagatcctcggtgcctgacccgctattactctagtttcgttaatatggagagagatctagcttcaggactcattggccctctcctcatctgctacaaagaatctgtagatcaaagaggaaaccagataatgtcagacaagaggaatgtcatcctgttttctgtatttgatgagaaccgaagctggtacctcacagagaatatacaacgctttctccccaatccagctggagtgcagcttgaggatccagagttccaagcctccaacatcatgcacagcatcaatggctatgtttttgatagtttgcagttgtcagtttgtttgcatgaggtggcatactggtacattctaagcattggagcacagactgacttcctttctgtcttcttctctggatataccttcaaacacaaaatggtctatgaagacacactcaccctattcccattctcaggagaaactgtcttcatgtcgatggaaaacccaggtctatggattctggggtgccacaactcagactttcggaacagaggcatgaccgccttactgaaggtttctagttgtgacaagaacactggtgattattacgaggacagttatgaagatatttcagcatacttgctgagtaaaaacaatgccattgaaccaagaagcttctctcaaaacccaccagtcttgaaacgccatcaacgggaaataactcgtactactcttcagtcagatcaagaggaaatcgattatgatgataccatatcagttgaaatgaagaaggaagattttgacatttatgatgaggatgaaaatcagagcccccgcagctttcaaaagaaaacacgacactattttattgctgcagtggagaggctctgggattatgggatgagtagctccccacatgttctaagaaacagggctcagagtggcagtgtccctcagttcaagaaagttgttttccaggaatttactgatggctcctttactcagcccttataccgtggagaactaaatgaacatttgggactcctggggccatatataagagcagaagttgaagataatatcatggtaactttcagaaatcaggcctctcgtccctattccttctattctagccttatttcttatgaggaagatcagaggcaaggagcagaacctagaaaaaactttgtcaagcctaatgaaaccaaaacttacttttggaaagtgcaacatcatatggcacccactaaagatgagtttgactgcaaagcctgggcttatttctctgatgttgacctggaaaaagatgtgcactcaggcctgattggaccccttctggtctgccacactaacacactgaaccctgctcatgggagacaagtgacagtacaggaatttgctctgtttttcaccatctttgatgagaccaaaagctggtacttcactgaaaatatggaaagaaactgcagggctccctgcaatatcggcgcgccaggtacacccggatcgggtacagcgtcatcgagccccggtgcgtcacctggtacgtcgagcacggggtcgccaggggcgtcccctgggacgtcctcaacaggctcgcccggtgcgtcacccggcacgtcgtccacgggttcacctggtagctccccttccgcgtccactggcaccgggcctggaactccggggagcggcacagcgagctcgtcgccgggagcatcgcctgggacatcgagcaccgggtcgccaggagcatcgcccggaacatccagcacaggaagccccggcgcgtcgcccgggacatcaagcacaggttccccgggatcgagcacgccgtccggagccactggatcaccagggagctcgacaccttccggcgcaacgggatcgcccggagccagcccgggtacgtcaagcactggctcccctgcctcgagccagatggaagatcccacttttaaagagaattatcgcttccatgcaatcaatggctacataatggatacactacctggcttagtaatggctcaggatcaaaggattcgatggtatctgctcagcatgggcagcaatgaaaacatccattctattcatttcagtggacatgtgttcactgtacgaaaaaaagaggagtataaaatggcactgtacaatctctatccaggtgtttttgagacagtggaaatgttaccatccaaagctggaatttggcgggtggaatgccttattggcgagcatctacatgctgggatgagcacactttttctggtgtacagcaataagtgtcagactcccctgggaatggcttctggacacattagagattttcagattacagcttcaggacaatatggacagtgggccccaaagctggccagacttcattattccggatcaatcaatgcctggagcaccaaggagcccttttcttggatcaaggtggatctgttggcaccaatgattattcacggcatcaagacccagggtgcccgtcagaagttctccagcctctacatctctcagtttatcatcatgtatagtcttgatgggaagaagtggcagacttatcgaggaaattccactggaaccttaatggtcttctttggcaatgtggattcatctgggataaaacacaatatttttaaccctccaattattgctcgatacatccgtttgcacccaactcattatagcattcgcagcactcttcgcatggagttgatgggctgtgatttaaatagttgcagcatgccattgggaatggagagtaaagcaatatcagatgcacagattactgcttcatcctactttaccaatatgtttgccacctggtctccttcaaaagctcgacttcacctccaagggaggagtaatgcctggagacctcaggtgaataatccaaaagagtggctgcaagtggacttccagaagacaatgaaagtcacaggagtaactactcagggagtaaaatctctgcttaccagcatgtatgtgaaggagttcctcatctccagcagtcaagatggccatcagtggactctcttttttcagaatggcaaagtaaaggtttttcagggaaatcaagactccttcacacctgtggtgaactctctagacccaccgttactgactcgctaccttcgaattcacccccagagttgggtgcaccagattgccctgaggatggaggttctgggctgcgaggcacaggacctctacggcgccggatcacctggggccgaaacggccgaacaaaaactcatctcagaagaggatctgtcacctgcaaccggtcatcatcaccatcaccattga

SEQ ID NO: 951 - protein, 1769 aa, synthetic construct
  REGION 1..1769: note = Description of Artificial Sequence: Synthetic polypeptide
ATRRYYLGAVELSWDYMQSDLGELPVGAPTSESATPESGPGSEPATSGSETPGTSESATPESGPGSEPATSGSETPGTSESATPESGPGTSTEPSEGSAPGSPAGSPTSTEEGTSESATPESGPGSEPATSGSETPGTSESATPESGPGSPAGSPTSTEEGSPAGSPTSTEEGASSDARFPPRVPKSFPFNTSVVYKKTLFVEFTDHLFNIAKPRPPWMGLLGPTIQAEVYDTVVITLKNMASHPVSLHAVGVSYWKASEGAEYDDQTSQREKEDDKVFPGGSHTYVWQVLKENGPMASDPLCLTYSYLSHVDLVKDLNSGLIGALLVCREGSLAKEKTQTLHKFILLFAVFDEGKSWHSETKNSLMQDRDAASARAWPKMHTVNGYVNRSLPGLIGCHRKSVYWHVIGMGTTPEVHSIFLEGHTFLVRNHRQASLEISPITFLTAQTLLMDLGQFLLFCHISSHQHDGMEAYVKVDSCPEEPQLRMKNNEEAEDYDDDLTDSEMDVVRFDDDNSPSFIQIRSVAKKHPKTWVHYIAAEEEDWDYAPLVLAPDDRSYKSQYLNNGPQRIGRKYKKVRFMAYTDETFKTREAIQHESGILGPLLYGEVGDTLLIIFKNQASRPYNIYPHGITDVRPLYSRRLPKGVKHLKDFPILPGEIFKYKWTVTVEDGPTKSDPRCLTRYYSSFVNMERDLASGLIGPLLICYKESVDQRGNQIMSDKRNVILFSVFDENRSWYLTENIQRFLPNPAGVQLEDPEFQASNIMHSINGYVFDSLQLSVCLHEVAYWYILSIGAQTDFLSVFFSGYTFKHKMVYEDTLTLFPFSGETVFMSMENPGLWILGCHNSDFRNRGMTALLKVSSCDKNTGDYYEDSYEDISAYLLSKNNAIEPRSFSQNPPVLKRHQREITRTTLQSDQEEIDYDDTISVEMKKEDFDIYDEDENQSPRSFQKKTRHYFIAAVERLWDYGMSSSPHVLRNRAQSGSVPQFKKVVFQEFTDGSFTQPLYRGELNEHLGLLGPYIRAEVEDNIMVTFRNQASRPYSFYSSLISYEEDQRQGAEPRKNFVKPNETKTYFWKVQHHMAPTKDEFDCKAWAYFSDVDLEKDVHSGLIGPLLVCHTNTLNPAHGRQVTVQEFALFFTIFDETKSWYFTENMERNCRAPCNIGAPGTPGSGTASSSPGASPGTSSTGSPGASPGTSSTGSPGASPGTSSTGSPGSSPSASTGTGPGTPGSGTASSSPGASPGTSSTGSPGASPGTSSTGSPGASPGTSSTGSPGSSTPSGATGSPGSSTPSGATGSPGASPGTSSTGSPASSQMEDPTFKENYRFHAINGYIMDTLPGLVMAQDQRIRWYLLSMGSNENIHSIHFSGHVFTVRKKEEYKMALYNLYPGVFETVEMLPSKAGIWRVECLIGEHLHAGMSTLFLVYSNKCQTPLGMASGHIRDFQITASGQYGQWAPKLARLHYSGSINAWSTKEPFSWIKVDLLAPMIIHGIKTQGARQKFSSLYISQFIIMYSLDGKKWQTYRGNSTGTLMVFFGNVDSSGIKHNIFNPPIIARYIRLHPTHYSIRSTLRMELMGCDLNSCSMPLGMESKAISDAQITASSYFTNMFATWSPSKARLHLQGRSNAWRPQVNNPKEWLQVDFQKTMKVTGVTTQGVKSLLTSMYVKEFLISSSQDGHQWTLFFQNGKVKVFQGNQDSFTPVVNSLDPPLLTRYLRIHPQSWVHQIALRMEVLGCEAQDLYGAGSPGAETAEQKLISEEDLSPATGHHHHHH

SEQ ID NO: 952 - DNA, 5310 bp, synthetic construct
  misc_feature 1..5310: note = Description of Artificial Sequence: Synthetic polynucleotide
  source 1..5310: mol_type = other DNA
gccaccagaagatactacctgggtgcagtggaactgtcatgggactatatgcaaagtgatctcggtgagctgcctgtgggcgcgccaacatcagagagcgccacccctgaaagtggtcccgggagcgagccagccacatctgggtcggaaacgccaggcacaagtgagtctgcaactcccgagtccggacctggctccgagcctgccactagcggctccgagactccgggaacttccgagagcgctacaccagaaagcggacccggaaccagtaccgaacctagcgagggctctgctccgggcagcccagccggctctcctacatccacggaggagggcacttccgaatccgccaccccggagtcagggccaggatctgaacccgctacctcaggcagtgagacgccaggaacgagcgagtccgctacaccggagagtgggccagggagccctgctggatctcctacgtccactgaggaagggtcaccagcgggctcgcccaccagcactgaagaaggtgcctcgagcgacgcaagatttcctcctagagtgccaaaatcttttccattcaacacctcagtcgtgtacaaaaagactctgtttgtagaattcacggatcaccttttcaacatcgctaagccaaggccaccctggatgggtctgctaggtcctaccatccaggctgaggtttatgatacagtggtcattacacttaagaacatggcttcccatcctgtcagtcttcatgctgttggtgtatcctactggaaagcttctgagggagctgaatatgatgatcagaccagtcaaagggagaaagaagatgataaagtcttccctggtggaagccatacatatgtctggcaggtcctgaaagagaatggtccaatggcctctgacccactgtgccttacctactcatatctttctcatgtggacctggtaaaagacttgaattcaggcctcattggagccctactagtatgtagagaagggagtctggccaaggaaaagacacagaccttgcacaaatttatactactttttgctgtatttgatgaagggaaaagttggcactcagaaacaaagaactccttgatgcaggatagggatgctgcatctgctcgggcctggcctaaaatgcacacagtcaatggttatgtaaacaggtctctgccaggtctgattggatgccacaggaaatcagtctattggcatgtgattggaatgggcaccactcctgaagtgcactcaatattcctcgaaggtcacacatttcttgtgaggaaccatcgccaggctagcttggaaatctcgccaataactttccttactgctcaaacactcttgatggaccttggacagtttctactgttttgtcatatctcttcccaccaacatgatggcatggaagcttatgtcaaagtagacagctgtccagaggaaccccaactacgaatgaaaaataatgaagaagcggaagactatgatgatgatcttactgattctgaaatggatgtggtcaggtttgatgatgacaactctccttcctttatccaaattcgctcagttgccaagaagcatcctaaaacttgggtacattacattgctgctgaagaggaggactgggactatgctcccttagtcctcgcccccgatgacagaagttataaaagtcaatatttgaacaatggccctcagcggattggtaggaagtacaaaaaagtccgatttatggcatacacagatgaaacctttaagactcgtgaagctattcagcatgaatcaggaatcttgggacctttactttatggggaagttggagacacactgttgattatatttaagaatcaagcaagcagaccatataacatctaccctcacggaatcactgatgtccgtcctttgtattcaaggagattaccaaaaggtgtaaaacatttgaaggattttccaattctgccaggagaaatattcaaatataaatggacagtgactgtagaagatgggccaactaaatcagatcctcggtgcctgacccgctattactctagtttcgttaatatggagagagatctagcttcaggactcattggccctctcctcatctgctacaaagaatctgtagatcaaagaggaaaccagataatgtcagacaagaggaatgtcatcctgttttctgtatttgatgagaaccgaagctggtacctcacagagaatatacaacgctttctccccaatccagctggagtgcagcttgaggatccagagttccaagcctccaacatcatgcacagcatcaatggctatgtttttgatagtttgcagttgtcagtttgtttgcatgaggtggcatactggtacattctaagcattggagcacagactgacttcctttctgtcttcttctctggatataccttcaaacacaaaatggtctatgaagacacactcaccctattcccattctcaggagaaactgtcttcatgtcgatggaaaacccaggtctatggattctggggtgccacaactcagactttcggaacagaggcatgaccgccttactgaaggtttctagttgtgacaagaacactggtgattattacgaggacagttatgaagatatttcagcatacttgctgagtaaaaacaatgccattgaaccaagaagcttctctcaaaacccaccagtcttgaaacgccatcaacgggaaataactcgtactactcttcagtcagatcaagaggaaatcgattatgatgataccatatcagttgaaatgaagaaggaagattttgacatttatgatgaggatgaaaatcagagcccccgcagctttcaaaagaaaacacgacactattttattgctgcagtggagaggctctgggattatgggatgagtagctccccacatgttctaagaaacagggctcagagtggcagtgtccctcagttcaagaaagttgttttccaggaatttactgatggctcctttactcagcccttataccgtggagaactaaatgaacatttgggactcctggggccatatataagagcagaagttgaagataatatcatggtaactttcagaaatcaggcctctcgtccctattccttctattctagccttatttcttatgaggaagatcagaggcaaggagcagaacctagaaaaaactttgtcaagcctaatgaaaccaaaacttacttttggaaagtgcaacatcatatggcacccactaaagatgagtttgactgcaaagcctgggcttatttctctgatgttgacctggaaaaagatgtgcactcaggcctgattggaccccttctggtctgccacactaacacactgaaccctgctcatgggagacaagtgacagtacaggaatttgctctgtttttcaccatctttgatgagaccaaaagctggtacttcactgaaaatatggaaagaaactgcagggctccctgcaatatcggcgcgccaggtacacccggatcgggtacagcgtcatcgagccccggtgcgtcacctggtacgtcgagcacggggtcgccaggggcgtcccctgggacgtcctcaacaggctcgcccggtgcgtcacccggcacgtcgtccacgggttcacctggtagctccccttccgcgtccactggcaccgggcctggaactccggggagcggcacagcgagctcgtcgccgggagcatcgcctgggacatcgagcaccgggtcgccaggagcatcgcccggaacatccagcacaggaagccccggcgcgtcgcccgggacatcaagcacaggttccccgggatcgagcacgccgtccggagccactggatcaccagggagctcgacaccttccggcgcaacgggatcgcccggagccagcccgggtacgtcaagcactggctcccctgcctcgagccagatggaagatcccacttttaaagagaattatcgcttccatgcaatcaatggctacataatggatacactacctggcttagtaatggctcaggatcaaaggattcgatggtatctgctcagcatgggcagcaatgaaaacatccattctattcatttcagtggacatgtgttcactgtacgaaaaaaagaggagtataaaatggcactgtacaatctctatccaggtgtttttgagacagtggaaatgttaccatccaaagctggaatttggcgggtggaatgccttattggcgagcatctacatgctgggatgagcacactttttctggtgtacagcaataagtgtcagactcccctgggaatggcttctggacacattagagattttcagattacagcttcaggacaatatggacagtgggccccaaagctggccagacttcattattccggatcaatcaatgcctggagcaccaaggagcccttttcttggatcaaggtggatctgttggcaccaatgattattcacggcatcaagacccagggtgcccgtcagaagttctccagcctctacatctctcagtttatcatcatgtatagtcttgatgggaagaagtggcagacttatcgaggaaattccactggaaccttaatggtcttctttggcaatgtggattcatctgggataaaacacaatatttttaaccctccaattattgctcgatacatccgtttgcacccaactcattatagcattcgcagcactcttcgcatggagttgatgggctgtgatttaaatagttgcagcatgccattgggaatggagagtaaagcaatatcagatgcacagattactgcttcatcctactttaccaatatgtttgccacctggtctccttcaaaagctcgacttcacctccaagggaggagtaatgcctggagacctcaggtgaataatccaaaagagtggctgcaagtggacttccagaagacaatgaaagtcacaggagtaactactcagggagtaaaatctctgcttaccagcatgtatgtgaaggagttcctcatctccagcagtcaagatggccatcagtggactctcttttttcagaatggcaaagtaaaggtttttcagggaaatcaagactccttcacacctgtggtgaactctctagacccaccgttactgactcgctaccttcgaattcacccccagagttgggtgcaccagattgccctgaggatggaggttctgggctgcgaggcacaggacctctacggcgccggatcacctggggccgaaacggccgaacaaaaactcatctcagaagaggatctgtcacctgcaaccggtcatcatcaccatcaccattga

SEQ ID NO: 953 - protein, 1769 aa, synthetic construct
  REGION 1..1769: note = Description of Artificial Sequence: Synthetic polypeptide
ATRRYYLGAVELSWDYMQSDLGELPVDARFPPRVPKSFPFGAPTSESATPESGPGSEPATSGSETPGTSESATPESGPGSEPATSGSETPGTSESATPESGPGTSTEPSEGSAPGSPAGSPTSTEEGTSESATPESGPGSEPATSGSETPGTSESATPESGPGSPAGSPTSTEEGSPAGSPTSTEEGASSNTSVVYKKTLFVEFTDHLFNIAKPRPPWMGLLGPTIQAEVYDTVVITLKNMASHPVSLHAVGVSYWKASEGAEYDDQTSQREKEDDKVFPGGSHTYVWQVLKENGPMASDPLCLTYSYLSHVDLVKDLNSGLIGALLVCREGSLAKEKTQTLHKFILLFAVFDEGKSWHSETKNSLMQDRDAASARAWPKMHTVNGYVNRSLPGLIGCHRKSVYWHVIGMGTTPEVHSIFLEGHTFLVRNHRQASLEISPITFLTAQTLLMDLGQFLLFCHISSHQHDGMEAYVKVDSCPEEPQLRMKNNEEAEDYDDDLTDSEMDVVRFDDDNSPSFIQIRSVAKKHPKTWVHYIAAEEEDWDYAPLVLAPDDRSYKSQYLNNGPQRIGRKYKKVRFMAYTDETFKTREAIQHESGILGPLLYGEVGDTLLIIFKNQASRPYNIYPHGITDVRPLYSRRLPKGVKHLKDFPILPGEIFKYKWTVTVEDGPTKSDPRCLTRYYSSFVNMERDLASGLIGPLLICYKESVDQRGNQIMSDKRNVILFSVFDENRSWYLTENIQRFLPNPAGVQLEDPEFQASNIMHSINGYVFDSLQLSVCLHEVAYWYILSIGAQTDFLSVFFSGYTFKHKMVYEDTLTLFPFSGETVFMSMENPGLWILGCHNSDFRNRGMTALLKVSSCDKNTGDYYEDSYEDISAYLLSKNNAIEPRSFSQNPPVLKRHQREITRTTLQSDQEEIDYDDTISVEMKKEDFDIYDEDENQSPRSFQKKTRHYFIAAVERLWDYGMSSSPHVLRNRAQSGSVPQFKKVVFQEFTDGSFTQPLYRGELNEHLGLLGPYIRAEVEDNIMVTFRNQASRPYSFYSSLISYEEDQRQGAEPRKNFVKPNETKTYFWKVQHHMAPTKDEFDCKAWAYFSDVDLEKDVHSGLIGPLLVCHTNTLNPAHGRQVTVQEFALFFTIFDETKSWYFTENMERNCRAPCNIGAPGTPGSGTASSSPGASPGTSSTGSPGASPGTSSTGSPGASPGTSSTGSPGSSPSASTGTGPGTPGSGTASSSPGASPGTSSTGSPGASPGTSSTGSPGASPGTSSTGSPGSSTPSGATGSPGSSTPSGATGSPGASPGTSSTGSPASSQMEDPTFKENYRFHAINGYIMDTLPGLVMAQDQRIRWYLLSMGSNENIHSIHFSGHVFTVRKKEEYKMALYNLYPGVFETVEMLPSKAGIWRVECLIGEHLHAGMSTLFLVYSNKCQTPLGMASGHIRDFQITASGQYGQWAPKLARLHYSGSINAWSTKEPFSWIKVDLLAPMIIHGIKTQGARQKFSSLYISQFIIMYSLDGKKWQTYRGNSTGTLMVFFGNVDSSGIKHNIFNPPIIARYIRLHPTHYSIRSTLRMELMGCDLNSCSMPLGMESKAISDAQITASSYFTNMFATWSPSKARLHLQGRSNAWRPQVNNPKEWLQVDFQKTMKVTGVTTQGVKSLLTSMYVKEFLISSSQDGHQWTLFFQNGKVKVFQGNQDSFTPVVNSLDPPLLTRYLRIHPQSWVHQIALRMEVLGCEAQDLYGAGSPGAETAEQKLISEEDLSPATGHHHHHH

SEQ ID NO: 954 - DNA, 5310 bp, synthetic construct
  misc_feature 1..5310: note = Description of Artificial Sequence: Synthetic polynucleotide
  source 1..5310: mol_type = other DNA
gccaccagaagatactacctgggtgcagtggaactgtcatgggactatatgcaaagtgatctcggtgagctgcctgtggacgcaagatttcctcctagagtgccaaaatcttttccattcggcgcgccaacatcagagagcgccacccctgaaagtggtcccgggagcgagccagccacatctgggtcggaaacgccaggcacaagtgagtctgcaactcccgagtccggacctggctccgagcctgccactagcggctccgagactccgggaacttccgagagcgctacaccagaaagcggacccggaaccagtaccgaacctagcgagggctctgctccgggcagcccagccggctctcctacatccacggaggagggcacttccgaatccgccaccccggagtcagggccaggatctgaacccgctacctcaggcagtgagacgccaggaacgagcgagtccgctacaccggagagtgggccagggagccctgctggatctcctacgtccactgaggaagggtcaccagcgggctcgcccaccagcactgaagaaggtgcctcgagcaacacctcagtcgtgtacaaaaagactctgtttgtagaattcacggatcaccttttcaacatcgctaagccaaggccaccctggatgggtctgctaggtcctaccatccaggctgaggtttatgatacagtggtcattacacttaagaacatggcttcccatcctgtcagtcttcatgctgttggtgtatcctactggaaagcttctgagggagctgaatatgatgatcagaccagtcaaagggagaaagaagatgataaagtcttccctggtggaagccatacatatgtctggcaggtcctgaaagagaatggtccaatggcctctgacccactgtgccttacctactcatatctttctcatgtggacctggtaaaagacttgaattcaggcctcattggagccctactagtatgtagagaagggagtctggccaaggaaaagacacagaccttgcacaaatttatactactttttgctgtatttgatgaagggaaaagttggcactcagaaacaaagaactccttgatgcaggatagggatgctgcatctgctcgggcctggcctaaaatgcacacagtcaatggttatgtaaacaggtctctgccaggtctgattggatgccacaggaaatcagtctattggcatgtgattggaatgggcaccactcctgaagtgcactcaatattcctcgaaggtcacacatttcttgtgaggaaccatcgccaggctagcttggaaatctcgccaataactttccttactgctcaaacactcttgatggaccttggacagtttctactgttttgtcatatctcttcccaccaacatgatggcatggaagcttatgtcaaagtagacagctgtccagaggaaccccaactacgaatgaaaaataatgaagaagcggaagactatgatgatgatcttactgattctgaaatggatgtggtcaggtttgatgatgacaactctccttcctttatccaaattcgctcagttgccaagaagcatcctaaaacttgggtacattacattgctgctgaagaggaggactgggactatgctcccttagtcctcgcccccgatgacagaagttataaaagtcaatatttgaacaatggccctcagcggattggtaggaagtacaaaaaagtccgatttatggcatacacagatgaaacctttaagactcgtgaagctattcagcatgaatcaggaatcttgggacctttactttatggggaagttggagacacactgttgattatatttaagaatcaagcaagcagaccatataacatctaccctcacggaatcactgatgtccgtcctttgtattcaaggagattaccaaaaggtgtaaaacatttgaaggattttccaattctgccaggagaaatattcaaatataaatggacagtgactgtagaagatgggccaactaaatcagatcctcggtgcctgacccgctattactctagtttcgttaatatggagagagatctagcttcaggactcattggccctctcctcatctgctacaaagaatctgtagatcaaagaggaaaccagataatgtcagacaagaggaatgtcatcctgttttctgtatttgatgagaaccgaagctggtacctcacagagaatatacaacgctttctccccaatccagctggagtgcagcttgaggatccagagttccaagcctccaacatcatgcacagcatcaatggctatgtttttgatagtttgcagttgtcagtttgtttgcatgaggtggcatactggtacattctaagcattggagcacagactgacttcctttctgtcttcttctctggatataccttcaaacacaaaatggtctatgaagacacactcaccctattcccattctcaggagaaactgtcttcatgtcgatggaaaacccaggtctatggattctggggtgccacaactcagactttcggaacagaggcatgaccgccttactgaaggtttctagttgtgacaagaacactggtgattattacgaggacagttatgaagatatttcagcatacttgctgagtaaaaacaatgccattgaaccaagaagcttctctcaaaacccaccagtcttgaaacgccatcaacgggaaataactcgtactactcttcagtcagatcaagaggaaatcgattatgatgataccatatcagttgaaatgaagaaggaagattttgacatttatgatgaggatgaaaatcagagcccccgcagctttcaaaagaaaacacgacactattttattgctgcagtggagaggctctgggattatgggatgagtagctccccacatgttctaagaaacagggctcagagtggcagtgtccctcagttcaagaaagttgttttccaggaatttactgatggctcctttactcagcccttataccgtggagaactaaatgaacatttgggactcctggggccatatataagagcagaagttgaagataatatcatggtaactttcagaaatcaggcctctcgtccctattccttctattctagccttatttcttatgaggaagatcagaggcaaggagcagaacctagaaaaaactttgtcaagcctaatgaaaccaaaacttacttttggaaagtgcaacatcatatggcacccactaaagatgagtttgactgcaaagcctgggcttatttctctgatgttgacctggaaaaagatgtgcactcaggcctgattggaccccttctggtctgccacactaacacactgaaccctgctcatgggagacaagtgacagtacaggaatttgctctgtttttcaccatctttgatgagaccaaaagctggtacttcactgaaaatatggaaagaaactgcagggctccctgcaatatcggcgcgccaggtacacccggatcgggtacagcgtcatcgagccccggtgcgtcacctggtacgtcgagcacggggtcgccaggggcgtcccctgggacgtcctcaacaggctcgcccggtgcgtcacccggcacgtcgtccacgggttcacctggtagctccccttccgcgtccactggcaccgggcctggaactccggggagcggcacagcgagctcgtcgccgggagcatcgcctgggacatcgagcaccgggtcgccaggagcatcgcccggaacatccagcacaggaagccccggcgcgtcgcccgggacatcaagcacaggttccccgggatcgagcacgccgtccggagccactggatcaccagggagctcgacaccttccggcgcaacgggatcgcccggagccagcccgggtacgtcaagcactggctcccctgcctcgagccagatggaagatcccacttttaaagagaattatcgcttccatgcaatcaatggctacataatggatacactacctggcttagtaatggctcaggatcaaaggattcgatggtatctgctcagcatgggcagcaatgaaaacatccattctattcatttcagtggacatgtgttcactgtacgaaaaaaagaggagtataaaatggcactgtacaatctctatccaggtgtttttgagacagtggaaatgttaccatccaaagctggaatttggcgggtggaatgccttattggcgagcatctacatgctgggatgagcacactttttctggtgtacagcaataagtgtcagactcccctgggaatggcttctggacacattagagattttcagattacagcttcaggacaatatggacagtgggccccaaagctggccagacttcattattccggatcaatcaatgcctggagcaccaaggagcccttttcttggatcaaggtggatctgttggcaccaatgattattcacggcatcaagacccagggtgcccgtcagaagttctccagcctctacatctctcagtttatcatcatgtatagtcttgatgggaagaagtggcagacttatcgaggaaattccactggaaccttaatggtcttctttggcaatgtggattcatctgggataaaacacaatatttttaaccctccaattattgctcgatacatccgtttgcacccaactcattatagcattcgcagcactcttcgcatggagttgatgggctgtgatttaaatagttgcagcatgccattgggaatggagagtaaagcaatatcagatgcacagattactgcttcatcctactttaccaatatgtttgccacctggtctccttcaaaagctcgacttcacctccaagggaggagtaatgcctggagacctcaggtgaataatccaaaagagtggctgcaagtggacttccagaagacaatgaaagtcacaggagtaactactcagggagtaaaatctctgcttaccagcatgtatgtgaaggagttcctcatctccagcagtcaagatggccatcagtggactctcttttttcagaatggcaaagtaaaggtttttcagggaaatcaagactccttcacacctgtggtgaactctctagacccaccgttactgactcgctaccttcgaattcacccccagagttgggtgcaccagattgccctgaggatggaggttctgggctgcgaggcacaggacctctacggcgccggatcacctggggccgaaacggccgaacaaaaactcatctcagaagaggatctgtcacctgcaaccggtcatcatcaccatcaccattga

SEQ ID NO: 955 - protein, 1769 aa, synthetic construct
  REGION 1..1769: note = Description of Artificial Sequence: Synthetic polypeptide
ATRRYYLGAVELSWDYMQSDLGELPVGAPGSSPSASTGTGPGSSPSASTGTGPGASPGTSSTGSPGASPGTSSTGSPGSSTPSGATGSPGSSPSASTGTGPGASPGTSSTGSPGSSPSASTGTGPGTPGSGTASSSPGSSTPSGATGSPGSSTPSGATGSPGASPGTSSTGSPASSDARFPPRVPKSFPFNTSVVYKKTLFVEFTDHLFNIAKPRPPWMGLLGPTIQAEVYDTVVITLKNMASHPVSLHAVGVSYWKASEGAEYDDQTSQREKEDDKVFPGGSHTYVWQVLKENGPMASDPLCLTYSYLSHVDLVKDLNSGLIGALLVCREGSLAKEKTQTLHKFILLFAVFDEGKSWHSETKNSLMQDRDAASARAWPKMHTVNGYVNRSLPGLIGCHRKSVYWHVIGMGTTPEVHSIFLEGHTFLVRNHRQASLEISPITFLTAQTLLMDLGQFLLFCHISSHQHDGMEAYVKVDSCPEEPQLRMKNNEEAEDYDDDLTDSEMDVVRFDDDNSPSFIQIRSVAKKHPKTWVHYIAAEEEDWDYAPLVLAPDDRSYKSQYLNNGPQRIGRKYKKVRFMAYTDETFKTREAIQHESGILGPLLYGEVGDTLLIIFKNQASRPYNIYPHGITDVRPLYSRRLPKGVKHLKDFPILPGEIFKYKWTVTVEDGPTKSDPRCLTRYYSSFVNMERDLASGLIGPLLICYKESVDQRGNQIMSDKRNVILFSVFDENRSWYLTENIQRFLPNPAGVQLEDPEFQASNIMHSINGYVFDSLQLSVCLHEVAYWYILSIGAQTDFLSVFFSGYTFKHKMVYEDTLTLFPFSGETVFMSMENPGLWILGCHNSDFRNRGMTALLKVSSCDKNTGDYYEDSYEDISAYLLSKNNAIEPRSFSQNPPVLKRHQREITRTTLQSDQEEIDYDDTISVEMKKEDFDIYDEDENQSPRSFQKKTRHYFIAAVERLWDYGMSSSPHVLRNRAQSGSVPQFKKVVFQEFTDGSFTQPLYRGELNEHLGLLGPYIRAEVEDNIMVTFRNQASRPYSFYSSLISYEEDQRQGAEPRKNFVKPNETKTYFWKVQHHMAPTKDEFDCKAWAYFSDVDLEKDVHSGLIGPLLVCHTNTLNPAHGRQVTVQEFALFFTIFDETKSWYFTENMERNCRAPCNIQMEDPGAPGTPGSGTASSSPGASPGTSSTGSPGASPGTSSTGSPGASPGTSSTGSPGSSPSASTGTGPGTPGSGTASSSPGASPGTSSTGSPGASPGTSSTGSPGASPGTSSTGSPGSSTPSGATGSPGSSTPSGATGSPGASPGTSSTGSPASSTFKENYRFHAINGYIMDTLPGLVMAQDQRIRWYLLSMGSNENIHSIHFSGHVFTVRKKEEYKMALYNLYPGVFETVEMLPSKAGIWRVECLIGEHLHAGMSTLFLVYSNKCQTPLGMASGHIRDFQITASGQYGQWAPKLARLHYSGSINAWSTKEPFSWIKVDLLAPMIIHGIKTQGARQKFSSLYISQFIIMYSLDGKKWQTYRGNSTGTLMVFFGNVDSSGIKHNIFNPPIIARYIRLHPTHYSIRSTLRMELMGCDLNSCSMPLGMESKAISDAQITASSYFTNMFATWSPSKARLHLQGRSNAWRPQVNNPKEWLQVDFQKTMKVTGVTTQGVKSLLTSMYVKEFLISSSQDGHQWTLFFQNGKVKVFQGNQDSFTPVVNSLDPPLLTRYLRIHPQSWVHQIALRMEVLGCEAQDLYGAGSPGAETAEQKLISEEDLSPATGHHHHHH

SEQ ID NO: 956 - DNA, 5310 bp, synthetic construct
  misc_feature 1..5310: note = Description of Artificial Sequence: Synthetic polynucleotide
  source 1..5310: mol_type = other DNA
gccaccagaagatactacctgggtgcagtggaactgtcatgggactatatgcaaagtgatctcggtgagctgcctgtgggcgcgccaggctccagcccctccgcgagcacgggaaccggaccaggttcgtcaccctcagcatcaacggggacgggaccgggggcgtcaccaggaacgtcctccaccggctcgccgggtgcatcacccggaacgtcatcgaccggatcgccagggagctcgacgccatcaggcgcaacaggatcacctggctcaagccctagcgcgtcaaccggcacgggtccgggtgcctcccctggcacgtccagcaccggatcacccggatcgagcccatccgcctcaaccggaaccggacccggtacaccagggtcgggaacagcctcctcgtcaccaggctcctcaaccccctcgggagccacgggttcgcccggttcgtcaacgccttccggagcaactggtagccccggagcatcgccaggaacttcgagcacggggtcgcccgcctcgagcgacgcaagatttcctcctagagtgccaaaatcttttccattcaacacctcagtcgtgtacaaaaagactctgtttgtagaattcacggatcaccttttcaacatcgctaagccaaggccaccctggatgggtctgctaggtcctaccatccaggctgaggtttatgatacagtggtcattacacttaagaacatggcttcccatcctgtcagtcttcatgctgttggtgtatcctactggaaagcttctgagggagctgaatatgatgatcagaccagtcaaagggagaaagaagatgataaagtcttccctggtggaagccatacatatgtctggcaggtcctgaaagagaatggtccaatggcctctgacccactgtgccttacctactcatatctttctcatgtggacctggtaaaagacttgaattcaggcctcattggagccctactagtatgtagagaagggagtctggccaaggaaaagacacagaccttgcacaaatttatactactttttgctgtatttgatgaagggaaaagttggcactcagaaacaaagaactccttgatgcaggatagggatgctgcatctgctcgggcctggcctaaaatgcacacagtcaatggttatgtaaacaggtctctgccaggtctgattggatgccacaggaaatcagtctattggcatgtgattggaatgggcaccactcctgaagtgcactcaatattcctcgaaggtcacacatttcttgtgaggaaccatcgccaggctagcttggaaatctcgccaataactttccttactgctcaaacactcttgatggaccttggacagtttctactgttttgtcatatctcttcccaccaacatgatggcatggaagcttatgtcaaagtagacagctgtccagaggaaccccaactacgaatgaaaaataatgaagaagcggaagactatgatgatgatcttactgattctgaaatggatgtggtcaggtttgatgatgacaactctccttcctttatccaaattcgctcagttgccaagaagcatcctaaaacttgggtacattacattgctgctgaagaggaggactgggactatgctcccttagtcctcgcccccgatgacagaagttataaaagtcaatatttgaacaatggccctcagcggattggtaggaagtacaaaaaagtccgatttatggcatacacagatgaaacctttaagactcgtgaagctattcagcatgaatcaggaatcttgggacctttactttatggggaagttggagacacactgttgattatatttaagaatcaagcaagcagaccatataacatctaccctcacggaatcactgatgtccgtcctttgtattcaaggagattaccaaaaggtgtaaaacatttgaaggattttccaattctgccaggagaaatattcaaatataaatggacagtgactgtagaagatgggccaactaaatcagatcctcggtgcctgacccgctattactctagtttcgttaatatggagagagatctagcttcaggactcattggccctctcctcatctgctacaaagaatctgtagatcaaagaggaaaccagataatgtcagacaagaggaatgtcatcctgttttctgtatttgatgagaaccgaagctggtacctcacagagaatatacaacgctttctccccaatccagctggagtgcagcttgaggatccagagttccaagcctccaacatcatgcacagcatcaatggctatgtttttgatagtttgcagttgtcagtttgtttgcatgaggtggcatactggtacattctaagcattggagcacagactgacttcctttctgtcttcttctctggatataccttcaaacacaaaatggtctatgaagacacactcaccctattcccattctcaggagaaactgtcttcatgtcgatggaaaacccaggtctatggattctggggtgccacaactcagactttcggaacagaggcatgaccgccttactgaaggtttctagttgtgacaagaacactggtgattattacgaggacagttatgaagatatttcagcatacttgctgagtaaaaacaatgccattgaaccaagaagcttctctcaaaacccaccagtcttgaaacgccatcaacgggaaataactcgtactactcttcagtcagatcaagaggaaatcgattatgatgataccatatcagttgaaatgaagaaggaagattttgacatttatgatgaggatgaaaatcagagcccccgcagctttcaaaagaaaacacgacactattttattgctgcagtggagaggctctgggattatgggatgagtagctccccacatgttctaagaaacagggctcagagtggcagtgtccctcagttcaagaaagttgttttccaggaatttactgatggctcctttactcagcccttataccgtggagaactaaatgaacatttgggactcctggggccatatataagagcagaagttgaagataatatcatggtaactttcagaaatcaggcctctcgtccctattccttctattctagccttatttcttatgaggaagatcagaggcaaggagcagaacctagaaaaaactttgtcaagcctaatgaaaccaaaacttacttttggaaagtgcaacatcatatggcacccactaaagatgagtttgactgcaaagcctgggcttatttctctgatgttgacctggaaaaagatgtgcactcaggcctgattggaccccttctggtctgccacactaacacactgaaccctgctcatgggagacaagtgacagtacaggaatttgctctgtttttcaccatctttgatgagaccaaaagctggtacttcactgaaaatatggaaagaaactgcagggctccctgcaatatccagatggaagatcccggcgcgccaggtacacccggatcgggtacagcgtcatcgagccccggtgcgtcacctggtacgtcgagcacggggtcgccaggggcgtcccctgggacgtcctcaacaggctcgcccggtgcgtcacccggcacgtcgtccacgggttcacctggtagctccccttccgcgtccactggcaccgggcctggaactccggggagcggcacagcgagctcgtcgccgggagcatcgcctgggacatcgagcaccgggtcgccaggagcatcgcccggaacatccagcacaggaagccccggcgcgtcgcccgggacatcaagcacaggttccccgggatcgagcacgccgtccggagccactggatcaccagggagctcgacaccttccggcgcaacgggatcgcccggagccagcccgggtacgtcaagcactggctcccctgcctcgagcacttttaaagagaattatcgcttccatgcaatcaatggctacataatggatacactacctggcttagtaatggctcaggatcaaaggattcgatggtatctgctcagcatgggcagcaatgaaaacatccattctattcatttcagtggacatgtgttcactgtacgaaaaaaagaggagtataaaatggcactgtacaatctctatccaggtgtttttgagacagtggaaatgttaccatccaaagctggaatttggcgggtggaatgccttattggcgagcatctacatgctgggatgagcacactttttctggtgtacagcaataagtgtcagactcccctgggaatggcttctggacacattagagattttcagattacagcttcaggacaatatggacagtgggccccaaagctggccagacttcattattccggatcaatcaatgcctggagcaccaaggagcccttttcttggatcaaggtggatctgttggcaccaatgattattcacggcatcaagacccagggtgcccgtcagaagttctccagcctctacatctctcagtttatcatcatgtatagtcttgatgggaagaagtggcagacttatcgaggaaattccactggaaccttaatggtcttctttggcaatgtggattcatctgggataaaacacaatatttttaaccctccaattattgctcgatacatccgtttgcacccaactcattatagcattcgcagcactcttcgcatggagttgatgggctgtgatttaaatagttgcagcatgccattgggaatggagagtaaagcaatatcagatgcacagattactgcttcatcctactttaccaatatgtttgccacctggtctccttcaaaagctcgacttcacctccaagggaggagtaatgcctggagacctcaggtgaataatccaaaagagtggctgcaagtggacttccagaagacaatgaaagtcacaggagtaactactcagggagtaaaatctctgcttaccagcatgtatgtgaaggagttcctcatctccagcagtcaagatggccatcagtggactctcttttttcagaatggcaaagtaaaggtttttcagggaaatcaagactccttcacacctgtggtgaactctctagacccaccgttactgactcgctaccttcgaattcacccccagagttgggtgcaccagattgccctgaggatggaggttctgggctgcgaggcacaggacctctacggcgccggatcacctggggccgaaacggccgaacaaaaactcatctcagaagaggatctgtcacctgcaaccggtcatcatcaccatcaccattga

SEQ ID NO: 957 - protein, 1769 aa, synthetic construct
  REGION 1..1769: note = Description of Artificial Sequence: Synthetic polypeptide
ATRRYYLGAVELSWDYMQGAPGSSPSASTGTGPGSSPSASTGTGPGASPGTSSTGSPGASPGTSSTGSPGSSTPSGATGSPGSSPSASTGTGPGASPGTSSTGSPGSSPSASTGTGPGTPGSGTASSSPGSSTPSGATGSPGSSTPSGATGSPGASPGTSSTGSPASSSDLGELPVDARFPPRVPKSFPFNTSVVYKKTLFVEFTDHLFNIAKPRPPWMGLLGPTIQAEVYDTVVITLKNMASHPVSLHAVGVSYWKASEGAEYDDQTSQREKEDDKVFPGGSHTYVWQVLKENGPMASDPLCLTYSYLSHVDLVKDLNSGLIGALLVCREGSLAKEKTQTLHKFILLFAVFDEGKSWHSETKNSLMQDRDAASARAWPKMHTVNGYVNRSLPGLIGCHRKSVYWHVIGMGTTPEVHSIFLEGHTFLVRNHRQASLEISPITFLTAQTLLMDLGQFLLFCHISSHQHDGMEAYVKVDSCPEEPQLRMKNNEEAEDYDDDLTDSEMDVVRFDDDNSPSFIQIRSVAKKHPKTWVHYIAAEEEDWDYAPLVGAPTSTEPSEGSAPGSPAGSPTSTEEGTSTEPSEGSAPGTSTEPSEGSAPGTSESATPESGPGTSTEPSEGSAPGTSESATPESGPGSEPATSGSETPGTSTEPSEGSAPGTSTEPSEGSAPGTSESATPESGPGTSESATPESGPGASSLAPDDRSYKSQYLNNGPQRIGRKYKKVRFMAYTDETFKTREAIQHESGILGPLLYGEVGDTLLIIFKNQASRPYNIYPHGITDVRPLYSRRLPKGVKHLKDFPILPGEIFKYKWTVTVEDGPTKSDPRCLTRYYSSFVNMERDLASGLIGPLLICYKESVDQRGNQIMSDKRNVILFSVFDENRSWYLTENIQRFLPNPAGVQLEDPEFQASNIMHSINGYVFDSLQLSVCLHEVAYWYILSIGAQTDFLSVFFSGYTFKHKMVYEDTLTLFPFSGETVFMSMENPGLWILGCHNSDFRNRGMTALLKVSSCDKNTGDYYEDSYEDISAYLLSKNNAIEPRSFSQNPPVLKRHQREITRTTLQSDQEEIDYDDTISVEMKKEDFDIYDEDENQSPRSFQKKTRHYFIAAVERLWDYGMSSSPHVLRNRAQSGSVPQFKKVVFQEFTDGSFTQPLYRGELNEHLGLLGPYIRAEVEDNIMVTFRNQASRPYSFYSSLISYEEDQRQGAEPRKNFVKPNETKTYFWKVQHHMAPTKDEFDCKAWAYFSDVDLEKDVHSGLIGPLLVCHTNTLNPAHGRQVTVQEFALFFTIFDETKSWYFTENMERNCRAPCNIQMEDPTFKENYRFHAINGYIMDTLPGLVMAQDQRIRWYLLSMGSNENIHSIHFSGHVFTVRKKEEYKMALYNLYPGVFETVEMLPSKAGIWRVECLIGEHLHAGMSTLFLVYSNKCQTPLGMASGHIRDFQITASGQYGQWAPKLARLHYSGSINAWSTKEPFSWIKVDLLAPMIIHGIKTQGARQKFSSLYISQFIIMYSLDGKKWQTYRGNSTGTLMVFFGNVDSSGIKHNIFNPPIIARYIRLHPTHYSIRSTLRMELMGCDLNSCSMPLGMESKAISDAQITASSYFTNMFATWSPSKARLHLQGRSNAWRPQVNNPKEWLQVDFQKTMKVTGVTTQGVKSLLTSMYVKEFLISSSQDGHQWTLFFQNGKVKVFQGNQDSFTPVVNSLDPPLLTRYLRIHPQSWVHQIALRMEVLGCEAQDLYGAGSPGAETAEQKLISEEDLSPATGHHHHHH

SEQ ID NO: 958 - DNA, 5310 bp, synthetic construct
  misc_feature 1..5310: note = Description of Artificial Sequence: Synthetic polynucleotide
  source 1..5310: mol_type = other DNA
gccaccagaagatactacctgggtgcagtggaactgtcatgggactatatgcaaggcgcgccaggctccagcccctccgcgagcacgggaaccggaccaggttcgtcaccctcagcatcaacggggacgggaccgggggcgtcaccaggaacgtcctccaccggctcgccgggtgcatcacccggaacgtcatcgaccggatcgccagggagctcgacgccatcaggcgcaacaggatcacctggctcaagccctagcgcgtcaaccggcacgggtccgggtgcctcccctggcacgtccagcaccggatcacccggatcgagcccatccgcctcaaccggaaccggacccggtacaccagggtcgggaacagcctcctcgtcaccaggctcctcaaccccctcgggagccacgggttcgcccggttcgtcaacgccttccggagcaactggtagccccggagcatcgccaggaacttcgagcacggggtcgcccgcctcgagcagtgatctcggtgagctgcctgtggacgcaagatttcctcctagagtgccaaaatcttttccattcaacacctcagtcgtgtacaaaaagactctgtttgtagaattcacggatcaccttttcaacatcgctaagccaaggccaccctggatgggtctgctaggtcctaccatccaggctgaggtttatgatacagtggtcattacacttaagaacatggcttcccatcctgtcagtcttcatgctgttggtgtatcctactggaaagcttctgagggagctgaatatgatgatcagaccagtcaaagggagaaagaagatgataaagtcttccctggtggaagccatacatatgtctggcaggtcctgaaagagaatggtccaatggcctctgacccactgtgccttacctactcatatctttctcatgtggacctggtaaaagacttgaattcaggcctcattggagccctactagtatgtagagaagggagtctggccaaggaaaagacacagaccttgcacaaatttatactactttttgctgtatttgatgaagggaaaagttggcactcagaaacaaagaactccttgatgcaggatagggatgctgcatctgctcgggcctggcctaaaatgcacacagtcaatggttatgtaaacaggtctctgccaggtctgattggatgccacaggaaatcagtctattggcatgtgattggaatgggcaccactcctgaagtgcactcaatattcctcgaaggtcacacatttcttgtgaggaaccatcgccaggctagcttggaaatctcgccaataactttccttactgctcaaacactcttgatggaccttggacagtttctactgttttgtcatatctcttcccaccaacatgatggcatggaagcttatgtcaaagtagacagctgtccagaggaaccccaactacgaatgaaaaataatgaagaagcggaagactatgatgatgatcttactgattctgaaatggatgtggtcaggtttgatgatgacaactctccttcctttatccaaattcgctcagttgccaagaagcatcctaaaacttgggtacattacattgctgctgaagaggaggactgggactatgctcccttagtcggcgcgccaaccagtacggagccgtccgaggggagcgcaccaggaagcccggctgggagcccgacttctaccgaagagggtacatctaccgaaccaagtgaaggttcagcaccaggcacctcaacagaaccctctgagggctcggcgcctggtacaagtgagtccgccaccccagaatccgggcctgggacaagcacagaaccttcggaagggagtgcccctggaacatccgaatcggcaaccccagaatcagggccaggatctgagcccgcgacttcgggctccgagacgcctgggacatccaccgagccctccgaaggatcagccccaggcaccagcacggagccctctgagggaagcgcacctggtaccagcgaaagcgcaactcccgaatcaggtcccggtacgagcgagtcggcgaccccggagagcgggccaggtgcctcgagcctcgcccccgatgacagaagttataaaagtcaatatttgaacaatggccctcagcggattggtaggaagtacaaaaaagtccgatttatggcatacacagatgaaacctttaagactcgtgaagctattcagcatgaatcaggaatcttgggacctttactttatggggaagttggagacacactgttgattatatttaagaatcaagcaagcagaccatataacatctaccctcacggaatcactgatgtccgtcctttgtattcaaggagattaccaaaaggtgtaaaacatttgaaggattttccaattctgccaggagaaatattcaaatataaatggacagtgactgtagaagatgggccaactaaatcagatcctcggtgcctgacccgctattactctagtttcgttaatatggagagagatctagcttcaggactcattggccctctcctcatctgctacaaagaatctgtagatcaaagaggaaaccagataatgtcagacaagaggaatgtcatcctgttttctgtatttgatgagaaccgaagctggtacctcacagagaatatacaacgctttctccccaatccagctggagtgcagcttgaggatccagagttccaagcctccaacatcatgcacagcatcaatggctatgtttttgatagtttgcagttgtcagtttgtttgcatgaggtggcatactggtacattctaagcattggagcacagactgacttcctttctgtcttcttctctggatataccttcaaacacaaaatggtctatgaagacacactcaccctattcccattctcaggagaaactgtcttcatgtcgatggaaaacccaggtctatggattctggggtgccacaactcagactttcggaacagaggcatgaccgccttactgaaggtttctagttgtgacaagaacactggtgattattacgaggacagttatgaagatatttcagcatacttgctgagtaaaaacaatgccattgaaccaagaagcttctctcaaaacccaccagtcttgaaacgccatcaacgggaaataactcgtactactcttcagtcagatcaagaggaaatcgattatgatgataccatatcagttgaaatgaagaaggaagattttgacatttatgatgaggatgaaaatcagagcccccgcagctttcaaaagaaaacacgacactattttattgctgcagtggagaggctctgggattatgggatgagtagctccccacatgttctaagaaacagggctcagagtggcagtgtccctcagttcaagaaagttgttttccaggaatttactgatggctcctttactcagcccttataccgtggagaactaaatgaacatttgggactcctggggccatatataagagcagaagttgaagataatatcatggtaactttcagaaatcaggcctctcgtccctattccttctattctagccttatttcttatgaggaagatcagaggcaaggagcagaacctagaaaaaactttgtcaagcctaatgaaaccaaaacttacttttggaaagtgcaacatcatatggcacccactaaagatgagtttgactgcaaagcctgggcttatttctctgatgttgacctggaaaaagatgtgcactcaggcctgattggaccccttctggtctgccacactaacacactgaaccctgctcatgggagacaagtgacagtacaggaatttgctctgtttttcaccatctttgatgagaccaaaagctggtacttcactgaaaatatggaaagaaactgcagggctccctgcaatatccagatggaagatcccacttttaaagagaattatcgcttccatgcaatcaatggctacataatggatacactacctggcttagtaatggctcaggatcaaaggattcgatggtatctgctcagcatgggcagcaatgaaaacatccattctattcatttcagtggacatgtgttcactgtacgaaaaaaagaggagtataaaatggcactgtacaatctctatccaggtgtttttgagacagtggaaatgttaccatccaaagctggaatttggcgggtggaatgccttattggcgagcatctacatgctgggatgagcacactttttctggtgtacagcaataagtgtcagactcccctgggaatggcttctggacacattagagattttcagattacagcttcaggacaatatggacagtgggccccaaagctggccagacttcattattccggatcaatcaatgcctggagcaccaaggagcccttttcttggatcaaggtggatctgttggcaccaatgattattcacggcatcaagacccagggtgcccgtcagaagttctccagcctctacatctctcagtttatcatcatgtatagtcttgatgggaagaagtggcagacttatcgaggaaattccactggaaccttaatggtcttctttggcaatgtggattcatctgggataaaacacaatatttttaaccctccaattattgctcgatacatccgtttgcacccaactcattatagcattcgcagcactcttcgcatggagttgatgggctgtgatttaaatagttgcagcatgccattgggaatggagagtaaagcaatatcagatgcacagattactgcttcatcctactttaccaatatgtttgccacctggtctccttcaaaagctcgacttcacctccaagggaggagtaatgcctggagacctcaggtgaataatccaaaagagtggctgcaagtggacttccagaagacaatgaaagtcacaggagtaactactcagggagtaaaatctctgcttaccagcatgtatgtgaaggagttcctcatctccagcagtcaagatggccatcagtggactctcttttttcagaatggcaaagtaaaggtttttcagggaaatcaagactccttcacacctgtggtgaactctctagacccaccgttactgactcgctaccttcgaattcacccccagagttgggtgcaccagattgccctgaggatggaggttctgggctgcgaggcacaggacctctacggcgccggatcacctggggccgaaacggccgaacaaaaactcatctcagaagaggatctgtcacctgcaaccggtcatcatcaccatcaccattga

SEQ ID NO: 959 - protein, 1769 aa, synthetic construct
  REGION 1..1769: note = Description of Artificial Sequence: Synthetic polypeptide
ATRRYYLGAVELSWDYMQSDLGELPVGAPGSSPSASTGTGPGSSPSASTGTGPGASPGTSSTGSPGASPGTSSTGSPGSSTPSGATGSPGSSPSASTGTGPGASPGTSSTGSPGSSPSASTGTGPGTPGSGTASSSPGSSTPSGATGSPGSSTPSGATGSPGASPGTSSTGSPASSDARFPPRVPKSFPFNTSVVYKKTLFVEFTDHLFNIAKPRPPWMGLLGPTIQAEVYDTVVITLKNMASHPVSLHAVGVSYWKASEGAEYDDQTSQREKEDDKVFPGGSHTYVWQVLKENGPMASDPLCLTYSYLSHVDLVKDLNSGLIGALLVCREGSLAKEKTQTLHKFILLFAVFDEGKSWHSETKNSLMQDRDAASARAWPKMHTVNGYVNRSLPGLIGCHRKSVYWHVIGMGTTPEVHSIFLEGHTFLVRNHRQASLEISPITFLTAQTLLMDLGQFLLFCHISSHQHDGMEAYVKVDSCPEEPQLRMKNNEEAEDYDDDLTDSEMDVVRFDDDNSPSFIQIRSVAKKHPKTWVHYIAAEEEDWDYAPLVGAPTSTEPSEGSAPGSPAGSPTSTEEGTSTEPSEGSAPGTSTEPSEGSAPGTSESATPESGPGTSTEPSEGSAPGTSESATPESGPGSEPATSGSETPGTSTEPSEGSAPGTSTEPSEGSAPGTSESATPESGPGTSESATPESGPGASSLAPDDRSYKSQYLNNGPQRIGRKYKKVRFMAYTDETFKTREAIQHESGILGPLLYGEVGDTLLIIFKNQASRPYNIYPHGITDVRPLYSRRLPKGVKHLKDFPILPGEIFKYKWTVTVEDGPTKSDPRCLTRYYSSFVNMERDLASGLIGPLLICYKESVDQRGNQIMSDKRNVILFSVFDENRSWYLTENIQRFLPNPAGVQLEDPEFQASNIMHSINGYVFDSLQLSVCLHEVAYWYILSIGAQTDFLSVFFSGYTFKHKMVYEDTLTLFPFSGETVFMSMENPGLWILGCHNSDFRNRGMTALLKVSSCDKNTGDYYEDSYEDISAYLLSKNNAIEPRSFSQNPPVLKRHQREITRTTLQSDQEEIDYDDTISVEMKKEDFDIYDEDENQSPRSFQKKTRHYFIAAVERLWDYGMSSSPHVLRNRAQSGSVPQFKKVVFQEFTDGSFTQPLYRGELNEHLGLLGPYIRAEVEDNIMVTFRNQASRPYSFYSSLISYEEDQRQGAEPRKNFVKPNETKTYFWKVQHHMAPTKDEFDCKAWAYFSDVDLEKDVHSGLIGPLLVCHTNTLNPAHGRQVTVQEFALFFTIFDETKSWYFTENMERNCRAPCNIQMEDPTFKENYRFHAINGYIMDTLPGLVMAQDQRIRWYLLSMGSNENIHSIHFSGHVFTVRKKEEYKMALYNLYPGVFETVEMLPSKAGIWRVECLIGEHLHAGMSTLFLVYSNKCQTPLGMASGHIRDFQITASGQYGQWAPKLARLHYSGSINAWSTKEPFSWIKVDLLAPMIIHGIKTQGARQKFSSLYISQFIIMYSLDGKKWQTYRGNSTGTLMVFFGNVDSSGIKHNIFNPPIIARYIRLHPTHYSIRSTLRMELMGCDLNSCSMPLGMESKAISDAQITASSYFTNMFATWSPSKARLHLQGRSNAWRPQVNNPKEWLQVDFQKTMKVTGVTTQGVKSLLTSMYVKEFLISSSQDGHQWTLFFQNGKVKVFQGNQDSFTPVVNSLDPPLLTRYLRIHPQSWVHQIALRMEVLGCEAQDLYGAGSPGAETAEQKLISEEDLSPATGHHHHHH

SEQ ID NO: 960 - DNA, 5310 bp, synthetic construct
  misc_feature 1..5310: note = Description of Artificial Sequence: Synthetic polynucleotide
  source 1..5310: mol_type = other DNA
gccaccagaagatactacctgggtgcagtggaactgtcatgggactatatgcaaagtgatctcggtgagctgcctgtgggcgcgccaggctccagcccctccgcgagcacgggaaccggaccaggttcgtcaccctcagcatcaacggggacgggaccgggggcgtcaccaggaacgtcctccaccggctcgccgggtgcatcacccggaacgtcatcgaccggatcgccagggagctcgacgccatcaggcgcaacaggatcacctggctcaagccctagcgcgtcaaccggcacgggtccgggtgcctcccctggcacgtccagcaccggatcacccggatcgagcccatccgcctcaaccggaaccggacccggtacaccagggtcgggaacagcctcctcgtcaccaggctcctcaaccccctcgggagccacgggttcgcccggttcgtcaacgccttccggagcaactggtagccccggagcatcgccaggaacttcgagcacggggtcgcccgcctcgagcgacgcaagatttcctcctagagtgccaaaatcttttccattcaacacctcagtcgtgtacaaaaagactctgtttgtagaattcacggatcaccttttcaacatcgctaagccaaggccaccctggatgggtctgctaggtcctaccatccaggctgaggtttatgatacagtggtcattacacttaagaacatggcttcccatcctgtcagtcttcatgctgttggtgtatcctactggaaagcttctgagggagctgaatatgatgatcagaccagtcaaagggagaaagaagatgataaagtcttccctggtggaagccatacatatgtctggcaggtcctgaaagagaatggtccaatggcctctgacccactgtgccttacctactcatatctttctcatgtggacctggtaaaagacttgaattcaggcctcattggagccctactagtatgtagagaagggagtctggccaaggaaaagacacagaccttgcacaaatttatactactttttgctgtatttgatgaagggaaaagttggcactcagaaacaaagaactccttgatgcaggatagggatgctgcatctgctcgggcctggcctaaaatgcacacagtcaatggttatgtaaacaggtctctgccaggtctgattggatgccacaggaaatcagtctattggcatgtgattggaatgggcaccactcctgaagtgcactcaatattcctcgaaggtcacacatttcttgtgaggaaccatcgccaggctagcttggaaatctcgccaataactttccttactgctcaaacactcttgatggaccttggacagtttctactgttttgtcatatctcttcccaccaacatgatggcatggaagcttatgtcaaagtagacagctgtccagaggaaccccaactacgaatgaaaaataatgaagaagcggaagactatgatgatgatcttactgattctgaaatggatgtggtcaggtttgatgatgacaactctccttcctttatccaaattcgctcagttgccaagaagcatcctaaaacttgggtacattacattgctgctgaagaggaggactgggactatgctcccttagtcggcgcgccaaccagtacggagccgtccgaggggagcgcaccaggaagcccggctgggagcccgacttctaccgaagagggtacatctaccgaaccaagtgaaggttcagcaccaggcacctcaacagaaccctctgagggctcggcgcctggtacaagtgagtccgccaccccagaatccgggcctgggacaagcacagaaccttcggaagggagtgcccctggaacatccgaatcggcaaccccagaatcagggccaggatctgagcccgcgacttcgggctccgagacgcctgggacatccaccgagccctccgaaggatcagccccaggcaccagcacggagccctctgagggaagcgcacctggtaccagcgaaagcgcaactcccgaatcaggtcccggtacgagcgagtcggcgaccccggagagcgggccaggtgcctcgagcctcgcccccgatgacagaagttataaaagtcaatatttgaacaatggccctcagcggattggtaggaagtacaaaaaagtccgatttatggcatacacagatgaaacctttaagactcgtgaagctattcagcatgaatcaggaatcttgggacctttactttatggggaagttggagacacactgttgattatatttaagaatcaagcaagcagaccatataacatctaccctcacggaatcactgatgtccgtcctttgtattcaaggagattaccaaaaggtgtaaaacatttgaaggattttccaattctgccaggagaaatattcaaatataaatggacagtgactgtagaagatgggccaactaaatcagatcctcggtgcctgacccgctattactctagtttcgttaatatggagagagatctagcttcaggactcattggccctctcctcatctgctacaaagaatctgtagatcaaagaggaaaccagataatgtcagacaagaggaatgtcatcctgttttctgtatttgatgagaaccgaagctggtacctcacagagaatatacaacgctttctccccaatccagctggagtgcagcttgaggatccagagttccaagcctccaacatcatgcacagcatcaatggctatgtttttgatagtttgcagttgtcagtttgtttgcatgaggtggcatactggtacattctaagcattggagcacagactgacttcctttctgtcttcttctctggatataccttcaaacacaaaatggtctatgaagacacactcaccctattcccattctcaggagaaactgtcttcatgtcgatggaaaacccaggtctatggattctggggtgccacaactcagactttcggaacagaggcatgaccgccttactgaaggtttctagttgtgacaagaacactggtgattattacgaggacagttatgaagatatttcagcatacttgctgagtaaaaacaatgccattgaaccaagaagcttctctcaaaacccaccagtcttgaaacgccatcaacgggaaataactcgtactactcttcagtcagatcaagaggaaatcgattatgatgataccatatcagttgaaatgaagaaggaagattttgacatttatgatgaggatgaaaatcagagcccccgcagctttcaaaagaaaacacgacactattttattgctgcagtggagaggctctgggattatgggatgagtagctccccacatgttctaagaaacagggctcagagtggcagtgtccctcagttcaagaaagttgttttccaggaatttactgatggctcctttactcagcccttataccgtggagaactaaatgaacatttgggactcctggggccatatataagagcagaagttgaagataatatcatggtaactttcagaaatcaggcctctcgtccctattccttctattctagccttatttcttatgaggaagatcagaggcaaggagcagaacctagaaaaaactttgtcaagcctaatgaaaccaaaacttacttttggaaagtgcaacatcatatggcacccactaaagatgagtttgactgcaaagcctgggcttatttctctgatgttgacctggaaaaagatgtgcactcaggcctgattggaccccttctggtctgccacactaacacactgaaccctgctcatgggagacaagtgacagtacaggaatttgctctgtttttcaccatctttgatgagaccaaaagctggtacttcactgaaaatatggaaagaaactgcagggctccctgcaatatccagatggaagatcccacttttaaagagaattatcgcttccatgcaatcaatggctacataatggatacactacctggcttagtaatggctcaggatcaaaggattcgatggtatctgctcagcatgggcagcaatgaaaacatccattctattcatttcagtggacatgtgttcactgtacgaaaaaaagaggagtataaaatggcactgtacaatctctatccaggtgtttttgagacagtggaaatgttaccatccaaagctggaatttggcgggtggaatgccttattggcgagcatctacatgctgggatgagcacactttttctggtgtacagcaataagtgtcagactcccctgggaatggcttctggacacattagagattttcagattacagcttcaggacaatatggacagtgggccccaaagctggccagacttcattattccggatcaatcaatgcctggagcaccaaggagcccttttcttggatcaaggtggatctgttggcaccaatgattattcacggcatcaagacccagggtgcccgtcagaagttctccagcctctacatctctcagtttatcatcatgtatagtcttgatgggaagaagtggcagacttatcgaggaaattccactggaaccttaatggtcttctttggcaatgtggattcatctgggataaaacacaatatttttaaccctccaattattgctcgatacatccgtttgcacccaactcattatagcattcgcagcactcttcgcatggagttgatgggctgtgatttaaatagttgcagcatgccattgggaatggagagtaaagcaatatcagatgcacagattactgcttcatcctactttaccaatatgtttgccacctggtctccttcaaaagctcgacttcacctccaagggaggagtaatgcctggagacctcaggtgaataatccaaaagagtggctgcaagtggacttccagaagacaatgaaagtcacaggagtaactactcagggagtaaaatctctgcttaccagcatgtatgtgaaggagttcctcatctccagcagtcaagatggccatcagtggactctcttttttcagaatggcaaagtaaaggtttttcagggaaatcaagactccttcacacctgtggtgaactctctagacccaccgttactgactcgctaccttcgaattcacccccagagttgggtgcaccagattgccctgaggatggaggttctgggctgcgaggcacaggacctctacggcgccggatcacctggggccgaaacggccgaacaaaaactcatctcagaagaggatctgtcacctgcaaccggtcatcatcaccatcaccattga

SEQ ID NO: 961 - protein, 1769 aa, synthetic construct
  REGION 1..1769: note = Description of Artificial Sequence: Synthetic polypeptide
ATRRYYLGAVELSWDYMQSDLGELPVDARFPPRVPKSFPFGAPGSSPSASTGTGPGSSPSASTGTGPGASPGTSSTGSPGASPGTSSTGSPGSSTPSGATGSPGSSPSASTGTGPGASPGTSSTGSPGSSPSASTGTGPGTPGSGTASSSPGSSTPSGATGSPGSSTPSGATGSPGASPGTSSTGSPASSNTSVVYKKTLFVEFTDHLFNIAKPRPPWMGLLGPTIQAEVYDTVVITLKNMASHPVSLHAVGVSYWKASEGAEYDDQTSQREKEDDKVFPGGSHTYVWQVLKENGPMASDPLCLTYSYLSHVDLVKDLNSGLIGALLVCREGSLAKEKTQTLHKFILLFAVFDEGKSWHSETKNSLMQDRDAASARAWPKMHTVNGYVNRSLPGLIGCHRKSVYWHVIGMGTTPEVHSIFLEGHTFLVRNHRQASLEISPITFLTAQTLLMDLGQFLLFCHISSHQHDGMEAYVKVDSCPEEPQLRMKNNEEAEDYDDDLTDSEMDVVRFDDDNSPSFIQIRSVAKKHPKTWVHYIAAEEEDWDYAPLVGAPTSTEPSEGSAPGSPAGSPTSTEEGTSTEPSEGSAPGTSTEPSEGSAPGTSESATPESGPGTSTEPSEGSAPGTSESATPESGPGSEPATSGSETPGTSTEPSEGSAPGTSTEPSEGSAPGTSESATPESGPGTSESATPESGPGASSLAPDDRSYKSQYLNNGPQRIGRKYKKVRFMAYTDETFKTREAIQHESGILGPLLYGEVGDTLLIIFKNQASRPYNIYPHGITDVRPLYSRRLPKGVKHLKDFPILPGEIFKYKWTVTVEDGPTKSDPRCLTRYYSSFVNMERDLASGLIGPLLICYKESVDQRGNQIMSDKRNVILFSVFDENRSWYLTENIQRFLPNPAGVQLEDPEFQASNIMHSINGYVFDSLQLSVCLHEVAYWYILSIGAQTDFLSVFFSGYTFKHKMVYEDTLTLFPFSGETVFMSMENPGLWILGCHNSDFRNRGMTALLKVSSCDKNTGDYYEDSYEDISAYLLSKNNAIEPRSFSQNPPVLKRHQREITRTTLQSDQEEIDYDDTISVEMKKEDFDIYDEDENQSPRSFQKKTRHYFIAAVERLWDYGMSSSPHVLRNRAQSGSVPQFKKVVFQEFTDGSFTQPLYRGELNEHLGLLGPYIRAEVEDNIMVTFRNQASRPYSFYSSLISYEEDQRQGAEPRKNFVKPNETKTYFWKVQHHMAPTKDEFDCKAWAYFSDVDLEKDVHSGLIGPLLVCHTNTLNPAHGRQVTVQEFALFFTIFDETKSWYFTENMERNCRAPCNIQMEDPTFKENYRFHAINGYIMDTLPGLVMAQDQRIRWYLLSMGSNENIHSIHFSGHVFTVRKKEEYKMALYNLYPGVFETVEMLPSKAGIWRVECLIGEHLHAGMSTLFLVYSNKCQTPLGMASGHIRDFQITASGQYGQWAPKLARLHYSGSINAWSTKEPFSWIKVDLLAPMIIHGIKTQGARQKFSSLYISQFIIMYSLDGKKWQTYRGNSTGTLMVFFGNVDSSGIKHNIFNPPIIARYIRLHPTHYSIRSTLRMELMGCDLNSCSMPLGMESKAISDAQITASSYFTNMFATWSPSKARLHLQGRSNAWRPQVNNPKEWLQVDFQKTMKVTGVTTQGVKSLLTSMYVKEFLISSSQDGHQWTLFFQNGKVKVFQGNQDSFTPVVNSLDPPLLTRYLRIHPQSWVHQIALRMEVLGCEAQDLYGAGSPGAETAEQKLISEEDLSPATGHHHHHH

SEQ ID NO: 962 - DNA, 5310 bp, synthetic construct
  misc_feature 1..5310: note = Description of Artificial Sequence: Synthetic polynucleotide
  source 1..5310: mol_type = other DNA
gccaccagaagatactacctgggtgcagtggaactgtcatgggactatatgcaaagtgatctcggtgagctgcctgtggacgcaagatttcctcctagagtgccaaaatcttttccattcggcgcgccaggctccagcccctccgcgagcacgggaaccggaccaggttcgtcaccctcagcatcaacggggacgggaccgggggcgtcaccaggaacgtcctccaccggctcgccgggtgcatcacccggaacgtcatcgaccggatcgccagggagctcgacgccatcaggcgcaacaggatcacctggctcaagccctagcgcgtcaaccggcacgggtccgggtgcctcccctggcacgtccagcaccggatcacccggatcgagcccatccgcctcaaccggaaccggacccggtacaccagggtcgggaacagcctcctcgtcaccaggctcctcaaccccctcgggagccacgggttcgcccggttcgtcaacgccttccggagcaactggtagccccggagcatcgccaggaacttcgagcacggggtcgcccgcctcgagcaacacctcagtcgtgtacaaaaagactctgtttgtagaattcacggatcaccttttcaacatcgctaagccaaggccaccctggatgggtctgctaggtcctaccatccaggctgaggtttatgatacagtggtcattacacttaagaacatggcttcccatcctgtcagtcttcatgctgttggtgtatcctactggaaagcttctgagggagctgaatatgatgatcagaccagtcaaagggagaaagaagatgataaagtcttccctggtggaagccatacatatgtctggcaggtcctgaaagagaatggtccaatggcctctgacccactgtgccttacctactcatatctttctcatgtggacctggtaaaagacttgaattcaggcctcattggagccctactagtatgtagagaagggagtctggccaaggaaaagacacagaccttgcacaaatttatactactttttgctgtatttgatgaagggaaaagttggcactcagaaacaaagaactccttgatgcaggatagggatgctgcatctgctcgggcctggcctaaaatgcacacagtcaatggttatgtaaacaggtctctgccaggtctgattggatgccacaggaaatcagtctattggcatgtgattggaatgggcaccactcctgaagtgcactcaatattcctcgaaggtcacacatttcttgtgaggaaccatcgccaggctagcttggaaatctcgccaataactttccttactgctcaaacactcttgatggaccttggacagtttctactgttttgtcatatctcttcccaccaacatgatggcatggaagcttatgtcaaagtagacagctgtccagaggaaccccaactacgaatgaaaaataatgaagaagcggaagactatgatgatgatcttactgattctgaaatggatgtggtcaggtttgatgatgacaactctccttcctttatccaaattcgctcagttgccaagaagcatcctaaaacttgggtacattacattgctgctgaagaggaggactgggactatgctcccttagtcggcgcgccaaccagtacggagccgtccgaggggagcgcaccaggaagcccggctgggagcccgacttctaccgaagagggtacatctaccgaaccaagtgaaggttcagcaccaggcacctcaacagaaccctctgagggctcggcgcctggtacaagtgagtccgccaccccagaatccgggcctgggacaagcacagaaccttcggaagggagtgcccctggaacatccgaatcggcaaccccagaatcagggccaggatctgagcccgcgacttcgggctccgagacgcctgggacatccaccgagccctccgaaggatcagccccaggcaccagcacggagccctctgagggaagcgcacctggtaccagcgaaagcgcaactcccgaatcaggtcccggtacgagcgagtcggcgaccccggagagcgggccaggtgcctcgagcctcgcccccgatgacagaagttataaaagtcaatatttgaacaatggccctcagcggattggtaggaagtacaaaaaagtccgatttatggcatacacagatgaaacctttaagactcgtgaagctattcagcatgaatcaggaatcttgggacctttactttatggggaagttggagacacactgttgattatatttaagaatcaagcaagcagaccatataacatctaccctcacggaatcactgatgtccgtcctttgtattcaaggagattaccaaaaggtgtaaaacatttgaaggattttccaattctgccaggagaaatattcaaatataaatggacagtgactgtagaagatgggccaactaaatcagatcctcggtgcctgacccgctattactctagtttcgttaatatggagagagatctagcttcaggactcattggccctctcctcatctgctacaaagaatctgtagatcaaagaggaaaccagataatgtcagacaagaggaatgtcatcctgttttctgtatttgatgagaaccgaagctggtacctcacagagaatatacaacgctttctccccaatccagctggagtgcagcttgaggatccagagttccaagcctccaacatcatgcacagcatcaatggctatgtttttgatagtttgcagttgtcagtttgtttgcatgaggtggcatactggtacattctaagcattggagcacagactgacttcctttctgtcttcttctctggatataccttcaaacacaaaatggtctatgaagacacactcaccctattcccattctcaggagaaactgtcttcatgtcgatggaaaacccaggtctatggattctggggtgccacaactcagactttcggaacagaggcatgaccgccttactgaaggtttctagttgtgacaagaacactggtgattattacgaggacagttatgaagatatttcagcatacttgctgagtaaaaacaatgccattgaaccaagaagcttctctcaaaacccaccagtcttgaaacgccatcaacgggaaataactcgtactactcttcagtcagatcaagaggaaatcgattatgatgataccatatcagttgaaatgaagaaggaagattttgacatttatgatgaggatgaaaatcagagcccccgcagctttcaaaagaaaacacgacactattttattgctgcagtggagaggctctgggattatgggatgagtagctccccacatgttctaagaaacagggctcagagtggcagtgtccctcagttcaagaaagttgttttccaggaatttactgatggctcctttactcagcccttataccgtggagaactaaatgaacatttgggactcctggggccatatataagagcagaagttgaagataatatcatggtaactttcagaaatcaggcctctcgtccctattccttctattctagccttatttcttatgaggaagatcagaggcaaggagcagaacctagaaaaaactttgtcaagcctaatgaaaccaaaacttacttttggaaagtgcaacatcatatggcacccactaaagatgagtttgactgcaaagcctgggcttatttctctgatgttgacctggaaaaagatgtgcactcaggcctgattggaccccttctggtctgccacactaacacactgaaccctgctcatgggagacaagtgacagtacaggaatttgctctgtttttcaccatctttgatgagaccaaaagctggtacttcactgaaaatatggaaagaaactgcagggctccctgcaatatccagatggaagatcccacttttaaagagaattatcgcttccatgcaatcaatggctacataatggatacactacctggcttagtaatggctcaggatcaaaggattcgatggtatctgctcagcatgggcagcaatgaaaacatccattctattcatttcagtggacatgtgttcactgtacgaaaaaaagaggagtataaaatggcactgtacaatctctatccaggtgtttttgagacagtggaaatgttaccatccaaagctggaatttggcgggtggaatgccttattggcgagcatctacatgctgggatgagcacactttttctggtgtacagcaataagtgtcagactcccctgggaatggcttctggacacattagagattttcagattacagcttcaggacaatatggacagtgggccccaaagctggccagacttcattattccggatcaatcaatgcctggagcaccaaggagcccttttcttggatcaaggtggatctgttggcaccaatgattattcacggcatcaagacccagggtgcccgtcagaagttctccagcctctacatctctcagtttatcatcatgtatagtcttgatgggaagaagtggcagacttatcgaggaaattccactggaaccttaatggtcttctttggcaatgtggattcatctgggataaaacacaatatttttaaccctccaattattgctcgatacatccgtttgcacccaactcattatagcattcgcagcactcttcgcatggagttgatgggctgtgatttaaatagttgcagcatgccattgggaatggagagtaaagcaatatcagatgcacagattactgcttcatcctactttaccaatatgtttgccacctggtctccttcaaaagctcgacttcacctccaagggaggagtaatgcctggagacctcaggtgaataatccaaaagagtggctgcaagtggacttccagaagacaatgaaagtcacaggagtaactactcagggagtaaaatctctgcttaccagcatgtatgtgaaggagttcctcatctccagcagtcaagatggccatcagtggactctcttttttcagaatggcaaagtaaaggtttttcagggaaatcaagactccttcacacctgtggtgaactctctagacccaccgttactgactcgctaccttcgaattcacccccagagttgggtgcaccagattgccctgaggatggaggttctgggctgcgaggcacaggacctctacggcgccggatcacctggggccgaaacggccgaacaaaaactcatctcagaagaggatctgtcacctgcaaccggtcatcatcaccatcaccattga

SEQ ID NO: 963 - protein, 1769 aa, synthetic construct
  REGION 1..1769: note = Description of Artificial Sequence: Synthetic polypeptide
ATRRYYLGAVELSWDYMQGAPGSSPSASTGTGPGSSPSASTGTGPGASPGTSSTGSPGASPGTSSTGSPGSSTPSGATGSPGSSPSASTGTGPGASPGTSSTGSPGSSPSASTGTGPGTPGSGTASSSPGSSTPSGATGSPGSSTPSGATGSPGASPGTSSTGSPASSSDLGELPVDARFPPRVPKSFPFNTSVVYKKTLFVEFTDHLFNIAKPRPPWMGLLGPTIQAEVYDTVVITLKNMASHPVSLHAVGVSYWKASEGAEYDDQTSQREKEDDKVFPGGSHTYVWQVLKENGPMASDPLCLTYSYLSHVDLVKDLNSGLIGALLVCREGSLAKEKTQTLHKFILLFAVFDEGKSWHSETKNSLMQDRDAASARAWPKMHTVNGYVNRSLPGLIGCHRKSVYWHVIGMGTTPEVHSIFLEGHTFLVRNHRQASLEISPITFLTAQTLLMDLGQFLLFCHISSHQHDGMEAYVKVDSCPEEPQLRMKNNEEAEDYDDDLTDSEMDVVRFDDDNSPSFIQIRSVAKKHPKTWVHYIAAEEEDWDYAPLVLAPDGAPTSTEPSEGSAPGSPAGSPTSTEEGTSTEPSEGSAPGTSTEPSEGSAPGTSESATPESGPGTSTEPSEGSAPGTSESATPESGPGSEPATSGSETPGTSTEPSEGSAPGTSTEPSEGSAPGTSESATPESGPGTSESATPESGPGASSDRSYKSQYLNNGPQRIGRKYKKVRFMAYTDETFKTREAIQHESGILGPLLYGEVGDTLLIIFKNQASRPYNIYPHGITDVRPLYSRRLPKGVKHLKDFPILPGEIFKYKWTVTVEDGPTKSDPRCLTRYYSSFVNMERDLASGLIGPLLICYKESVDQRGNQIMSDKRNVILFSVFDENRSWYLTENIQRFLPNPAGVQLEDPEFQASNIMHSINGYVFDSLQLSVCLHEVAYWYILSIGAQTDFLSVFFSGYTFKHKMVYEDTLTLFPFSGETVFMSMENPGLWILGCHNSDFRNRGMTALLKVSSCDKNTGDYYEDSYEDISAYLLSKNNAIEPRSFSQNPPVLKRHQREITRTTLQSDQEEIDYDDTISVEMKKEDFDIYDEDENQSPRSFQKKTRHYFIAAVERLWDYGMSSSPHVLRNRAQSGSVPQFKKVVFQEFTDGSFTQPLYRGELNEHLGLLGPYIRAEVEDNIMVTFRNQASRPYSFYSSLISYEEDQRQGAEPRKNFVKPNETKTYFWKVQHHMAPTKDEFDCKAWAYFSDVDLEKDVHSGLIGPLLVCHTNTLNPAHGRQVTVQEFALFFTIFDETKSWYFTENMERNCRAPCNIQMEDPTFKENYRFHAINGYIMDTLPGLVMAQDQRIRWYLLSMGSNENIHSIHFSGHVFTVRKKEEYKMALYNLYPGVFETVEMLPSKAGIWRVECLIGEHLHAGMSTLFLVYSNKCQTPLGMASGHIRDFQITASGQYGQWAPKLARLHYSGSINAWSTKEPFSWIKVDLLAPMIIHGIKTQGARQKFSSLYISQFIIMYSLDGKKWQTYRGNSTGTLMVFFGNVDSSGIKHNIFNPPIIARYIRLHPTHYSIRSTLRMELMGCDLNSCSMPLGMESKAISDAQITASSYFTNMFATWSPSKARLHLQGRSNAWRPQVNNPKEWLQVDFQKTMKVTGVTTQGVKSLLTSMYVKEFLISSSQDGHQWTLFFQNGKVKVFQGNQDSFTPVVNSLDPPLLTRYLRIHPQSWVHQIALRMEVLGCEAQDLYGAGSPGAETAEQKLISEEDLSPATGHHHHHH

SEQ ID NO: 964 - DNA, 5310 bp, synthetic construct
  misc_feature 1..5310: note = Description of Artificial Sequence: Synthetic polynucleotide
  source 1..5310: mol_type = other DNA
gccaccagaagatactacctgggtgcagtggaactgtcatgggactatatgcaaggcgcgccaggctccagcccctccgcgagcacgggaaccggaccaggttcgtcaccctcagcatcaacggggacgggaccgggggcgtcaccaggaacgtcctccaccggctcgccgggtgcatcacccggaacgtcatcgaccggatcgccagggagctcgacgccatcaggcgcaacaggatcacctggctcaagccctagcgcgtcaaccggcacgggtccgggtgcctcccctggcacgtccagcaccggatcacccggatcgagcccatccgcctcaaccggaaccggacccggtacaccagggtcgggaacagcctcctcgtcaccaggctcctcaaccccctcgggagccacgggttcgcccggttcgtcaacgccttccggagcaactggtagccccggagcatcgccaggaacttcgagcacggggtcgcccgcctcgagcagtgatctcggtgagctgcctgtggacgcaagatttcctcctagagtgccaaaatcttttccattcaacacctcagtcgtgtacaaaaagactctgtttgtagaattcacggatcaccttttcaacatcgctaagccaaggccaccctggatgggtctgctaggtcctaccatccaggctgaggtttatgatacagtggtcattacacttaagaacatggcttcccatcctgtcagtcttcatgctgttggtgtatcctactggaaagcttctgagggagctgaatatgatgatcagaccagtcaaagggagaaagaagatgataaagtcttccctggtggaagccatacatatgtctggcaggtcctgaaagagaatggtccaatggcctctgacccactgtgccttacctactcatatctttctcatgtggacctggtaaaagacttgaattcaggcctcattggagccctactagtatgtagagaagggagtctggccaaggaaaagacacagaccttgcacaaatttatactactttttgctgtatttgatgaagggaaaagttggcactcagaaacaaagaactccttgatgcaggatagggatgctgcatctgctcgggcctggcctaaaatgcacacagtcaatggttatgtaaacaggtctctgccaggtctgattggatgccacaggaaatcagtctattggcatgtgattggaatgggcaccactcctgaagtgcactcaatattcctcgaaggtcacacatttcttgtgaggaaccatcgccaggctagcttggaaatctcgccaataactttccttactgctcaaacactcttgatggaccttggacagtttctactgttttgtcatatctcttcccaccaacatgatggcatggaagcttatgtcaaagtagacagctgtccagaggaaccccaactacgaatgaaaaataatgaagaagcggaagactatgatgatgatcttactgattctgaaatggatgtggtcaggtttgatgatgacaactctccttcctttatccaaattcgctcagttgccaagaagcatcctaaaacttgggtacattacattgctgctgaagaggaggactgggactatgctcccttagtcctcgcccccgatggcgcgccaaccagtacggagccgtccgaggggagcgcaccaggaagcccggctgggagcccgacttctaccgaagagggtacatctaccgaaccaagtgaaggttcagcaccaggcacctcaacagaaccctctgagggctcggcgcctggtacaagtgagtccgccaccccagaatccgggcctgggacaagcacagaaccttcggaagggagtgcccctggaacatccgaatcggcaaccccagaatcagggccaggatctgagcccgcgacttcgggctccgagacgcctgggacatccaccgagccctccgaaggatcagccccaggcaccagcacggagccctctgagggaagcgcacctggtaccagcgaaagcgcaactcccgaatcaggtcccggtacgagcgagtcggcgaccccggagagcgggccaggtgcctcgagcgacagaagttataaaagtcaatatttgaacaatggccctcagcggattggtaggaagtacaaaaaagtccgatttatggcatacacagatgaaacctttaagactcgtgaagctattcagcatgaatcaggaatcttgggacctttactttatggggaagttggagacacactgttgattatatttaagaatcaagcaagcagaccatataacatctaccctcacggaatcactgatgtccgtcctttgtattcaaggagattaccaaaaggtgtaaaacatttgaaggattttccaattctgccaggagaaatattcaaatataaatggacagtgactgtagaagatgggccaactaaatcagatcctcggtgcctgacccgctattactctagtttcgttaatatggagagagatctagcttcaggactcattggccctctcctcatctgctacaaagaatctgtagatcaaagaggaaaccagataatgtcagacaagaggaatgtcatcctgttttctgtatttgatgagaaccgaagctggtacctcacagagaatatacaacgctttctccccaatccagctggagtgcagcttgaggatccagagttccaagcctccaacatcatgcacagcatcaatggctatgtttttgatagtttgcagttgtcagtttgtttgcatgaggtggcatactggtacattctaagcattggagcacagactgacttcctttctgtcttcttctctggatataccttcaaacacaaaatggtctatgaagacacactcaccctattcccattctcaggagaaactgtcttcatgtcgatggaaaacccaggtctatggattctggggtgccacaactcagactttcggaacagaggcatgaccgccttactgaaggtttctagttgtgacaagaacactggtgattattacgaggacagttatgaagatatttcagcatacttgctgagtaaaaacaatgccattgaaccaagaagcttctctcaaaacccaccagtcttgaaacgccatcaacgggaaataactcgtactactcttcagtcagatcaagaggaaatcgattatgatgataccatatcagttgaaatgaagaaggaagattttgacatttatgatgaggatgaaaatcagagcccccgcagctttcaaaagaaaacacgacactattttattgctgcagtggagaggctctgggattatgggatgagtagctccccacatgttctaagaaacagggctcagagtggcagtgtccctcagttcaagaaagttgttttccaggaatttactgatggctcctttactcagcccttataccgtggagaactaaatgaacatttgggactcctggggccatatataagagcagaagttgaagataatatcatggtaactttcagaaatcaggcctctcgtccctattccttctattctagccttatttcttatgaggaagatcagaggcaaggagcagaacctagaaaaaactttgtcaagcctaatgaaaccaaaacttacttttggaaagtgcaacatcatatggcacccactaaagatgagtttgactgcaaagcctgggcttatttctctgatgttgacctggaaaaagatgtgcactcaggcctgattggaccccttctggtctgccacactaacacactgaaccctgctcatgggagacaagtgacagtacaggaatttgctctgtttttcaccatctttgatgagaccaaaagctggtacttcactgaaaatatggaaagaaactgcagggctccctgcaatatccagatggaagatcccacttttaaagagaattatcgcttccatgcaatcaatggctacataatggatacactacctggcttagtaatggctcaggatcaaaggattcgatggtatctgctcagcatgggcagcaatgaaaacatccattctattcatttcagtggacatgtgttcactgtacgaaaaaaagaggagtataaaatggcactgtacaatctctatccaggtgtttttgagacagtggaaatgttaccatccaaagctggaatttggcgggtggaatgccttattggcgagcatctacatgctgggatgagcacactttttctggtgtacagcaataagtgtcagactcccctgggaatggcttctggacacattagagattttcagattacagcttcaggacaatatggacagtgggccccaaagctggccagacttcattattccggatcaatcaatgcctggagcaccaaggagcccttttcttggatcaaggtggatctgttggcaccaatgattattcacggcatcaagacccagggtgcccgtcagaagttctccagcctctacatctctcagtttatcatcatgtatagtcttgatgggaagaagtggcagacttatcgaggaaattccactggaaccttaatggtcttctttggcaatgtggattcatctgggataaaacacaatatttttaaccctccaattattgctcgatacatccgtttgcacccaactcattatagcattcgcagcactcttcgcatggagttgatgggctgtgatttaaatagttgcagcatgccattgggaatggagagtaaagcaatatcagatgcacagattactgcttcatcctactttaccaatatgtttgccacctggtctccttcaaaagctcgacttcacctccaagggaggagtaatgcctggagacctcaggtgaataatccaaaagagtggctgcaagtggacttccagaagacaatgaaagtcacaggagtaactactcagggagtaaaatctctgcttaccagcatgtatgtgaaggagttcctcatctccagcagtcaagatggccatcagtggactctcttttttcagaatggcaaagtaaaggtttttcagggaaatcaagactccttcacacctgtggtgaactctctagacccaccgttactgactcgctaccttcgaattcacccccagagttgggtgcaccagattgccctgaggatggaggttctgggctgcgaggcacaggacctctacggcgccggatcacctggggccgaaacggccgaacaaaaactcatctcagaagaggatctgtcacctgcaaccggtcatcatcaccatcaccattga

SEQ ID NO: 965 - protein, 1769 aa, synthetic construct
  REGION 1..1769: note = Description of Artificial Sequence: Synthetic polypeptide
ATRRYYLGAVELSWDYMQGAPGSSPSASTGTGPGSSPSASTGTGPGASPGTSSTGSPGASPGTSSTGSPGSSTPSGATGSPGSSPSASTGTGPGASPGTSSTGSPGSSPSASTGTGPGTPGSGTASSSPGSSTPSGATGSPGSSTPSGATGSPGASPGTSSTGSPASSSDLGELPVDARFPPRVPKSFPFNTSVVYKKTLFVEFTDHLFNIAKPRPPWMGLLGPTIQAEVYDTVVITLKNMASHPVSLHAVGVSYWKASEGAEYDDQTSQREKEDDKVFPGGSHTYVWQVLKENGPMASDPLCLTYSYLSHVDLVKDLNSGLIGALLVCREGSLAKEKTQTLHKFILLFAVFDEGKSWHSETKNSLMQDRDAASARAWPKMHTVNGYVNRSLPGLIGCHRKSVYWHVIGMGTTPEVHSIFLEGHTFLVRNHRQASLEISPITFLTAQTLLMDLGQFLLFCHISSHQHDGMEAYVKVDSCPEEPQLRMKNNEEAEDYDDDLTDSEMDVVRFDDDNSPSFIQIRSVAKKHPKTWVHYIAAEEEDWDYAPLVLAPDGAPGASPGTSSTGSPGSSPSASTGTGPGSSPSASTGTGPGTPGSGTASSSPGSSTPSGATGSPGSSPSASTGTGPGASPGTSSTGSPGTPGSGTASSSPGSSTPSGATGSPGTPGSGTASSSPGASPGTSSTGSPGASPGTSSTGSPASSDRSYKSQYLNNGPQRIGRKYKKVRFMAYTDETFKTREAIQHESGILGPLLYGEVGDTLLIIFKNQASRPYNIYPHGITDVRPLYSRRLPKGVKHLKDFPILPGEIFKYKWTVTVEDGPTKSDPRCLTRYYSSFVNMERDLASGLIGPLLICYKESVDQRGNQIMSDKRNVILFSVFDENRSWYLTENIQRFLPNPAGVQLEDPEFQASNIMHSINGYVFDSLQLSVCLHEVAYWYILSIGAQTDFLSVFFSGYTFKHKMVYEDTLTLFPFSGETVFMSMENPGLWILGCHNSDFRNRGMTALLKVSSCDKNTGDYYEDSYEDISAYLLSKNNAIEPRSFSQNPPVLKRHQREITRTTLQSDQEEIDYDDTISVEMKKEDFDIYDEDENQSPRSFQKKTRHYFIAAVERLWDYGMSSSPHVLRNRAQSGSVPQFKKVVFQEFTDGSFTQPLYRGELNEHLGLLGPYIRAEVEDNIMVTFRNQASRPYSFYSSLISYEEDQRQGAEPRKNFVKPNETKTYFWKVQHHMAPTKDEFDCKAWAYFSDVDLEKDVHSGLIGPLLVCHTNTLNPAHGRQVTVQEFALFFTIFDETKSWYFTENMERNCRAPCNIQMEDPTFKENYRFHAINGYIMDTLPGLVMAQDQRIRWYLLSMGSNENIHSIHFSGHVFTVRKKEEYKMALYNLYPGVFETVEMLPSKAGIWRVECLIGEHLHAGMSTLFLVYSNKCQTPLGMASGHIRDFQITASGQYGQWAPKLARLHYSGSINAWSTKEPFSWIKVDLLAPMIIHGIKTQGARQKFSSLYISQFIIMYSLDGKKWQTYRGNSTGTLMVFFGNVDSSGIKHNIFNPPIIARYIRLHPTHYSIRSTLRMELMGCDLNSCSMPLGMESKAISDAQITASSYFTNMFATWSPSKARLHLQGRSNAWRPQVNNPKEWLQVDFQKTMKVTGVTTQGVKSLLTSMYVKEFLISSSQDGHQWTLFFQNGKVKVFQGNQDSFTPVVNSLDPPLLTRYLRIHPQSWVHQIALRMEVLGCEAQDLYGAGSPGAETAEQKLISEEDLSPATGHHHHHH

SEQ ID NO: 966 - DNA, 5310 bp, synthetic construct
  misc_feature 1..5310: note = Description of Artificial Sequence: Synthetic polynucleotide
  source 1..5310: mol_type = other DNA
gccaccagaagatactacctgggtgcagtggaactgtcatgggactatatgcaaggcgcgccaggctccagcccctccgcgagcacgggaaccggaccaggttcgtcaccctcagcatcaacggggacgggaccgggggcgtcaccaggaacgtcctccaccggctcgccgggtgcatcacccggaacgtcatcgaccggatcgccagggagctcgacgccatcaggcgcaacaggatcacctggctcaagccctagcgcgtcaaccggcacgggtccgggtgcctcccctggcacgtccagcaccggatcacccggatcgagcccatccgcctcaaccggaaccggacccggtacaccagggtcgggaacagcctcctcgtcaccaggctcctcaaccccctcgggagccacgggttcgcccggttcgtcaacgccttccggagcaactggtagccccggagcatcgccaggaacttcgagcacggggtcgcccgcctcgagcagtgatctcggtgagctgcctgtggacgcaagatttcctcctagagtgccaaaatcttttccattcaacacctcagtcgtgtacaaaaagactctgtttgtagaattcacggatcaccttttcaacatcgctaagccaaggccaccctggatgggtctgctaggtcctaccatccaggctgaggtttatgatacagtggtcattacacttaagaacatggcttcccatcctgtcagtcttcatgctgttggtgtatcctactggaaagcttctgagggagctgaatatgatgatcagaccagtcaaagggagaaagaagatgataaagtcttccctggtggaagccatacatatgtctggcaggtcctgaaagagaatggtccaatggcctctgacccactgtgccttacctactcatatctttctcatgtggacctggtaaaagacttgaattcaggcctcattggagccctactagtatgtagagaagggagtctggccaaggaaaagacacagaccttgcacaaatttatactactttttgctgtatttgatgaagggaaaagttggcactcagaaacaaagaactccttgatgcaggatagggatgctgcatctgctcgggcctggcctaaaatgcacacagtcaatggttatgtaaacaggtctctgccaggtctgattggatgccacaggaaatcagtctattggcatgtgattggaatgggcaccactcctgaagtgcactcaatattcctcgaaggtcacacatttcttgtgaggaaccatcgccaggctagcttggaaatctcgccaataactttccttactgctcaaacactcttgatggaccttggacagtttctactgttttgtcatatctcttcccaccaacatgatggcatggaagcttatgtcaaagtagacagctgtccagaggaaccccaactacgaatgaaaaataatgaagaagcggaagactatgatgatgatcttactgattctgaaatggatgtggtcaggtttgatgatgacaactctccttcctttatccaaattcgctcagttgccaagaagcatcctaaaacttgggtacattacattgctgctgaagaggaggactgggactatgctcccttagtcctcgcccccgatggcgcgccaggtgcctcgccgggaacatcatcaactggttcacccgggtcatccccctcggcctcaaccgggacgggtcccggctcatcccccagcgccagcactggaacaggtcctggcactcctggttccggtacggcatcgtcatccccgggaagctcaacaccgtccggagcgacaggatcacctggctcgtcaccttcggcgtcaactggaacggggccaggggcctcacccggaacgtcctcgactgggtcgcctggtacgccgggatcaggaacggcctcatcctcgcctgggtcctcaacgccctcgggtgcgactggttcgccgggaactcctggctcggggacggcctcgtcgtcgcctggggcatcaccggggacgagctccacggggtcccctggagcgtcaccggggacctcctcgacaggtagcccggcctcgagcgacagaagttataaaagtcaatatttgaacaatggccctcagcggattggtaggaagtacaaaaaagtccgatttatggcatacacagatgaaacctttaagactcgtgaagctattcagcatgaatcaggaatcttgggacctttactttatggggaagttggagacacactgttgattatatttaagaatcaagcaagcagaccatataacatctaccctcacggaatcactgatgtccgtcctttgtattcaaggagattaccaaaaggtgtaaaacatttgaaggattttccaattctgccaggagaaatattcaaatataaatggacagtgactgtagaagatgggccaactaaatcagatcctcggtgcctgacccgctattactctagtttcgttaatatggagagagatctagcttcaggactcattggccctctcctcatctgctacaaagaatctgtagatcaaagaggaaaccagataatgtcagacaagaggaatgtcatcctgttttctgtatttgatgagaaccgaagctggtacctcacagagaatatacaacgctttctccccaatccagctggagtgcagcttgaggatccagagttccaagcctccaacatcatgcacagcatcaatggctatgtttttgatagtttgcagttgtcagtttgtttgcatgaggtggcatactggtacattctaagcattggagcacagactgacttcctttctgtcttcttctctggatataccttcaaacacaaaatggtctatgaagacacactcaccctattcccattctcaggagaaactgtcttcatgtcgatggaaaacccaggtctatggattctggggtgccacaactcagactttcggaacagaggcatgaccgccttactgaaggtttctagttgtgacaagaacactggtgattattacgaggacagttatgaagatatttcagcatacttgctgagtaaaaacaatgccattgaaccaagaagcttctctcaaaacccaccagtcttgaaacgccatcaacgggaaataactcgtactactcttcagtcagatcaagaggaaatcgattatgatgataccatatcagttgaaatgaagaaggaagattttgacatttatgatgaggatgaaaatcagagcccccgcagctttcaaaagaaaacacgacactattttattgctgcagtggagaggctctgggattatgggatgagtagctccccacatgttctaagaaacagggctcagagtggcagtgtccctcagttcaagaaagttgttttccaggaatttactgatggctcctttactcagcccttataccgtggagaactaaatgaacatttgggactcctggggccatatataagagcagaagttgaagataatatcatggtaactttcagaaatcaggcctctcgtccctattccttctattctagccttatttcttatgaggaagatcagaggcaaggagcagaacctagaaaaaactttgtcaagcctaatgaaaccaaaacttacttttggaaagtgcaacatcatatggcacccactaaagatgagtttgactgcaaagcctgggcttatttctctgatgttgacctggaaaaagatgtgcactcaggcctgattggaccccttctggtctgccacactaacacactgaaccctgctcatgggagacaagtgacagtacaggaatttgctctgtttttcaccatctttgatgagaccaaaagctggtacttcactgaaaatatggaaagaaactgcagggctccctgcaatatccagatggaagatcccacttttaaagagaattatcgcttccatgcaatcaatggctacataatggatacactacctggcttagtaatggctcaggatcaaaggattcgatggtatctgctcagcatgggcagcaatgaaaacatccattctattcatttcagtggacatgtgttcactgtacgaaaaaaagaggagtataaaatggcactgtacaatctctatccaggtgtttttgagacagtggaaatgttaccatccaaagctggaatttggcgggtggaatgccttattggcgagcatctacatgctgggatgagcacactttttctggtgtacagcaataagtgtcagactcccctgggaatggcttctggacacattagagattttcagattacagcttcaggacaatatggacagtgggccccaaagctggccagacttcattattccggatcaatcaatgcctggagcaccaaggagcccttttcttggatcaaggtggatctgttggcaccaatgattattcacggcatcaagacccagggtgcccgtcagaagttctccagcctctacatctctcagtttatcatcatgtatagtcttgatgggaagaagtggcagacttatcgaggaaattccactggaaccttaatggtcttctttggcaatgtggattcatctgggataaaacacaatatttttaaccctccaattattgctcgatacatccgtttgcacccaactcattatagcattcgcagcactcttcgcatggagttgatgggctgtgatttaaatagttgcagcatgccattgggaatggagagtaaagcaatatcagatgcacagattactgcttcatcctactttaccaatatgtttgccacctggtctccttcaaaagctcgacttcacctccaagggaggagtaatgcctggagacctcaggtgaataatccaaaagagtggctgcaagtggacttccagaagacaatgaaagtcacaggagtaactactcagggagtaaaatctctgcttaccagcatgtatgtgaaggagttcctcatctccagcagtcaagatggccatcagtggactctcttttttcagaatggcaaagtaaaggtttttcagggaaatcaagactccttcacacctgtggtgaactctctagacccaccgttactgactcgctaccttcgaattcacccccagagttgggtgcaccagattgccctgaggatggaggttctgggctgcgaggcacaggacctctacggcgccggatcacctggggccgaaacggccgaacaaaaactcatctcagaagaggatctgtcacctgcaaccggtcatcatcaccatcaccattga

SEQ ID NO: 967 - protein, 1769 aa, synthetic construct
  REGION 1..1769: note = Description of Artificial Sequence: Synthetic polypeptide
ATRRYYLGAVELSWDYMQGAPTSESATPESGPGSEPATSGSETPGTSESATPESGPGSEPATSGSETPGTSESATPESGPGTSTEPSEGSAPGSPAGSPTSTEEGTSESATPESGPGSEPATSGSETPGTSESATPESGPGSPAGSPTSTEEGSPAGSPTSTEEGASSSDLGELPVDARFPPRVPKSFPFNTSVVYKKTLFVEFTDHLFNIAKPRPPWMGLLGPTIQAEVYDTVVITLKNMASHPVSLHAVGVSYWKASEGAEYDDQTSQREKEDDKVFPGGSHTYVWQVLKENGPMASDPLCLTYSYLSHVDLVKDLNSGLIGALLVCREGSLAKEKTQTLHKFILLFAVFDEGKSWHSETKNSLMQDRDAASARAWPKMHTVNGYVNRSLPGLIGCHRKSVYWHVIGMGTTPEVHSIFLEGHTFLVRNHRQASLEISPITFLTAQTLLMDLGQFLLFCHISSHQHDGMEAYVKVDSCPEEPQLRMKNNEEAEDYDDDLTDSEMDVVRFDDDNSPSFIQIRSVAKKHPKTWVHYIAAEEEDWDYAPLVLAPDGAPGASPGTSSTGSPGSSPSASTGTGPGSSPSASTGTGPGTPGSGTASSSPGSSTPSGATGSPGSSPSASTGTGPGASPGTSSTGSPGTPGSGTASSSPGSSTPSGATGSPGTPGSGTASSSPGASPGTSSTGSPGASPGTSSTGSPASSDRSYKSQYLNNGPQRIGRKYKKVRFMAYTDETFKTREAIQHESGILGPLLYGEVGDTLLIIFKNQASRPYNIYPHGITDVRPLYSRRLPKGVKHLKDFPILPGEIFKYKWTVTVEDGPTKSDPRCLTRYYSSFVNMERDLASGLIGPLLICYKESVDQRGNQIMSDKRNVILFSVFDENRSWYLTENIQRFLPNPAGVQLEDPEFQASNIMHSINGYVFDSLQLSVCLHEVAYWYILSIGAQTDFLSVFFSGYTFKHKMVYEDTLTLFPFSGETVFMSMENPGLWILGCHNSDFRNRGMTALLKVSSCDKNTGDYYEDSYEDISAYLLSKNNAIEPRSFSQNPPVLKRHQREITRTTLQSDQEEIDYDDTISVEMKKEDFDIYDEDENQSPRSFQKKTRHYFIAAVERLWDYGMSSSPHVLRNRAQSGSVPQFKKVVFQEFTDGSFTQPLYRGELNEHLGLLGPYIRAEVEDNIMVTFRNQASRPYSFYSSLISYEEDQRQGAEPRKNFVKPNETKTYFWKVQHHMAPTKDEFDCKAWAYFSDVDLEKDVHSGLIGPLLVCHTNTLNPAHGRQVTVQEFALFFTIFDETKSWYFTENMERNCRAPCNIQMEDPTFKENYRFHAINGYIMDTLPGLVMAQDQRIRWYLLSMGSNENIHSIHFSGHVFTVRKKEEYKMALYNLYPGVFETVEMLPSKAGIWRVECLIGEHLHAGMSTLFLVYSNKCQTPLGMASGHIRDFQITASGQYGQWAPKLARLHYSGSINAWSTKEPFSWIKVDLLAPMIIHGIKTQGARQKFSSLYISQFIIMYSLDGKKWQTYRGNSTGTLMVFFGNVDSSGIKHNIFNPPIIARYIRLHPTHYSIRSTLRMELMGCDLNSCSMPLGMESKAISDAQITASSYFTNMFATWSPSKARLHLQGRSNAWRPQVNNPKEWLQVDFQKTMKVTGVTTQGVKSLLTSMYVKEFLISSSQDGHQWTLFFQNGKVKVFQGNQDSFTPVVNSLDPPLLTRYLRIHPQSWVHQIALRMEVLGCEAQDLYGAGSPGAETAEQKLISEEDLSPATGHHHHHH

SEQ ID NO: 968 - DNA, 5310 bp, synthetic construct
  misc_feature 1..5310: note = Description of Artificial Sequence: Synthetic polynucleotide
  source 1..5310: mol_type = other DNA
gccaccagaagatactacctgggtgcagtggaactgtcatgggactatatgcaaggcgcgccaacatcagagagcgccacccctgaaagtggtcccgggagcgagccagccacatctgggtcggaaacgccaggcacaagtgagtctgcaactcccgagtccggacctggctccgagcctgccactagcggctccgagactccgggaacttccgagagcgctacaccagaaagcggacccggaaccagtaccgaacctagcgagggctctgctccgggcagcccagccggctctcctacatccacggaggagggcacttccgaatccgccaccccggagtcagggccaggatctgaacccgctacctcaggcagtgagacgccaggaacgagcgagtccgctacaccggagagtgggccagggagccctgctggatctcctacgtccactgaggaagggtcaccagcgggctcgcccaccagcactgaagaaggtgcctcgagcagtgatctcggtgagctgcctgtggacgcaagatttcctcctagagtgccaaaatcttttccattcaacacctcagtcgtgtacaaaaagactctgtttgtagaattcacggatcaccttttcaacatcgctaagccaaggccaccctggatgggtctgctaggtcctaccatccaggctgaggtttatgatacagtggtcattacacttaagaacatggcttcccatcctgtcagtcttcatgctgttggtgtatcctactggaaagcttctgagggagctgaatatgatgatcagaccagtcaaagggagaaagaagatgataaagtcttccctggtggaagccatacatatgtctggcaggtcctgaaagagaatggtccaatggcctctgacccactgtgccttacctactcatatctttctcatgtggacctggtaaaagacttgaattcaggcctcattggagccctactagtatgtagagaagggagtctggccaaggaaaagacacagaccttgcacaaatttatactactttttgctgtatttgatgaagggaaaagttggcactcagaaacaaagaactccttgatgcaggatagggatgctgcatctgctcgggcctggcctaaaatgcacacagtcaatggttatgtaaacaggtctctgccaggtctgattggatgccacaggaaatcagtctattggcatgtgattggaatgggcaccactcctgaagtgcactcaatattcctcgaaggtcacacatttcttgtgaggaaccatcgccaggctagcttggaaatctcgccaataactttccttactgctcaaacactcttgatggaccttggacagtttctactgttttgtcatatctcttcccaccaacatgatggcatggaagcttatgtcaaagtagacagctgtccagaggaaccccaactacgaatgaaaaataatgaagaagcggaagactatgatgatgatcttactgattctgaaatggatgtggtcaggtttgatgatgacaactctccttcctttatccaaattcgctcagttgccaagaagcatcctaaaacttgggtacattacattgctgctgaagaggaggactgggactatgctcccttagtcctcgcccccgatggcgcgccaggtgcctcgccgggaacatcatcaactggttcacccgggtcatccccctcggcctcaaccgggacgggtcccggctcatcccccagcgccagcactggaacaggtcctggcactcctggttccggtacggcatcgtcatccccgggaagctcaacaccgtccggagcgacaggatcacctggctcgtcaccttcggcgtcaactggaacggggccaggggcctcacccggaacgtcctcgactgggtcgcctggtacgccgggatcaggaacggcctcatcctcgcctgggtcctcaacgccctcgggtgcgactggttcgccgggaactcctggctcggggacggcctcgtcgtcgcctggggcatcaccggggacgagctccacggggtcccctggagcgtcaccggggacctcctcgacaggtagcccggcctcgagcgacagaagttataaaagtcaatatttgaacaatggccctcagcggattggtaggaagtacaaaaaagtccgatttatggcatacacagatgaaacctttaagactcgtgaagctattcagcatgaatcaggaatcttgggacctttactttatggggaagttggagacacactgttgattatatttaagaatcaagcaagcagaccatataacatctaccctcacggaatcactgatgtccgtcctttgtattcaaggagattaccaaaaggtgtaaaacatttgaaggattttccaattctgccaggagaaatattcaaatataaatggacagtgactgtagaagatgggccaactaaatcagatcctcggtgcctgacccgctattactctagtttcgttaatatggagagagatctagcttcaggactcattggccctctcctcatctgctacaaagaatctgtagatcaaagaggaaaccagataatgtcagacaagaggaatgtcatcctgttttctgtatttgatgagaaccgaagctggtacctcacagagaatatacaacgctttctccccaatccagctggagtgcagcttgaggatccagagttccaagcctccaacatcatgcacagcatcaatggctatgtttttgatagtttgcagttgtcagtttgtttgcatgaggtggcatactggtacattctaagcattggagcacagactgacttcctttctgtcttcttctctggatataccttcaaacacaaaatggtctatgaagacacactcaccctattcccattctcaggagaaactgtcttcatgtcgatggaaaacccaggtctatggattctggggtgccacaactcagactttcggaacagaggcatgaccgccttactgaaggtttctagttgtgacaagaacactggtgattattacgaggacagttatgaagatatttcagcatacttgctgagtaaaaacaatgccattgaaccaagaagcttctctcaaaacccaccagtcttgaaacgccatcaacgggaaataactcgtactactcttcagtcagatcaagaggaaatcgattatgatgataccatatcagttgaaatgaagaaggaagattttgacatttatgatgaggatgaaaatcagagcccccgcagctttcaaaagaaaacacgacactattttattgctgcagtggagaggctctgggattatgggatgagtagctccccacatgttctaagaaacagggctcagagtggcagtgtccctcagttcaagaaagttgttttccaggaatttactgatggctcctttactcagcccttataccgtggagaactaaatgaacatttgggactcctggggccatatataagagcagaagttgaagataatatcatggtaactttcagaaatcaggcctctcgtccctattccttctattctagccttatttcttatgaggaagatcagaggcaaggagcagaacctagaaaaaactttgtcaagcctaatgaaaccaaaacttacttttggaaagtgcaacatcatatggcacccactaaagatgagtttgactgcaaagcctgggcttatttctctgatgttgacctggaaaaagatgtgcactcaggcctgattggaccccttctggtctgccacactaacacactgaaccctgctcatgggagacaagtgacagtacaggaatttgctctgtttttcaccatctttgatgagaccaaaagctggtacttcactgaaaatatggaaagaaactgcagggctccctgcaatatccagatggaagatcccacttttaaagagaattatcgcttccatgcaatcaatggctacataatggatacactacctggcttagtaatggctcaggatcaaaggattcgatggtatctgctcagcatgggcagcaatgaaaacatccattctattcatttcagtggacatgtgttcactgtacgaaaaaaagaggagtataaaatggcactgtacaatctctatccaggtgtttttgagacagtggaaatgttaccatccaaagctggaatttggcgggtggaatgccttattggcgagcatctacatgctgggatgagcacactttttctggtgtacagcaataagtgtcagactcccctgggaatggcttctggacacattagagattttcagattacagcttcaggacaatatggacagtgggccccaaagctggccagacttcattattccggatcaatcaatgcctggagcaccaaggagcccttttcttggatcaaggtggatctgttggcaccaatgattattcacggcatcaagacccagggtgcccgtcagaagttctccagcctctacatctctcagtttatcatcatgtatagtcttgatgggaagaagtggcagacttatcgaggaaattccactggaaccttaatggtcttctttggcaatgtggattcatctgggataaaacacaatatttttaaccctccaattattgctcgatacatccgtttgcacccaactcattatagcattcgcagcactcttcgcatggagttgatgggctgtgatttaaatagttgcagcatgccattgggaatggagagtaaagcaatatcagatgcacagattactgcttcatcctactttaccaatatgtttgccacctggtctccttcaaaagctcgacttcacctccaagggaggagtaatgcctggagacctcaggtgaataatccaaaagagtggctgcaagtggacttccagaagacaatgaaagtcacaggagtaactactcagggagtaaaatctctgcttaccagcatgtatgtgaaggagttcctcatctccagcagtcaagatggccatcagtggactctcttttttcagaatggcaaagtaaaggtttttcagggaaatcaagactccttcacacctgtggtgaactctctagacccaccgttactgactcgctaccttcgaattcacccccagagttgggtgcaccagattgccctgaggatggaggttctgggctgcgaggcacaggacctctacggcgccggatcacctggggccgaaacggccgaacaaaaactcatctcagaagaggatctgtcacctgcaaccggtcatcatcaccatcaccattga

SEQ ID NO: 969 - protein, 1769 aa, synthetic construct
  REGION 1..1769: note = Description of Artificial Sequence: Synthetic polypeptide
ATRRYYLGAVELSWDYMQSDLGELPVDARFPPRVPKSFPFNTSVVYKKTLFVEFTDHLFNIAKPRPPWMGLLGPTIQAEVYDTVVITLKNMASHPVSLHAVGVSYWKASEGAEYDDQTSQREKEDDKVFPGGSHTYVWQVLKENGPMASDPLCLTYSYLSHVDLVKDLNSGLIGALLVCREGSLAKEKTQTLHKFILLFAVFDEGKSWHSETKNSLMQDRDAASARAWPKMHTVNGYVNRSLPGLIGCHRKSVYWHVIGMGTTPEVHSIFLEGHTFLVRNHRQASLEISPITFLTAQTLLMDLGQFLLFCHISSHQHDGMEAYVKVDSCPEEPQLRMKNNEEAEDYDDDLTDSEMDVVRFDDDNSPSFIQIRSVAKKHPKTWVHYIAAEEEDWDYAPLVLAPDDRSYKSQYLNNGPQRIGRKYKKVRFMAYTDETFKTREAIQHESGILGPLLYGEVGDTLLIIFKNQASRPYNIYPHGITDVRPLYSRRLPKGVKHLKDFPILPGEIFKYKWTVTVEDGPTKSDPRCLTRYYSSFVNMERDLASGLIGPLLICYKESVDQRGNQIMSDKRNVILFSVFDENRSWYLTENIQRFLPNPAGVQLEDPEFQASNIMHSINGYVFDSLQLSVCLHEVAYWYILSIGAQTDFLSVFFSGYTFKHKMVYEDTLTLFPFSGETVFMSMENPGLWILGCHNSDFRNRGMTALLKVSSCDKNTGDYYEDSYEDISAYLLSKNNAIEPRSFSQNPPVLKRHQREITRTTLQGAPGTPGSGTASSSPGASPGTSSTGSPGASPGTSSTGSPGASPGTSSTGSPGSSPSASTGTGPGTPGSGTASSSPGASPGTSSTGSPGASPGTSSTGSPGASPGTSSTGSPGSSTPSGATGSPGSSTPSGATGSPGASPGTSSTGSPASSSDQEEIDYDDTISVEMKKEDFDIYDEDENQSPRSFQKKTRHYFIAAVERLWDYGMSSSPHVLRNRAQSGSVPQFKKVVFQEFTDGSFTQPLYRGELNEHLGLLGPYIRAEVEDNIMVTFRNQASRPYSFYSSLISYEEDQRQGAEPRKNFVKPNETKTYFWKVQHHMAPTKDEFDCKAWAYFSDVDLEKDVHSGLIGPLLVCHTNTLNPAHGRQVTVQEFALFFTIFDETKSWYFTENMERNCRGAPGTPGSGTASSSPGASPGTSSTGSPGASPGTSSTGSPGASPGTSSTGSPGSSPSASTGTGPGTPGSGTASSSPGASPGTSSTGSPGASPGTSSTGSPGASPGTSSTGSPGSSTPSGATGSPGSSTPSGATGSPGASPGTSSTGSPASSAPCNIQMEDPTFKENYRFHAINGYIMDTLPGLVMAQDQRIRWYLLSMGSNENIHSIHFSGHVFTVRKKEEYKMALYNLYPGVFETVEMLPSKAGIWRVECLIGEHLHAGMSTLFLVYSNKCQTPLGMASGHIRDFQITASGQYGQWAPKLARLHYSGSINAWSTKEPFSWIKVDLLAPMIIHGIKTQGARQKFSSLYISQFIIMYSLDGKKWQTYRGNSTGTLMVFFGNVDSSGIKHNIFNPPIIARYIRLHPTHYSIRSTLRMELMGCDLNSCSMPLGMESKAISDAQITASSYFTNMFATWSPSKARLHLQGRSNAWRPQVNNPKEWLQVDFQKTMKVTGVTTQGVKSLLTSMYVKEFLISSSQDGHQWTLFFQNGKVKVFQGNQDSFTPVVNSLDPPLLTRYLRIHPQSWVHQIALRMEVLGCEAQDLYGAGSPGAETAEQKLISEEDLSPATGHHHHHH

SEQ ID NO: 970 - DNA, 5310 bp, synthetic construct
  misc_feature 1..5310: note = Description of Artificial Sequence: Synthetic polynucleotide
  source 1..5310: mol_type = other DNA
gccaccagaagatactacctgggtgcagtggaactgtcatgggactatatgcaaagtgatctcggtgagctgcctgtggacgcaagatttcctcctagagtgccaaaatcttttccattcaacacctcagtcgtgtacaaaaagactctgtttgtagaattcacggatcaccttttcaacatcgctaagccaaggccaccctggatgggtctgctaggtcctaccatccaggctgaggtttatgatacagtggtcattacacttaagaacatggcttcccatcctgtcagtcttcatgctgttggtgtatcctactggaaagcttctgagggagctgaatatgatgatcagaccagtcaaagggagaaagaagatgataaagtcttccctggtggaagccatacatatgtctggcaggtcctgaaagagaatggtccaatggcctctgacccactgtgccttacctactcatatctttctcatgtggacctggtaaaagacttgaattcaggcctcattggagccctactagtatgtagagaagggagtctggccaaggaaaagacacagaccttgcacaaatttatactactttttgctgtatttgatgaagggaaaagttggcactcagaaacaaagaactccttgatgcaggatagggatgctgcatctgctcgggcctggcctaaaatgcacacagtcaatggttatgtaaacaggtctctgccaggtctgattggatgccacaggaaatcagtctattggcatgtgattggaatgggcaccactcctgaagtgcactcaatattcctcgaaggtcacacatttcttgtgaggaaccatcgccaggctagcttggaaatctcgccaataactttccttactgctcaaacactcttgatggaccttggacagtttctactgttttgtcatatctcttcccaccaacatgatggcatggaagcttatgtcaaagtagacagctgtccagaggaaccccaactacgaatgaaaaataatgaagaagcggaagactatgatgatgatcttactgattctgaaatggatgtggtcaggtttgatgatgacaactctccttcctttatccaaattcgctcagttgccaagaagcatcctaaaacttgggtacattacattgctgctgaagaggaggactgggactatgctcccttagtcctcgcccccgatgacagaagttataaaagtcaatatttgaacaatggccctcagcggattggtaggaagtacaaaaaagtccgatttatggcatacacagatgaaacctttaagactcgtgaagctattcagcatgaatcaggaatcttgggacctttactttatggggaagttggagacacactgttgattatatttaagaatcaagcaagcagaccatataacatctaccctcacggaatcactgatgtccgtcctttgtattcaaggagattaccaaaaggtgtaaaacatttgaaggattttccaattctgccaggagaaatattcaaatataaatggacagtgactgtagaagatgggccaactaaatcagatcctcggtgcctgacccgctattactctagtttcgttaatatggagagagatctagcttcaggactcattggccctctcctcatctgctacaaagaatctgtagatcaaagaggaaaccagataatgtcagacaagaggaatgtcatcctgttttctgtatttgatgagaaccgaagctggtacctcacagagaatatacaacgctttctccccaatccagctggagtgcagcttgaggatccagagttccaagcctccaacatcatgcacagcatcaatggctatgtttttgatagtttgcagttgtcagtttgtttgcatgaggtggcatactggtacattctaagcattggagcacagactgacttcctttctgtcttcttctctggatataccttcaaacacaaaatggtctatgaagacacactcaccctattcccattctcaggagaaactgtcttcatgtcgatggaaaacccaggtctatggattctggggtgccacaactcagactttcggaacagaggcatgaccgccttactgaaggtttctagttgtgacaagaacactggtgattattacgaggacagttatgaagatatttcagcatacttgctgagtaaaaacaatgccattgaaccaagaagcttctctcaaaacccaccagtcttgaaacgccatcaacgggaaataactcgtactactcttcagggcgcgccaggtacacccggatcgggtacagcgtcatcgagccccggtgcgtcacctggtacgtcgagcacggggtcgccaggggcgtcccctgggacgtcctcaacaggctcgcccggtgcgtcacccggcacgtcgtccacgggttcacctggtagctccccttccgcgtccactggcaccgggcctggaactccggggagcggcacagcgagctcgtcgccgggagcatcgcctgggacatcgagcaccgggtcgccaggagcatcgcccggaacatccagcacaggaagccccggcgcgtcgcccgggacatcaagcacaggttccccgggatcgagcacgccgtccggagccactggatcaccagggagctcgacaccttccggcgcaacgggatcgcccggagccagcccgggtacgtcaagcactggctcccctgcctcgagctcagatcaagaggaaatcgattatgatgataccatatcagttgaaatgaagaaggaagattttgacatttatgatgaggatgaaaatcagagcccccgcagctttcaaaagaaaacacgacactattttattgctgcagtggagaggctctgggattatgggatgagtagctccccacatgttctaagaaacagggctcagagtggcagtgtccctcagttcaagaaagttgttttccaggaatttactgatggctcctttactcagcccttataccgtggagaactaaatgaacatttgggactcctggggccatatataagagcagaagttgaagataatatcatggtaactttcagaaatcaggcctctcgtccctattccttctattctagccttatttcttatgaggaagatcagaggcaaggagcagaacctagaaaaaactttgtcaagcctaatgaaaccaaaacttacttttggaaagtgcaacatcatatggcacccactaaagatgagtttgactgcaaagcctgggcttatttctctgatgttgacctggaaaaagatgtgcactcaggcctgattggaccccttctggtctgccacactaacacactgaaccctgctcatgggagacaagtgacagtacaggaatttgctctgtttttcaccatctttgatgagaccaaaagctggtacttcactgaaaatatggaaagaaactgcaggggcgcgccaggtacacccggatcgggtacagcgtcatcgagccccggtgcgtcacctggtacgtcgagcacggggtcgccaggggcgtcccctgggacgtcctcaacaggctcgcccggtgcgtcacccggcacgtcgtccacgggttcacctggtagctccccttccgcgtccactggcaccgggcctggaactccggggagcggcacagcgagctcgtcgccgggagcatcgcctgggacatcgagcaccgggtcgccaggagcatcgcccggaacatccagcacaggaagccccggcgcgtcgcccgggacatcaagcacaggttccccgggatcgagcacgccgtccggagccactggatcaccagggagctcgacaccttccggcgcaacgggatcgcccggagccagcccgggtacgtcaagcactggctcccctgcctcgagcgctccctgcaatatccagatggaagatcccacttttaaagagaattatcgcttccatgcaatcaatggctacataatggatacactacctggcttagtaatggctcaggatcaaaggattcgatggtatctgctcagcatgggcagcaatgaaaacatccattctattcatttcagtggacatgtgttcactgtacgaaaaaaagaggagtataaaatggcactgtacaatctctatccaggtgtttttgagacagtggaaatgttaccatccaaagctggaatttggcgggtggaatgccttattggcgagcatctacatgctgggatgagcacactttttctggtgtacagcaataagtgtcagactcccctgggaatggcttctggacacattagagattttcagattacagcttcaggacaatatggacagtgggccccaaagctggccagacttcattattccggatcaatcaatgcctggagcaccaaggagcccttttcttggatcaaggtggatctgttggcaccaatgattattcacggcatcaagacccagggtgcccgtcagaagttctccagcctctacatctctcagtttatcatcatgtatagtcttgatgggaagaagtggcagacttatcgaggaaattccactggaaccttaatggtcttctttggcaatgtggattcatctgggataaaacacaatatttttaaccctccaattattgctcgatacatccgtttgcacccaactcattatagcattcgcagcactcttcgcatggagttgatgggctgtgatttaaatagttgcagcatgccattgggaatggagagtaaagcaatatcagatgcacagattactgcttcatcctactttaccaatatgtttgccacctggtctccttcaaaagctcgacttcacctccaagggaggagtaatgcctggagacctcaggtgaataatccaaaagagtggctgcaagtggacttccagaagacaatgaaagtcacaggagtaactactcagggagtaaaatctctgcttaccagcatgtatgtgaaggagttcctcatctccagcagtcaagatggccatcagtggactctcttttttcagaatggcaaagtaaaggtttttcagggaaatcaagactccttcacacctgtggtgaactctctagacccaccgttactgactcgctaccttcgaattcacccccagagttgggtgcaccagattgccctgaggatggaggttctgggctgcgaggcacaggacctctacggcgccggatcacctggggccgaaacggccgaacaaaaactcatctcagaagaggatctgtcacctgcaaccggtcatcatcaccatcaccattga

SEQ ID NO: 971 - protein, 1769 aa, synthetic construct
  REGION 1..1769: note = Description of Artificial Sequence: Synthetic polypeptide
ATRRYYLGAVELSWDYMQSDLGELPVDARFPPRVPKSFPFNTSVVYKKTLFVEFTDHLFNIAKPRPPWMGLLGPTIQAEVYDTVVITLKNMASHPVSLHAVGVSYWKASEGAEYDDQTSQREKEDDKVFPGGSHTYVWQVLKENGPMASDPLCLTYSYLSHVDLVKDLNSGLIGALLVCREGSLAKEKTQTLHKFILLFAVFDEGKSWHSETKNSLMQDRDAASARAWPKMHTVNGYVNRSLPGLIGCHRKSVYWHVIGMGTTPEVHSIFLEGHTFLVRNHRQASLEISPITFLTAQTLLMDLGQFLLFCHISSHQHDGMEAYVKVDSCPEEPQLRMKNNEEAEDYDDDLTDSEMDVVRFDDDNSPSFIQIRSVAKKHPKTWVHYIAAEEEDWDYAPLVLAPDDRSYKSQYLNNGPQRIGRKYKKVRFMAYTDETFKTREAIQHESGILGPLLYGEVGDTLLIIFKNQASRPYNIYPHGITDVRPLYSRRLPKGVKHLKDFPILPGEIFKYKWTVTVEDGPTKSDPRCLTRYYSSFVNMERDLASGLIGPLLICYKESVDQRGNQIMSDKRNVILFSVFDENRSWYLTENIQRFLPNPAGVQLEDPEFQASNIMHSINGYVFDSLQLSVCLHEVAYWYILSIGAQTDFLSVFFSGYTFKHKMVYEDTLTLFPFSGETVFMSMENPGLWILGCHNSDFRNRGMTALLKVSSCDKNTGDYYEDSYEDISAYLLSKNNAIEPRSFSQNPPVLKRHQREITRTTLQGAPGTPGSGTASSSPGASPGTSSTGSPGASPGTSSTGSPGASPGTSSTGSPGSSPSASTGTGPGTPGSGTASSSPGASPGTSSTGSPGASPGTSSTGSPGASPGTSSTGSPGSSTPSGATGSPGSSTPSGATGSPGASPGTSSTGSPASSSDQEEIDYDDTISVEMKKEDFDIYDEDENQSPRSFQKKTRHYFIAAVERLWDYGMSSSPHVLRNRAQSGSVPQFKKVVFQEFTDGSFTQPLYRGELNEHLGLLGPYIRAEVEDNIMVTFRNQASRPYSFYSSLISYEEDQRQGAEPRKNFVKPNETKTYFWKVQHHMAPTKDEFDCKAWAYFSDVDLEKDVHSGLIGPLLVCHTNTLNPAHGRQVTVQEFALFFTIFDETKSWYFTENMERNCRGAPTSESATPESGPGSEPATSGSETPGTSESATPESGPGSEPATSGSETPGTSESATPESGPGTSTEPSEGSAPGTSESATPESGPGSPAGSPTSTEEGSPAGSPTSTEEGSPAGSPTSTEEGTSESATPESGPGTSTEPSEGSAPGASSAPCNIQMEDPTFKENYRFHAINGYIMDTLPGLVMAQDQRIRWYLLSMGSNENIHSIHFSGHVFTVRKKEEYKMALYNLYPGVFETVEMLPSKAGIWRVECLIGEHLHAGMSTLFLVYSNKCQTPLGMASGHIRDFQITASGQYGQWAPKLARLHYSGSINAWSTKEPFSWIKVDLLAPMIIHGIKTQGARQKFSSLYISQFIIMYSLDGKKWQTYRGNSTGTLMVFFGNVDSSGIKHNIFNPPIIARYIRLHPTHYSIRSTLRMELMGCDLNSCSMPLGMESKAISDAQITASSYFTNMFATWSPSKARLHLQGRSNAWRPQVNNPKEWLQVDFQKTMKVTGVTTQGVKSLLTSMYVKEFLISSSQDGHQWTLFFQNGKVKVFQGNQDSFTPVVNSLDPPLLTRYLRIHPQSWVHQIALRMEVLGCEAQDLYGAGSPGAETAEQKLISEEDLSPATGHHHHHH

SEQ ID NO: 972 - DNA, 5310 bp, synthetic construct
  misc_feature 1..5310: note = Description of Artificial Sequence: Synthetic polynucleotide
  source 1..5310: mol_type = other DNA
gccaccagaagatactacctgggtgcagtggaactgtcatgggactatatgcaaagtgatctcggtgagctgcctgtggacgcaagatttcctcctagagtgccaaaatcttttccattcaacacctcagtcgtgtacaaaaagactctgtttgtagaattcacggatcaccttttcaacatcgctaagccaaggccaccctggatgggtctgctaggtcctaccatccaggctgaggtttatgatacagtggtcattacacttaagaacatggcttcccatcctgtcagtcttcatgctgttggtgtatcctactggaaagcttctgagggagctgaatatgatgatcagaccagtcaaagggagaaagaagatgataaagtcttccctggtggaagccatacatatgtctggcaggtcctgaaagagaatggtccaatggcctctgacccactgtgccttacctactcatatctttctcatgtggacctggtaaaagacttgaattcaggcctcattggagccctactagtatgtagagaagggagtctggccaaggaaaagacacagaccttgcacaaatttatactactttttgctgtatttgatgaagggaaaagttggcactcagaaacaaagaactccttgatgcaggatagggatgctgcatctgctcgggcctggcctaaaatgcacacagtcaatggttatgtaaacaggtctctgccaggtctgattggatgccacaggaaatcagtctattggcatgtgattggaatgggcaccactcctgaagtgcactcaatattcctcgaaggtcacacatttcttgtgaggaaccatcgccaggctagcttggaaatctcgccaataactttccttactgctcaaacactcttgatggaccttggacagtttctactgttttgtcatatctcttcccaccaacatgatggcatggaagcttatgtcaaagtagacagctgtccagaggaaccccaactacgaatgaaaaataatgaagaagcggaagactatgatgatgatcttactgattctgaaatggatgtggtcaggtttgatgatgacaactctccttcctttatccaaattcgctcagttgccaagaagcatcctaaaacttgggtacattacattgctgctgaagaggaggactgggactatgctcccttagtcctcgcccccgatgacagaagttataaaagtcaatatttgaacaatggccctcagcggattggtaggaagtacaaaaaagtccgatttatggcatacacagatgaaacctttaagactcgtgaagctattcagcatgaatcaggaatcttgggacctttactttatggggaagttggagacacactgttgattatatttaagaatcaagcaagcagaccatataacatctaccctcacggaatcactgatgtccgtcctttgtattcaaggagattaccaaaaggtgtaaaacatttgaaggattttccaattctgccaggagaaatattcaaatataaatggacagtgactgtagaagatgggccaactaaatcagatcctcggtgcctgacccgctattactctagtttcgttaatatggagagagatctagcttcaggactcattggccctctcctcatctgctacaaagaatctgtagatcaaagaggaaaccagataatgtcagacaagaggaatgtcatcctgttttctgtatttgatgagaaccgaagctggtacctcacagagaatatacaacgctttctccccaatccagctggagtgcagcttgaggatccagagttccaagcctccaacatcatgcacagcatcaatggctatgtttttgatagtttgcagttgtcagtttgtttgcatgaggtggcatactggtacattctaagcattggagcacagactgacttcctttctgtcttcttctctggatataccttcaaacacaaaatggtctatgaagacacactcaccctattcccattctcaggagaaactgtcttcatgtcgatggaaaacccaggtctatggattctggggtgccacaactcagactttcggaacagaggcatgaccgccttactgaaggtttctagttgtgacaagaacactggtgattattacgaggacagttatgaagatatttcagcatacttgctgagtaaaaacaatgccattgaaccaagaagcttctctcaaaacccaccagtcttgaaacgccatcaacgggaaataactcgtactactcttcagggcgcgccaggtacacccggatcgggtacagcgtcatcgagccccggtgcgtcacctggtacgtcgagcacggggtcgccaggggcgtcccctgggacgtcctcaacaggctcgcccggtgcgtcacccggcacgtcgtccacgggttcacctggtagctccccttccgcgtccactggcaccgggcctggaactccggggagcggcacagcgagctcgtcgccgggagcatcgcctgggacatcgagcaccgggtcgccaggagcatcgcccggaacatccagcacaggaagccccggcgcgtcgcccgggacatcaagcacaggttccccgggatcgagcacgccgtccggagccactggatcaccagggagctcgacaccttccggcgcaacgggatcgcccggagccagcccgggtacgtcaagcactggctcccctgcctcgagctcagatcaagaggaaatcgattatgatgataccatatcagttgaaatgaagaaggaagattttgacatttatgatgaggatgaaaatcagagcccccgcagctttcaaaagaaaacacgacactattttattgctgcagtggagaggctctgggattatgggatgagtagctccccacatgttctaagaaacagggctcagagtggcagtgtccctcagttcaagaaagttgttttccaggaatttactgatggctcctttactcagcccttataccgtggagaactaaatgaacatttgggactcctggggccatatataagagcagaagttgaagataatatcatggtaactttcagaaatcaggcctctcgtccctattccttctattctagccttatttcttatgaggaagatcagaggcaaggagcagaacctagaaaaaactttgtcaagcctaatgaaaccaaaacttacttttggaaagtgcaacatcatatggcacccactaaagatgagtttgactgcaaagcctgggcttatttctctgatgttgacctggaaaaagatgtgcactcaggcctgattggaccccttctggtctgccacactaacacactgaaccctgctcatgggagacaagtgacagtacaggaatttgctctgtttttcaccatctttgatgagaccaaaagctggtacttcactgaaaatatggaaagaaactgcaggggcgcgccaacgtccgaaagtgctacccctgagtcaggccctggtagtgagcctgccacaagcggaagcgaaactccggggacctcagagtctgccactcccgaatcggggccaggctctgaaccggccacttcagggagcgaaacaccaggaacatcggagagcgctaccccggagagcgggccaggaactagtactgagcctagcgagggaagtgcacctggtacaagcgagtccgccacacccgagtctggccctggctctccagcgggctcacccacgagcactgaagagggctctcccgctggcagcccaacgtcgacagaagaaggatcaccagcaggctcccccacatcaacagaggagggtacatcagaatctgctactcccgagagtggacccggtacctccactgagcccagcgaggggagtgcaccaggtgcctcgagcgctccctgcaatatccagatggaagatcccacttttaaagagaattatcgcttccatgcaatcaatggctacataatggatacactacctggcttagtaatggctcaggatcaaaggattcgatggtatctgctcagcatgggcagcaatgaaaacatccattctattcatttcagtggacatgtgttcactgtacgaaaaaaagaggagtataaaatggcactgtacaatctctatccaggtgtttttgagacagtggaaatgttaccatccaaagctggaatttggcgggtggaatgccttattggcgagcatctacatgctgggatgagcacactttttctggtgtacagcaataagtgtcagactcccctgggaatggcttctggacacattagagattttcagattacagcttcaggacaatatggacagtgggccccaaagctggccagacttcattattccggatcaatcaatgcctggagcaccaaggagcccttttcttggatcaaggtggatctgttggcaccaatgattattcacggcatcaagacccagggtgcccgtcagaagttctccagcctctacatctctcagtttatcatcatgtatagtcttgatgggaagaagtggcagacttatcgaggaaattccactggaaccttaatggtcttctttggcaatgtggattcatctgggataaaacacaatatttttaaccctccaattattgctcgatacatccgtttgcacccaactcattatagcattcgcagcactcttcgcatggagttgatgggctgtgatttaaatagttgcagcatgccattgggaatggagagtaaagcaatatcagatgcacagattactgcttcatcctactttaccaatatgtttgccacctggtctccttcaaaagctcgacttcacctccaagggaggagtaatgcctggagacctcaggtgaataatccaaaagagtggctgcaagtggacttccagaagacaatgaaagtcacaggagtaactactcagggagtaaaatctctgcttaccagcatgtatgtgaaggagttcctcatctccagcagtcaagatggccatcagtggactctcttttttcagaatggcaaagtaaaggtttttcagggaaatcaagactccttcacacctgtggtgaactctctagacccaccgttactgactcgctaccttcgaattcacccccagagttgggtgcaccagattgccctgaggatggaggttctgggctgcgaggcacaggacctctacggcgccggatcacctggggccgaaacggccgaacaaaaactcatctcagaagaggatctgtcacctgcaaccggtcatcatcaccatcaccattga

SEQ ID NO: 973 - protein, 1769 aa, synthetic construct
  REGION 1..1769: note = Description of Artificial Sequence: Synthetic polypeptide
ATRRYYLGAVELSWDYMQSDLGELPVDARFPPRVPKSFPFNTSVVYKKTLFVEFTDHLFNIAKPRPPWMGLLGPTIQAEVYDTVVITLKNMASHPVSLHAVGVSYWKASEGAEYDDQTSQREKEDDKVFPGGSHTYVWQVLKENGPMASDPLCLTYSYLSHVDLVKDLNSGLIGALLVCREGSLAKEKTQTLHKFILLFAVFDEGKSWHSETKNSLMQDRDAASARAWPKMHTVNGYVNRSLPGLIGCHRKSVYWHVIGMGTTPEVHSIFLEGHTFLVRNHRQASLEISPITFLTAQTLLMDLGQFLLFCHISSHQHDGMEAYVKVDSCPEEPQLRMKNNEEAEDYDDDLTDSEMDVVRFDDDNSPSFIQIRSVAKKHPKTWVHYIAAEEEDWDYAPLVLAPDDRSYKSQYLNNGPQRIGRKYKKVRFMAYTDETFKTREAIQHESGILGPLLYGEVGDTLLIIFKNQASRPYNIYPHGITDVRPLYSRRLPKGVKHLKDFPILPGEIFKYKWTVTVEDGPTKSDPRCLTRYYSSFVNMERDLASGLIGPLLICYKESVDQRGNQIMSDKRNVILFSVFDENRSWYLTENIQRFLPNPAGVQLEDPEFQASNIMHSINGYVFDSLQLSVCLHEVAYWYILSIGAQTDFLSVFFSGYTFKHKMVYEDTLTLFPFSGETVFMSMENPGLWILGCHNSDFRNRGMTALLKVSSCDKNTGDYYEDSYEDISAYLLSKNNAIEPRSFSQNPPVLKRHQREITRTTLQGAPGTPGSGTASSSPGASPGTSSTGSPGASPGTSSTGSPGASPGTSSTGSPGSSPSASTGTGPGTPGSGTASSSPGASPGTSSTGSPGASPGTSSTGSPGASPGTSSTGSPGSSTPSGATGSPGSSTPSGATGSPGASPGTSSTGSPASSSDQEEIDYDDTISVEMKKEDFDIYDEDENQSPRSFQKKTRHYFIAAVERLWDYGMSSSPHVLRNRAQSGSVPQFKKVVFQEFTDGSFTQPLYRGELNEHLGLLGPYIRAEVEDNIMVTFRNQASRPYSFYSSLISYEEDQRQGAEPRKNFVKPNETKTYFWKVQHHMAPTKDEFDCKAWAYFSDVDLEKDVHSGLIGPLLVCHTNTLNPAHGRQVTVQEFALFFTIFDETKSWYFTENMERNCRAPCNIGAPGTPGSGTASSSPGASPGTSSTGSPGASPGTSSTGSPGASPGTSSTGSPGSSPSASTGTGPGTPGSGTASSSPGASPGTSSTGSPGASPGTSSTGSPGASPGTSSTGSPGSSTPSGATGSPGSSTPSGATGSPGASPGTSSTGSPASSQMEDPTFKENYRFHAINGYIMDTLPGLVMAQDQRIRWYLLSMGSNENIHSIHFSGHVFTVRKKEEYKMALYNLYPGVFETVEMLPSKAGIWRVECLIGEHLHAGMSTLFLVYSNKCQTPLGMASGHIRDFQITASGQYGQWAPKLARLHYSGSINAWSTKEPFSWIKVDLLAPMIIHGIKTQGARQKFSSLYISQFIIMYSLDGKKWQTYRGNSTGTLMVFFGNVDSSGIKHNIFNPPIIARYIRLHPTHYSIRSTLRMELMGCDLNSCSMPLGMESKAISDAQITASSYFTNMFATWSPSKARLHLQGRSNAWRPQVNNPKEWLQVDFQKTMKVTGVTTQGVKSLLTSMYVKEFLISSSQDGHQWTLFFQNGKVKVFQGNQDSFTPVVNSLDPPLLTRYLRIHPQSWVHQIALRMEVLGCEAQDLYGAGSPGAETAEQKLISEEDLSPATGHHHHHH

SEQ ID NO: 974 - DNA, 5310 bp, synthetic construct
  misc_feature 1..5310: note = Description of Artificial Sequence: Synthetic polynucleotide
  source 1..5310: mol_type = other DNA
gccaccagaagatactacctgggtgcagtggaactgtcatgggactatatgcaaagtgatctcggtgagctgcctgtggacgcaagatttcctcctagagtgccaaaatcttttccattcaacacctcagtcgtgtacaaaaagactctgtttgtagaattcacggatcaccttttcaacatcgctaagccaaggccaccctggatgggtctgctaggtcctaccatccaggctgaggtttatgatacagtggtcattacacttaagaacatggcttcccatcctgtcagtcttcatgctgttggtgtatcctactggaaagcttctgagggagctgaatatgatgatcagaccagtcaaagggagaaagaagatgataaagtcttccctggtggaagccatacatatgtctggcaggtcctgaaagagaatggtccaatggcctctgacccactgtgccttacctactcatatctttctcatgtggacctggtaaaagacttgaattcaggcctcattggagccctactagtatgtagagaagggagtctggccaaggaaaagacacagaccttgcacaaatttatactactttttgctgtatttgatgaagggaaaagttggcactcagaaacaaagaactccttgatgcaggatagggatgctgcatctgctcgggcctggcctaaaatgcacacagtcaatggttatgtaaacaggtctctgccaggtctgattggatgccacaggaaatcagtctattggcatgtgattggaatgggcaccactcctgaagtgcactcaatattcctcgaaggtcacacatttcttgtgaggaaccatcgccaggctagcttggaaatctcgccaataactttccttactgctcaaacactcttgatggaccttggacagtttctactgttttgtcatatctcttcccaccaacatgatggcatggaagcttatgtcaaagtagacagctgtccagaggaaccccaactacgaatgaaaaataatgaagaagcggaagactatgatgatgatcttactgattctgaaatggatgtggtcaggtttgatgatgacaactctccttcctttatccaaattcgctcagttgccaagaagcatcctaaaacttgggtacattacattgctgctgaagaggaggactgggactatgctcccttagtcctcgcccccgatgacagaagttataaaagtcaatatttgaacaatggccctcagcggattggtaggaagtacaaaaaagtccgatttatggcatacacagatgaaacctttaagactcgtgaagctattcagcatgaatcaggaatcttgggacctttactttatggggaagttggagacacactgttgattatatttaagaatcaagcaagcagaccatataacatctaccctcacggaatcactgatgtccgtcctttgtattcaaggagattaccaaaaggtgtaaaacatttgaaggattttccaattctgccaggagaaatattcaaatataaatggacagtgactgtagaagatgggccaactaaatcagatcctcggtgcctgacccgctattactctagtttcgttaatatggagagagatctagcttcaggactcattggccctctcctcatctgctacaaagaatctgtagatcaaagaggaaaccagataatgtcagacaagaggaatgtcatcctgttttctgtatttgatgagaaccgaagctggtacctcacagagaatatacaacgctttctccccaatccagctggagtgcagcttgaggatccagagttccaagcctccaacatcatgcacagcatcaatggctatgtttttgatagtttgcagttgtcagtttgtttgcatgaggtggcatactggtacattctaagcattggagcacagactgacttcctttctgtcttcttctctggatataccttcaaacacaaaatggtctatgaagacacactcaccctattcccattctcaggagaaactgtcttcatgtcgatggaaaacccaggtctatggattctggggtgccacaactcagactttcggaacagaggcatgaccgccttactgaaggtttctagttgtgacaagaacactggtgattattacgaggacagttatgaagatatttcagcatacttgctgagtaaaaacaatgccattgaaccaagaagcttctctcaaaacccaccagtcttgaaacgccatcaacgggaaataactcgtactactcttcagggcgcgccaggtacacccggatcgggtacagcgtcatcgagccccggtgcgtcacctggtacgtcgagcacggggtcgccaggggcgtcccctgggacgtcctcaacaggctcgcccggtgcgtcacccggcacgtcgtccacgggttcacctggtagctccccttccgcgtccactggcaccgggcctggaactccggggagcggcacagcgagctcgtcgccgggagcatcgcctgggacatcgagcaccgggtcgccaggagcatcgcccggaacatccagcacaggaagccccggcgcgtcgcccgggacatcaagcacaggttccccgggatcgagcacgccgtccggagccactggatcaccagggagctcgacaccttccggcgcaacgggatcgcccggagccagcccgggtacgtcaagcactggctcccctgcctcgagctcagatcaagaggaaatcgattatgatgataccatatcagttgaaatgaagaaggaagattttgacatttatgatgaggatgaaaatcagagcccccgcagctttcaaaagaaaacacgacactattttattgctgcagtggagaggctctgggattatgggatgagtagctccccacatgttctaagaaacagggctcagagtggcagtgtccctcagttcaagaaagttgttttccaggaatttactgatggctcctttactcagcccttataccgtggagaactaaatgaacatttgggactcctggggccatatataagagcagaagttgaagataatatcatggtaactttcagaaatcaggcctctcgtccctattccttctattctagccttatttcttatgaggaagatcagaggcaaggagcagaacctagaaaaaactttgtcaagcctaatgaaaccaaaacttacttttggaaagtgcaacatcatatggcacccactaaagatgagtttgactgcaaagcctgggcttatttctctgatgttgacctggaaaaagatgtgcactcaggcctgattggaccccttctggtctgccacactaacacactgaaccctgctcatgggagacaagtgacagtacaggaatttgctctgtttttcaccatctttgatgagaccaaaagctggtacttcactgaaaatatggaaagaaactgcagggctccctgcaatatcggcgcgccaggtacacccggatcgggtacagcgtcatcgagccccggtgcgtcacctggtacgtcgagcacggggtcgccaggggcgtcccctgggacgtcctcaacaggctcgcccggtgcgtcacccggcacgtcgtccacgggttcacctggtagctccccttccgcgtccactggcaccgggcctggaactccggggagcggcacagcgagctcgtcgccgggagcatcgcctgggacatcgagcaccgggtcgccaggagcatcgcccggaacatccagcacaggaagccccggcgcgtcgcccgggacatcaagcacaggttccccgggatcgagcacgccgtccggagccactggatcaccagggagctcgacaccttccggcgcaacgggatcgcccggagccagcccgggtacgtcaagcactggctcccctgcctcgagccagatggaagatcccacttttaaagagaattatcgcttccatgcaatcaatggctacataatggatacactacctggcttagtaatggctcaggatcaaaggattcgatggtatctgctcagcatgggcagcaatgaaaacatccattctattcatttcagtggacatgtgttcactgtacgaaaaaaagaggagtataaaatggcactgtacaatctctatccaggtgtttttgagacagtggaaatgttaccatccaaagctggaatttggcgggtggaatgccttattggcgagcatctacatgctgggatgagcacactttttctggtgtacagcaataagtgtcagactcccctgggaatggcttctggacacattagagattttcagattacagcttcaggacaatatggacagtgggccccaaagctggccagacttcattattccggatcaatcaatgcctggagcaccaaggagcccttttcttggatcaaggtggatctgttggcaccaatgattattcacggcatcaagacccagggtgcccgtcagaagttctccagcctctacatctctcagtttatcatcatgtatagtcttgatgggaagaagtggcagacttatcgaggaaattccactggaaccttaatggtcttctttggcaatgtggattcatctgggataaaacacaatatttttaaccctccaattattgctcgatacatccgtttgcacccaactcattatagcattcgcagcactcttcgcatggagttgatgggctgtgatttaaatagttgcagcatgccattgggaatggagagtaaagcaatatcagatgcacagattactgcttcatcctactttaccaatatgtttgccacctggtctccttcaaaagctcgacttcacctccaagggaggagtaatgcctggagacctcaggtgaataatccaaaagagtggctgcaagtggacttccagaagacaatgaaagtcacaggagtaactactcagggagtaaaatctctgcttaccagcatgtatgtgaaggagttcctcatctccagcagtcaagatggccatcagtggactctcttttttcagaatggcaaagtaaaggtttttcagggaaatcaagactccttcacacctgtggtgaactctctagacccaccgttactgactcgctaccttcgaattcacccccagagttgggtgcaccagattgccctgaggatggaggttctgggctgcgaggcacaggacctctacggcgccggatcacctggggccgaaacggccgaacaaaaactcatctcagaagaggatctgtcacctgcaaccggtcatcatcaccatcaccattga

SEQ ID NO: 975 - protein, 1769 aa, synthetic construct
  REGION 1..1769: note = Description of Artificial Sequence: Synthetic polypeptide
ATRRYYLGAVELSWDYMQSDLGELPVDARFPPRVPKSFPFGAPGSSPSASTGTGPGSSPSASTGTGPGASPGTSSTGSPGASPGTSSTGSPGSSTPSGATGSPGSSPSASTGTGPGASPGTSSTGSPGSSPSASTGTGPGTPGSGTASSSPGSSTPSGATGSPGSSTPSGATGSPGASPGTSSTGSPASSNTSVVYKKTLFVEFTDHLFNIAKPRPPWMGLLGPTIQAEVYDTVVITLKNMASHPVSLHAVGVSYWKASEGAEYDDQTSQREKEDDKVFPGGSHTYVWQVLKENGPMASDPLCLTYSYLSHVDLVKDLNSGLIGALLVCREGSLAKEKTQTLHKFILLFAVFDEGKSWHSETKNSLMQDRDAASARAWPKMHTVNGYVNRSLPGLIGCHRKSVYWHVIGMGTTPEVHSIFLEGHTFLVRNHRQASLEISPITFLTAQTLLMDLGQFLLFCHISSHQHDGMEAYVKVDSCPEEPQLRMKNNEEAEDYDDDLTDSEMDVVRFDDDNSPSFIQIRSVAKKHPKTWVHYIAAEEEDWDYAPLVLAPDDRSYKSQYLNNGPQRIGRKYKKVRFMAYTDETFKTREAIQHESGILGPLLYGEVGDTLLIIFKNQASRPYNIYPHGITDVRPLYSRRLPKGVKHLKDFPILPGEIFKYKWTVTVEDGPTKSDPRCLTRYYSSFVNMERDLASGLIGPLLICYKESVDQRGNQIMSDKRNVILFSVFDENRSWYLTENIQRFLPNPAGVQLEDPEFQASNIMHSINGYVFDSLQLSVCLHEVAYWYILSIGAQTDFLSVFFSGYTFKHKMVYEDTLTLFPFSGETVFMSMENPGLWILGCHNSDFRNRGMTALLKVSSCDKNTGDYYEDSYEDISAYLLSKNNAIEPRSFSQNPPVLKRHQREITRTTLQSDQEEIDYDDTISVEMKKEDFDIYDEDENQSPRSFQKKTRHYFIAAVERLWDYGMGAPTSESATPESGPGSEPATSGSETPGTSESATPESGPGSEPATSGSETPGTSESATPESGPGTSTEPSEGSAPGTSESATPESGPGSPAGSPTSTEEGSPAGSPTSTEEGSPAGSPTSTEEGTSESATPESGPGTSTEPSEGSAPGASSSSSPHVLRNRAQSGSVPQFKKVVFQEFTDGSFTQPLYRGELNEHLGLLGPYIRAEVEDNIMVTFRNQASRPYSFYSSLISYEEDQRQGAEPRKNFVKPNETKTYFWKVQHHMAPTKDEFDCKAWAYFSDVDLEKDVHSGLIGPLLVCHTNTLNPAHGRQVTVQEFALFFTIFDETKSWYFTENMERNCRAPCNIQMEDPTFKENYRFHAINGYIMDTLPGLVMAQDQRIRWYLLSMGSNENIHSIHFSGHVFTVRKKEEYKMALYNLYPGVFETVEMLPSKAGIWRVECLIGEHLHAGMSTLFLVYSNKCQTPLGMASGHIRDFQITASGQYGQWAPKLARLHYSGSINAWSTKEPFSWIKVDLLAPMIIHGIKTQGARQKFSSLYISQFIIMYSLDGKKWQTYRGNSTGTLMVFFGNVDSSGIKHNIFNPPIIARYIRLHPTHYSIRSTLRMELMGCDLNSCSMPLGMESKAISDAQITASSYFTNMFATWSPSKARLHLQGRSNAWRPQVNNPKEWLQVDFQKTMKVTGVTTQGVKSLLTSMYVKEFLISSSQDGHQWTLFFQNGKVKVFQGNQDSFTPVVNSLDPPLLTRYLRIHPQSWVHQIALRMEVLGCEAQDLYGAGSPGAETAEQKLISEEDLSPATGHHHHHH

SEQ ID NO: 976 - DNA, 5310 bp, synthetic construct
  misc_feature 1..5310: note = Description of Artificial Sequence: Synthetic polynucleotide
  source 1..5310: mol_type = other DNA
gccaccagaagatactacctgggtgcagtggaactgtcatgggactatatgcaaagtgatctcggtgagctgcctgtggacgcaagatttcctcctagagtgccaaaatcttttccattcggcgcgccaggctccagcccctccgcgagcacgggaaccggaccaggttcgtcaccctcagcatcaacggggacgggaccgggggcgtcaccaggaacgtcctccaccggctcgccgggtgcatcacccggaacgtcatcgaccggatcgccagggagctcgacgccatcaggcgcaacaggatcacctggctcaagccctagcgcgtcaaccggcacgggtccgggtgcctcccctggcacgtccagcaccggatcacccggatcgagcccatccgcctcaaccggaaccggacccggtacaccagggtcgggaacagcctcctcgtcaccaggctcctcaaccccctcgggagccacgggttcgcccggttcgtcaacgccttccggagcaactggtagccccggagcatcgccaggaacttcgagcacggggtcgcccgcctcgagcaacacctcagtcgtgtacaaaaagactctgtttgtagaattcacggatcaccttttcaacatcgctaagccaaggccaccctggatgggtctgctaggtcctaccatccaggctgaggtttatgatacagtggtcattacacttaagaacatggcttcccatcctgtcagtcttcatgctgttggtgtatcctactggaaagcttctgagggagctgaatatgatgatcagaccagtcaaagggagaaagaagatgataaagtcttccctggtggaagccatacatatgtctggcaggtcctgaaagagaatggtccaatggcctctgacccactgtgccttacctactcatatctttctcatgtggacctggtaaaagacttgaattcaggcctcattggagccctactagtatgtagagaagggagtctggccaaggaaaagacacagaccttgcacaaatttatactactttttgctgtatttgatgaagggaaaagttggcactcagaaacaaagaactccttgatgcaggatagggatgctgcatctgctcgggcctggcctaaaatgcacacagtcaatggttatgtaaacaggtctctgccaggtctgattggatgccacaggaaatcagtctattggcatgtgattggaatgggcaccactcctgaagtgcactcaatattcctcgaaggtcacacatttcttgtgaggaaccatcgccaggctagcttggaaatctcgccaataactttccttactgctcaaacactcttgatggaccttggacagtttctactgttttgtcatatctcttcccaccaacatgatggcatggaagcttatgtcaaagtagacagctgtccagaggaaccccaactacgaatgaaaaataatgaagaagcggaagactatgatgatgatcttactgattctgaaatggatgtggtcaggtttgatgatgacaactctccttcctttatccaaattcgctcagttgccaagaagcatcctaaaacttgggtacattacattgctgctgaagaggaggactgggactatgctcccttagtcctcgcccccgatgacagaagttataaaagtcaatatttgaacaatggccctcagcggattggtaggaagtacaaaaaagtccgatttatggcatacacagatgaaacctttaagactcgtgaagctattcagcatgaatcaggaatcttgggacctttactttatggggaagttggagacacactgttgattatatttaagaatcaagcaagcagaccatataacatctaccctcacggaatcactgatgtccgtcctttgtattcaaggagattaccaaaaggtgtaaaacatttgaaggattttccaattctgccaggagaaatattcaaatataaatggacagtgactgtagaagatgggccaactaaatcagatcctcggtgcctgacccgctattactctagtttcgttaatatggagagagatctagcttcaggactcattggccctctcctcatctgctacaaagaatctgtagatcaaagaggaaaccagataatgtcagacaagaggaatgtcatcctgttttctgtatttgatgagaaccgaagctggtacctcacagagaatatacaacgctttctccccaatccagctggagtgcagcttgaggatccagagttccaagcctccaacatcatgcacagcatcaatggctatgtttttgatagtttgcagttgtcagtttgtttgcatgaggtggcatactggtacattctaagcattggagcacagactgacttcctttctgtcttcttctctggatataccttcaaacacaaaatggtctatgaagacacactcaccctattcccattctcaggagaaactgtcttcatgtcgatggaaaacccaggtctatggattctggggtgccacaactcagactttcggaacagaggcatgaccgccttactgaaggtttctagttgtgacaagaacactggtgattattacgaggacagttatgaagatatttcagcatacttgctgagtaaaaacaatgccattgaaccaagaagcttctctcaaaacccaccagtcttgaaacgccatcaacgggaaataactcgtactactcttcagtcagatcaagaggaaatcgattatgatgataccatatcagttgaaatgaagaaggaagattttgacatttatgatgaggatgaaaatcagagcccccgcagctttcaaaagaaaacacgacactattttattgctgcagtggagaggctctgggattatgggatgggcgcgccaacgtccgaaagtgctacccctgagtcaggccctggtagtgagcctgccacaagcggaagcgaaactccggggacctcagagtctgccactcccgaatcggggccaggctctgaaccggccacttcagggagcgaaacaccaggaacatcggagagcgctaccccggagagcgggccaggaactagtactgagcctagcgagggaagtgcacctggtacaagcgagtccgccacacccgagtctggccctggctctccagcgggctcacccacgagcactgaagagggctctcccgctggcagcccaacgtcgacagaagaaggatcaccagcaggctcccccacatcaacagaggagggtacatcagaatctgctactcccgagagtggacccggtacctccactgagcccagcgaggggagtgcaccaggtgcctcgagcagtagctccccacatgttctaagaaacagggctcagagtggcagtgtccctcagttcaagaaagttgttttccaggaatttactgatggctcctttactcagcccttataccgtggagaactaaatgaacatttgggactcctggggccatatataagagcagaagttgaagataatatcatggtaactttcagaaatcaggcctctcgtccctattccttctattctagccttatttcttatgaggaagatcagaggcaaggagcagaacctagaaaaaactttgtcaagcctaatgaaaccaaaacttacttttggaaagtgcaacatcatatggcacccactaaagatgagtttgactgcaaagcctgggcttatttctctgatgttgacctggaaaaagatgtgcactcaggcctgattggaccccttctggtctgccacactaacacactgaaccctgctcatgggagacaagtgacagtacaggaatttgctctgtttttcaccatctttgatgagaccaaaagctggtacttcactgaaaatatggaaagaaactgcagggctccctgcaatatccagatggaagatcccacttttaaagagaattatcgcttccatgcaatcaatggctacataatggatacactacctggcttagtaatggctcaggatcaaaggattcgatggtatctgctcagcatgggcagcaatgaaaacatccattctattcatttcagtggacatgtgttcactgtacgaaaaaaagaggagtataaaatggcactgtacaatctctatccaggtgtttttgagacagtggaaatgttaccatccaaagctggaatttggcgggtggaatgccttattggcgagcatctacatgctgggatgagcacactttttctggtgtacagcaataagtgtcagactcccctgggaatggcttctggacacattagagattttcagattacagcttcaggacaatatggacagtgggccccaaagctggccagacttcattattccggatcaatcaatgcctggagcaccaaggagcccttttcttggatcaaggtggatctgttggcaccaatgattattcacggcatcaagacccagggtgcccgtcagaagttctccagcctctacatctctcagtttatcatcatgtatagtcttgatgggaagaagtggcagacttatcgaggaaattccactggaaccttaatggtcttctttggcaatgtggattcatctgggataaaacacaatatttttaaccctccaattattgctcgatacatccgtttgcacccaactcattatagcattcgcagcactcttcgcatggagttgatgggctgtgatttaaatagttgcagcatgccattgggaatggagagtaaagcaatatcagatgcacagattactgcttcatcctactttaccaatatgtttgccacctggtctccttcaaaagctcgacttcacctccaagggaggagtaatgcctggagacctcaggtgaataatccaaaagagtggctgcaagtggacttccagaagacaatgaaagtcacaggagtaactactcagggagtaaaatctctgcttaccagcatgtatgtgaaggagttcctcatctccagcagtcaagatggccatcagtggactctcttttttcagaatggcaaagtaaaggtttttcagggaaatcaagactccttcacacctgtggtgaactctctagacccaccgttactgactcgctaccttcgaattcacccccagagttgggtgcaccagattgccctgaggatggaggttctgggctgcgaggcacaggacctctacggcgccggatcacctggggccgaaacggccgaacaaaaactcatctcagaagaggatctgtcacctgcaaccggtcatcatcaccatcaccattga

SEQ ID NO: 977 - protein, 1769 aa, synthetic construct
  REGION 1..1769: note = Description of Artificial Sequence: Synthetic polypeptide
ATRRYYLGAVELSWDYMQSDLGELPVGAPTSESATPESGPGSEPATSGSETPGTSESATPESGPGSEPATSGSETPGTSESATPESGPGTSTEPSEGSAPGSPAGSPTSTEEGTSESATPESGPGSEPATSGSETPGTSESATPESGPGSPAGSPTSTEEGSPAGSPTSTEEGASSDARFPPRVPKSFPFNTSVVYKKTLFVEFTDHLFNIAKPRPPWMGLLGPTIQAEVYDTVVITLKNMASHPVSLHAVGVSYWKASEGAEYDDQTSQREKEDDKVFPGGSHTYVWQVLKENGPMASDPLCLTYSYLSHVDLVKDLNSGLIGALLVCREGSLAKEKTQTLHKFILLFAVFDEGKSWHSETKNSLMQDRDAASARAWPKMHTVNGYVNRSLPGLIGCHRKSVYWHVIGMGTTPEVHSIFLEGHTFLVRNHRQASLEISPITFLTAQTLLMDLGQFLLFCHISSHQHDGMEAYVKVDSCPEEPQLRMKNNEEAEDYDDDLTDSEMDVVRFDDDNSPSFIQIRSVAKKHPKTWVHYIAAEEEDWDYAPLVLAPDDRSYKSQYLNNGPQRIGRKYKKVRFMAYTDETFKTREAIQHESGILGPLLYGEVGDTLLIIFKNQASRPYNIYPHGITDVRPLYSRRLPKGVKHLKDFPILPGEIFKYKWTVTVEDGPTKSDPRCLTRYYSSFVNMERDLASGLIGPLLICYKESVDQRGNQIMSDKRNVILFSVFDENRSWYLTENIQRFLPNPAGVQLEDPEFQASNIMHSINGYVFDSLQLSVCLHEVAYWYILSIGAQTDFLSVFFSGYTFKHKMVYEDTLTLFPFSGETVFMSMENPGLWILGCHNSDFRNRGMTALLKVSSCDKNTGDYYEDSYEDISAYLLSKNNAIEPRSFSQNPPVLKRHQREITRTTLQSDQEEIDYDDTISVEMKKEDFDIYDEDENQSPRSFQKKTRHYFIAAVERLWDYGMGAPTSESATPESGPGSEPATSGSETPGTSESATPESGPGSEPATSGSETPGTSESATPESGPGTSTEPSEGSAPGTSESATPESGPGSPAGSPTSTEEGSPAGSPTSTEEGSPAGSPTSTEEGTSESATPESGPGTSTEPSEGSAPGASSSSSPHVLRNRAQSGSVPQFKKVVFQEFTDGSFTQPLYRGELNEHLGLLGPYIRAEVEDNIMVTFRNQASRPYSFYSSLISYEEDQRQGAEPRKNFVKPNETKTYFWKVQHHMAPTKDEFDCKAWAYFSDVDLEKDVHSGLIGPLLVCHTNTLNPAHGRQVTVQEFALFFTIFDETKSWYFTENMERNCRAPCNIQMEDPTFKENYRFHAINGYIMDTLPGLVMAQDQRIRWYLLSMGSNENIHSIHFSGHVFTVRKKEEYKMALYNLYPGVFETVEMLPSKAGIWRVECLIGEHLHAGMSTLFLVYSNKCQTPLGMASGHIRDFQITASGQYGQWAPKLARLHYSGSINAWSTKEPFSWIKVDLLAPMIIHGIKTQGARQKFSSLYISQFIIMYSLDGKKWQTYRGNSTGTLMVFFGNVDSSGIKHNIFNPPIIARYIRLHPTHYSIRSTLRMELMGCDLNSCSMPLGMESKAISDAQITASSYFTNMFATWSPSKARLHLQGRSNAWRPQVNNPKEWLQVDFQKTMKVTGVTTQGVKSLLTSMYVKEFLISSSQDGHQWTLFFQNGKVKVFQGNQDSFTPVVNSLDPPLLTRYLRIHPQSWVHQIALRMEVLGCEAQDLYGAGSPGAETAEQKLISEEDLSPATGHHHHHH

SEQ ID NO: 978 - DNA, 5310 bp, synthetic construct
  misc_feature 1..5310: note = Description of Artificial Sequence: Synthetic polynucleotide
  source 1..5310: mol_type = other DNA
gccaccagaagatactacctgggtgcagtggaactgtcatgggactatatgcaaagtgatctcggtgagctgcctgtgggcgcgccaacatcagagagcgccacccctgaaagtggtcccgggagcgagccagccacatctgggtcggaaacgccaggcacaagtgagtctgcaactcccgagtccggacctggctccgagcctgccactagcggctccgagactccgggaacttccgagagcgctacaccagaaagcggacccggaaccagtaccgaacctagcgagggctctgctccgggcagcccagccggctctcctacatccacggaggagggcacttccgaatccgccaccccggagtcagggccaggatctgaacccgctacctcaggcagtgagacgccaggaacgagcgagtccgctacaccggagagtgggccagggagccctgctggatctcctacgtccactgaggaagggtcaccagcgggctcgcccaccagcactgaagaaggtgcctcgagcgacgcaagatttcctcctagagtgccaaaatcttttccattcaacacctcagtcgtgtacaaaaagactctgtttgtagaattcacggatcaccttttcaacatcgctaagccaaggccaccctggatgggtctgctaggtcctaccatccaggctgaggtttatgatacagtggtcattacacttaagaacatggcttcccatcctgtcagtcttcatgctgttggtgtatcctactggaaagcttctgagggagctgaatatgatgatcagaccagtcaaagggagaaagaagatgataaagtcttccctggtggaagccatacatatgtctggcaggtcctgaaagagaatggtccaatggcctctgacccactgtgccttacctactcatatctttctcatgtggacctggtaaaagacttgaattcaggcctcattggagccctactagtatgtagagaagggagtctggccaaggaaaagacacagaccttgcacaaatttatactactttttgctgtatttgatgaagggaaaagttggcactcagaaacaaagaactccttgatgcaggatagggatgctgcatctgctcgggcctggcctaaaatgcacacagtcaatggttatgtaaacaggtctctgccaggtctgattggatgccacaggaaatcagtctattggcatgtgattggaatgggcaccactcctgaagtgcactcaatattcctcgaaggtcacacatttcttgtgaggaaccatcgccaggctagcttggaaatctcgccaataactttccttactgctcaaacactcttgatggaccttggacagtttctactgttttgtcatatctcttcccaccaacatgatggcatggaagcttatgtcaaagtagacagctgtccagaggaaccccaactacgaatgaaaaataatgaagaagcggaagactatgatgatgatcttactgattctgaaatggatgtggtcaggtttgatgatgacaactctccttcctttatccaaattcgctcagttgccaagaagcatcctaaaacttgggtacattacattgctgctgaagaggaggactgggactatgctcccttagtcctcgcccccgatgacagaagttataaaagtcaatatttgaacaatggccctcagcggattggtaggaagtacaaaaaagtccgatttatggcatacacagatgaaacctttaagactcgtgaagctattcagcatgaatcaggaatcttgggacctttactttatggggaagttggagacacactgttgattatatttaagaatcaagcaagcagaccatataacatctaccctcacggaatcactgatgtccgtcctttgtattcaaggagattaccaaaaggtgtaaaacatttgaaggattttccaattctgccaggagaaatattcaaatataaatggacagtgactgtagaagatgggccaactaaatcagatcctcggtgcctgacccgctattactctagtttcgttaatatggagagagatctagcttcaggactcattggccctctcctcatctgctacaaagaatctgtagatcaaagaggaaaccagataatgtcagacaagaggaatgtcatcctgttttctgtatttgatgagaaccgaagctggtacctcacagagaatatacaacgctttctccccaatccagctggagtgcagcttgaggatccagagttccaagcctccaacatcatgcacagcatcaatggctatgtttttgatagtttgcagttgtcagtttgtttgcatgaggtggcatactggtacattctaagcattggagcacagactgacttcctttctgtcttcttctctggatataccttcaaacacaaaatggtctatgaagacacactcaccctattcccattctcaggagaaactgtcttcatgtcgatggaaaacccaggtctatggattctggggtgccacaactcagactttcggaacagaggcatgaccgccttactgaaggtttctagttgtgacaagaacactggtgattattacgaggacagttatgaagatatttcagcatacttgctgagtaaaaacaatgccattgaaccaagaagcttctctcaaaacccaccagtcttgaaacgccatcaacgggaaataactcgtactactcttcagtcagatcaagaggaaatcgattatgatgataccatatcagttgaaatgaagaaggaagattttgacatttatgatgaggatgaaaatcagagcccccgcagctttcaaaagaaaacacgacactattttattgctgcagtggagaggctctgggattatgggatgggcgcgccaacgtccgaaagtgctacccctgagtcaggccctggtagtgagcctgccacaagcggaagcgaaactccggggacctcagagtctgccactcccgaatcggggccaggctctgaaccggccacttcagggagcgaaacaccaggaacatcggagagcgctaccccggagagcgggccaggaactagtactgagcctagcgagggaagtgcacctggtacaagcgagtccgccacacccgagtctggccctggctctccagcgggctcacccacgagcactgaagagggctctcccgctggcagcccaacgtcgacagaagaaggatcaccagcaggctcccccacatcaacagaggagggtacatcagaatctgctactcccgagagtggacccggtacctccactgagcccagcgaggggagtgcaccaggtgcctcgagcagtagctccccacatgttctaagaaacagggctcagagtggcagtgtccctcagttcaagaaagttgttttccaggaatttactgatggctcctttactcagcccttataccgtggagaactaaatgaacatttgggactcctggggccatatataagagcagaagttgaagataatatcatggtaactttcagaaatcaggcctctcgtccctattccttctattctagccttatttcttatgaggaagatcagaggcaaggagcagaacctagaaaaaactttgtcaagcctaatgaaaccaaaacttacttttggaaagtgcaacatcatatggcacccactaaagatgagtttgactgcaaagcctgggcttatttctctgatgttgacctggaaaaagatgtgcactcaggcctgattggaccccttctggtctgccacactaacacactgaaccctgctcatgggagacaagtgacagtacaggaatttgctctgtttttcaccatctttgatgagaccaaaagctggtacttcactgaaaatatggaaagaaactgcagggctccctgcaatatccagatggaagatcccacttttaaagagaattatcgcttccatgcaatcaatggctacataatggatacactacctggcttagtaatggctcaggatcaaaggattcgatggtatctgctcagcatgggcagcaatgaaaacatccattctattcatttcagtggacatgtgttcactgtacgaaaaaaagaggagtataaaatggcactgtacaatctctatccaggtgtttttgagacagtggaaatgttaccatccaaagctggaatttggcgggtggaatgccttattggcgagcatctacatgctgggatgagcacactttttctggtgtacagcaataagtgtcagactcccctgggaatggcttctggacacattagagattttcagattacagcttcaggacaatatggacagtgggccccaaagctggccagacttcattattccggatcaatcaatgcctggagcaccaaggagcccttttcttggatcaaggtggatctgttggcaccaatgattattcacggcatcaagacccagggtgcccgtcagaagttctccagcctctacatctctcagtttatcatcatgtatagtcttgatgggaagaagtggcagacttatcgaggaaattccactggaaccttaatggtcttctttggcaatgtggattcatctgggataaaacacaatatttttaaccctccaattattgctcgatacatccgtttgcacccaactcattatagcattcgcagcactcttcgcatggagttgatgggctgtgatttaaatagttgcagcatgccattgggaatggagagtaaagcaatatcagatgcacagattactgcttcatcctactttaccaatatgtttgccacctggtctccttcaaaagctcgacttcacctccaagggaggagtaatgcctggagacctcaggtgaataatccaaaagagtggctgcaagtggacttccagaagacaatgaaagtcacaggagtaactactcagggagtaaaatctctgcttaccagcatgtatgtgaaggagttcctcatctccagcagtcaagatggccatcagtggactctcttttttcagaatggcaaagtaaaggtttttcagggaaatcaagactccttcacacctgtggtgaactctctagacccaccgttactgactcgctaccttcgaattcacccccagagttgggtgcaccagattgccctgaggatggaggttctgggctgcgaggcacaggacctctacggcgccggatcacctggggccgaaacggccgaacaaaaactcatctcagaagaggatctgtcacctgcaaccggtcatcatcaccatcaccattga

SEQ ID NO: 979 - protein, 1772 aa, synthetic construct
  REGION 1..1772: note = Description of Artificial Sequence: Synthetic polypeptide
ATRRYYLGAVELSWDYMQSDLGELPVGAPGSSPSASTGTGPGSSPSASTGTGPGASPGTSSTGSPGASPGTSSTGSPGSSTPSGATGSPGSSPSASTGTGPGASPGTSSTGSPGSSPSASTGTGPGTPGSGTASSSPGSSTPSGATGSPGSSTPSGATGSPGASPGTSSTGSPASSDARFPPRVPKSFPFNTSVVYKKTLFVEFTDHLFNIAKPRPPWMGLLGPTIQAEVYDTVVITLKNMASHPVSLHAVGVSYWKASEGAEYDDQTSQREKEDDKVFPGGSHTYVWQVLKENGPMASDPLCLTYSYLSHVDLVKDLNSGLIGALLVCREGSLAKEKTQTLHKFILLFAVFDEGKSWHSETKNSLMQDRDAASARAWPKMHTVNGYVNRSLPGLIGCHRKSVYWHVIGMGTTPEVHSIFLEGHTFLVRNHRQASLEISPITFLTAQTLLMDLGQFLLFCHISSHQHDGMEAYVKVDSCPEEPQLRMKNNEEAEDYDDDLTDSEMDVVRFDDDNSPSFIQIRSVAKKHPKTWVHYIAAEEEDWDYAPLVLAPDDRSYKSQYLNNGPQRIGRKYKKVRFMAYTDETFKTREAIQHESGILGPLLYGEVGDTLLIIFKNQASRPYNIYPHGITDVRPLYSRRLPKGVKHLKDFPILPGEIFKYKWTVTVEDGPTKSDPRCLTRYYSSFVNMERDLASGLIGPLLICYKESVDQRGNQIMSDKRNVILFSVFDENRSWYLTENIQRFLPNPAGVQLEDPEFQASNIMHSINGYVFDSLQLSVCLHEVAYWYILSIGAQTDFLSVFFSGYTFKHKMVYEDTLTLFPFSGETVFMSMENPGLWILGCHNSDFRNRGMTALLKVSSCDKNTGDYYEDSYEDISAYLLSKNNAIEPRSFSQNPPVLKRHQREITRTTLQSDQEEIDYDDTISVEMKKEDFDIYDEDENQSPRSFQKKTRHYFIAAVERLWDYGMSSSPHVLRNRAQGAPGTPGSGTASSSPGASPGTSSTGSPGASPGTSSTGSPGASPGTSSTGSPGSSPSASTGTGPGTPGSGTASSSPGASPGTSSTGSPGASPGTSSTGSPGASPGTSSTGSPGSSTPSGATGSPGSSTPSGATGSPGASPGTSSTGSPASSRAQSGSVPQFKKVVFQEFTDGSFTQPLYRGELNEHLGLLGPYIRAEVEDNIMVTFRNQASRPYSFYSSLISYEEDQRQGAEPRKNFVKPNETKTYFWKVQHHMAPTKDEFDCKAWAYFSDVDLEKDVHSGLIGPLLVCHTNTLNPAHGRQVTVQEFALFFTIFDETKSWYFTENMERNCRAPCNIQMEDPTFKENYRFHAINGYIMDTLPGLVMAQDQRIRWYLLSMGSNENIHSIHFSGHVFTVRKKEEYKMALYNLYPGVFETVEMLPSKAGIWRVECLIGEHLHAGMSTLFLVYSNKCQTPLGMASGHIRDFQITASGQYGQWAPKLARLHYSGSINAWSTKEPFSWIKVDLLAPMIIHGIKTQGARQKFSSLYISQFIIMYSLDGKKWQTYRGNSTGTLMVFFGNVDSSGIKHNIFNPPIIARYIRLHPTHYSIRSTLRMELMGCDLNSCSMPLGMESKAISDAQITASSYFTNMFATWSPSKARLHLQGRSNAWRPQVNNPKEWLQVDFQKTMKVTGVTTQGVKSLLTSMYVKEFLISSSQDGHQWTLFFQNGKVKVFQGNQDSFTPVVNSLDPPLLTRYLRIHPQSWVHQIALRMEVLGCEAQDLYGAGSPGAETAEQKLISEEDLSPATGHHHHHH

SEQ ID NO: 980 - DNA, 5319 bp, synthetic construct
  misc_feature 1..5319: note = Description of Artificial Sequence: Synthetic polynucleotide
  source 1..5319: mol_type = other DNA
gccaccagaagatactacctgggtgcagtggaactgtcatgggactatatgcaaagtgatctcggtgagctgcctgtgggcgcgccaggctccagcccctccgcgagcacgggaaccggaccaggttcgtcaccctcagcatcaacggggacgggaccgggggcgtcaccaggaacgtcctccaccggctcgccgggtgcatcacccggaacgtcatcgaccggatcgccagggagctcgacgccatcaggcgcaacaggatcacctggctcaagccctagcgcgtcaaccggcacgggtccgggtgcctcccctggcacgtccagcaccggatcacccggatcgagcccatccgcctcaaccggaaccggacccggtacaccagggtcgggaacagcctcctcgtcaccaggctcctcaaccccctcgggagccacgggttcgcccggttcgtcaacgccttccggagcaactggtagccccggagcatcgccaggaacttcgagcacggggtcgcccgcctcgagcgacgcaagatttcctcctagagtgccaaaatcttttccattcaacacctcagtcgtgtacaaaaagactctgtttgtagaattcacggatcaccttttcaacatcgctaagccaaggccaccctggatgggtctgctaggtcctaccatccaggctgaggtttatgatacagtggtcattacacttaagaacatggcttcccatcctgtcagtcttcatgctgttggtgtatcctactggaaagcttctgagggagctgaatatgatgatcagaccagtcaaagggagaaagaagatgataaagtcttccctggtggaagccatacatatgtctggcaggtcctgaaagagaatggtccaatggcctctgacccactgtgccttacctactcatatctttctcatgtggacctggtaaaagacttgaattcaggcctcattggagccctactagtatgtagagaagggagtctggccaaggaaaagacacagaccttgcacaaatttatactactttttgctgtatttgatgaagggaaaagttggcactcagaaacaaagaactccttgatgcaggatagggatgctgcatctgctcgggcctggcctaaaatgcacacagtcaatggttatgtaaacaggtctctgccaggtctgattggatgccacaggaaatcagtctattggcatgtgattggaatgggcaccactcctgaagtgcactcaatattcctcgaaggtcacacatttcttgtgaggaaccatcgccaggctagcttggaaatctcgccaataactttccttactgctcaaacactcttgatggaccttggacagtttctactgttttgtcatatctcttcccaccaacatgatggcatggaagcttatgtcaaagtagacagctgtccagaggaaccccaactacgaatgaaaaataatgaagaagcggaagactatgatgatgatcttactgattctgaaatggatgtggtcaggtttgatgatgacaactctccttcctttatccaaattcgctcagttgccaagaagcatcctaaaacttgggtacattacattgctgctgaagaggaggactgggactatgctcccttagtcctcgcccccgatgacagaagttataaaagtcaatatttgaacaatggccctcagcggattggtaggaagtacaaaaaagtccgatttatggcatacacagatgaaacctttaagactcgtgaagctattcagcatgaatcaggaatcttgggacctttactttatggggaagttggagacacactgttgattatatttaagaatcaagcaagcagaccatataacatctaccctcacggaatcactgatgtccgtcctttgtattcaaggagattaccaaaaggtgtaaaacatttgaaggattttccaattctgccaggagaaatattcaaatataaatggacagtgactgtagaagatgggccaactaaatcagatcctcggtgcctgacccgctattactctagtttcgttaatatggagagagatctagcttcaggactcattggccctctcctcatctgctacaaagaatctgtagatcaaagaggaaaccagataatgtcagacaagaggaatgtcatcctgttttctgtatttgatgagaaccgaagctggtacctcacagagaatatacaacgctttctccccaatccagctggagtgcagcttgaggatccagagttccaagcctccaacatcatgcacagcatcaatggctatgtttttgatagtttgcagttgtcagtttgtttgcatgaggtggcatactggtacattctaagcattggagcacagactgacttcctttctgtcttcttctctggatataccttcaaacacaaaatggtctatgaagacacactcaccctattcccattctcaggagaaactgtcttcatgtcgatggaaaacccaggtctatggattctggggtgccacaactcagactttcggaacagaggcatgaccgccttactgaaggtttctagttgtgacaagaacactggtgattattacgaggacagttatgaagatatttcagcatacttgctgagtaaaaacaatgccattgaaccaagaagcttctctcaaaacccaccagtcttgaaacgccatcaacgggaaataactcgtactactcttcagtcagatcaagaggaaatcgattatgatgataccatatcagttgaaatgaagaaggaagattttgacatttatgatgaggatgaaaatcagagcccccgcagctttcaaaagaaaacacgacactattttattgctgcagtggagaggctctgggattatgggatgagtagctccccacatgttctaagaaacagggctcagggcgcgccaggtacacccggatcgggtacagcgtcatcgagccccggtgcgtcacctggtacgtcgagcacggggtcgccaggggcgtcccctgggacgtcctcaacaggctcgcccggtgcgtcacccggcacgtcgtccacgggttcacctggtagctccccttccgcgtccactggcaccgggcctggaactccggggagcggcacagcgagctcgtcgccgggagcatcgcctgggacatcgagcaccgggtcgccaggagcatcgcccggaacatccagcacaggaagccccggcgcgtcgcccgggacatcaagcacaggttccccgggatcgagcacgccgtccggagccactggatcaccagggagctcgacaccttccggcgcaacgggatcgcccggagccagcccgggtacgtcaagcactggctcccctgcctcgagcagggctcagagtggcagtgtccctcagttcaagaaagttgttttccaggaatttactgatggctcctttactcagcccttataccgtggagaactaaatgaacatttgggactcctggggccatatataagagcagaagttgaagataatatcatggtaactttcagaaatcaggcctctcgtccctattccttctattctagccttatttcttatgaggaagatcagaggcaaggagcagaacctagaaaaaactttgtcaagcctaatgaaaccaaaacttacttttggaaagtgcaacatcatatggcacccactaaagatgagtttgactgcaaagcctgggcttatttctctgatgttgacctggaaaaagatgtgcactcaggcctgattggaccccttctggtctgccacactaacacactgaaccctgctcatgggagacaagtgacagtacaggaatttgctctgtttttcaccatctttgatgagaccaaaagctggtacttcactgaaaatatggaaagaaactgcagggctccctgcaatatccagatggaagatcccacttttaaagagaattatcgcttccatgcaatcaatggctacataatggatacactacctggcttagtaatggctcaggatcaaaggattcgatggtatctgctcagcatgggcagcaatgaaaacatccattctattcatttcagtggacatgtgttcactgtacgaaaaaaagaggagtataaaatggcactgtacaatctctatccaggtgtttttgagacagtggaaatgttaccatccaaagctggaatttggcgggtggaatgccttattggcgagcatctacatgctgggatgagcacactttttctggtgtacagcaataagtgtcagactcccctgggaatggcttctggacacattagagattttcagattacagcttcaggacaatatggacagtgggccccaaagctggccagacttcattattccggatcaatcaatgcctggagcaccaaggagcccttttcttggatcaaggtggatctgttggcaccaatgattattcacggcatcaagacccagggtgcccgtcagaagttctccagcctctacatctctcagtttatcatcatgtatagtcttgatgggaagaagtggcagacttatcgaggaaattccactggaaccttaatggtcttctttggcaatgtggattcatctgggataaaacacaatatttttaaccctccaattattgctcgatacatccgtttgcacccaactcattatagcattcgcagcactcttcgcatggagttgatgggctgtgatttaaatagttgcagcatgccattgggaatggagagtaaagcaatatcagatgcacagattactgcttcatcctactttaccaatatgtttgccacctggtctccttcaaaagctcgacttcacctccaagggaggagtaatgcctggagacctcaggtgaataatccaaaagagtggctgcaagtggacttccagaagacaatgaaagtcacaggagtaactactcagggagtaaaatctctgcttaccagcatgtatgtgaaggagttcctcatctccagcagtcaagatggccatcagtggactctcttttttcagaatggcaaagtaaaggtttttcagggaaatcaagactccttcacacctgtggtgaactctctagacccaccgttactgactcgctaccttcgaattcacccccagagttgggtgcaccagattgccctgaggatggaggttctgggctgcgaggcacaggacctctacggcgccggatcacctggggccgaaacggccgaacaaaaactcatctcagaagaggatctgtcacctgcaaccggtcatcatcaccatcaccattga

SEQ ID NO: 981 - protein, 1772 aa, synthetic construct
  REGION 1..1772: note = Description of Artificial Sequence: Synthetic polypeptide
ATRRYYLGAVELSWDYMQSDLGELPVDARFPPRVPKSFPFGAPGSSPSASTGTGPGSSPSASTGTGPGASPGTSSTGSPGASPGTSSTGSPGSSTPSGATGSPGSSPSASTGTGPGASPGTSSTGSPGSSPSASTGTGPGTPGSGTASSSPGSSTPSGATGSPGSSTPSGATGSPGASPGTSSTGSPASSNTSVVYKKTLFVEFTDHLFNIAKPRPPWMGLLGPTIQAEVYDTVVITLKNMASHPVSLHAVGVSYWKASEGAEYDDQTSQREKEDDKVFPGGSHTYVWQVLKENGPMASDPLCLTYSYLSHVDLVKDLNSGLIGALLVCREGSLAKEKTQTLHKFILLFAVFDEGKSWHSETKNSLMQDRDAASARAWPKMHTVNGYVNRSLPGLIGCHRKSVYWHVIGMGTTPEVHSIFLEGHTFLVRNHRQASLEISPITFLTAQTLLMDLGQFLLFCHISSHQHDGMEAYVKVDSCPEEPQLRMKNNEEAEDYDDDLTDSEMDVVRFDDDNSPSFIQIRSVAKKHPKTWVHYIAAEEEDWDYAPLVLAPDDRSYKSQYLNNGPQRIGRKYKKVRFMAYTDETFKTREAIQHESGILGPLLYGEVGDTLLIIFKNQASRPYNIYPHGITDVRPLYSRRLPKGVKHLKDFPILPGEIFKYKWTVTVEDGPTKSDPRCLTRYYSSFVNMERDLASGLIGPLLICYKESVDQRGNQIMSDKRNVILFSVFDENRSWYLTENIQRFLPNPAGVQLEDPEFQASNIMHSINGYVFDSLQLSVCLHEVAYWYILSIGAQTDFLSVFFSGYTFKHKMVYEDTLTLFPFSGETVFMSMENPGLWILGCHNSDFRNRGMTALLKVSSCDKNTGDYYEDSYEDISAYLLSKNNAIEPRSFSQNPPVLKRHQREITRTTLQSDQEEIDYDDTISVEMKKEDFDIYDEDENQSPRSFQKKTRHYFIAAVERLWDYGMSSSPHVLRNRAQGAPGTPGSGTASSSPGASPGTSSTGSPGASPGTSSTGSPGASPGTSSTGSPGSSPSASTGTGPGTPGSGTASSSPGASPGTSSTGSPGASPGTSSTGSPGASPGTSSTGSPGSSTPSGATGSPGSSTPSGATGSPGASPGTSSTGSPASSRAQSGSVPQFKKVVFQEFTDGSFTQPLYRGELNEHLGLLGPYIRAEVEDNIMVTFRNQASRPYSFYSSLISYEEDQRQGAEPRKNFVKPNETKTYFWKVQHHMAPTKDEFDCKAWAYFSDVDLEKDVHSGLIGPLLVCHTNTLNPAHGRQVTVQEFALFFTIFDETKSWYFTENMERNCRAPCNIQMEDPTFKENYRFHAINGYIMDTLPGLVMAQDQRIRWYLLSMGSNENIHSIHFSGHVFTVRKKEEYKMALYNLYPGVFETVEMLPSKAGIWRVECLIGEHLHAGMSTLFLVYSNKCQTPLGMASGHIRDFQITASGQYGQWAPKLARLHYSGSINAWSTKEPFSWIKVDLLAPMIIHGIKTQGARQKFSSLYISQFIIMYSLDGKKWQTYRGNSTGTLMVFFGNVDSSGIKHNIFNPPIIARYIRLHPTHYSIRSTLRMELMGCDLNSCSMPLGMESKAISDAQITASSYFTNMFATWSPSKARLHLQGRSNAWRPQVNNPKEWLQVDFQKTMKVTGVTTQGVKSLLTSMYVKEFLISSSQDGHQWTLFFQNGKVKVFQGNQDSFTPVVNSLDPPLLTRYLRIHPQSWVHQIALRMEVLGCEAQDLYGAGSPGAETAEQKLISEEDLSPATGHHHHHH

SEQ ID NO: 982 - DNA, 5319 bp, synthetic construct
  misc_feature 1..5319: note = Description of Artificial Sequence: Synthetic polynucleotide
  source 1..5319: mol_type = other DNA
gccaccagaagatactacctgggtgcagtggaactgtcatgggactatatgcaaagtgatctcggtgagctgcctgtggacgcaagatttcctcctagagtgccaaaatcttttccattcggcgcgccaggctccagcccctccgcgagcacgggaaccggaccaggttcgtcaccctcagcatcaacggggacgggaccgggggcgtcaccaggaacgtcctccaccggctcgccgggtgcatcacccggaacgtcatcgaccggatcgccagggagctcgacgccatcaggcgcaacaggatcacctggctcaagccctagcgcgtcaaccggcacgggtccgggtgcctcccctggcacgtccagcaccggatcacccggatcgagcccatccgcctcaaccggaaccggacccggtacaccagggtcgggaacagcctcctcgtcaccaggctcctcaaccccctcgggagccacgggttcgcccggttcgtcaacgccttccggagcaactggtagccccggagcatcgccaggaacttcgagcacggggtcgcccgcctcgagcaacacctcagtcgtgtacaaaaagactctgtttgtagaattcacggatcaccttttcaacatcgctaagccaaggccaccctggatgggtctgctaggtcctaccatccaggctgaggtttatgatacagtggtcattacacttaagaacatggcttcccatcctgtcagtcttcatgctgttggtgtatcctactggaaagcttctgagggagctgaatatgatgatcagaccagtcaaagggagaaagaagatgataaagtcttccctggtggaagccatacatatgtctggcaggtcctgaaagagaatggtccaatggcctctgacccactgtgccttacctactcatatctttctcatgtggacctggtaaaagacttgaattcaggcctcattggagccctactagtatgtagagaagggagtctggccaaggaaaagacacagaccttgcacaaatttatactactttttgctgtatttgatgaagggaaaagttggcactcagaaacaaagaactccttgatgcaggatagggatgctgcatctgctcgggcctggcctaaaatgcacacagtcaatggttatgtaaacaggtctctgccaggtctgattggatgccacaggaaatcagtctattggcatgtgattggaatgggcaccactcctgaagtgcactcaatattcctcgaaggtcacacatttcttgtgaggaaccatcgccaggctagcttggaaatctcgccaataactttccttactgctcaaacactcttgatggaccttggacagtttctactgttttgtcatatctcttcccaccaacatgatggcatggaagcttatgtcaaagtagacagctgtccagaggaaccccaactacgaatgaaaaataatgaagaagcggaagactatgatgatgatcttactgattctgaaatggatgtggtcaggtttgatgatgacaactctccttcctttatccaaattcgctcagttgccaagaagcatcctaaaacttgggtacattacattgctgctgaagaggaggactgggactatgctcccttagtcctcgcccccgatgacagaagttataaaagtcaatatttgaacaatggccctcagcggattggtaggaagtacaaaaaagtccgatttatggcatacacagatgaaacctttaagactcgtgaagctattcagcatgaatcaggaatcttgggacctttactttatggggaagttggagacacactgttgattatatttaagaatcaagcaagcagaccatataacatctaccctcacggaatcactgatgtccgtcctttgtattcaaggagattaccaaaaggtgtaaaacatttgaaggattttccaattctgccaggagaaatattcaaatataaatggacagtgactgtagaagatgggccaactaaatcagatcctcggtgcctgacccgctattactctagtttcgttaatatggagagagatctagcttcaggactcattggccctctcctcatctgctacaaagaatctgtagatcaaagaggaaaccagataatgtcagacaagaggaatgtcatcctgttttctgtatttgatgagaaccgaagctggtacctcacagagaatatacaacgctttctccccaatccagctggagtgcagcttgaggatccagagttccaagcctccaacatcatgcacagcatcaatggctatgtttttgatagtttgcagttgtcagtttgtttgcatgaggtggcatactggtacattctaagcattggagcacagactgacttcctttctgtcttcttctctggatataccttcaaacacaaaatggtctatgaagacacactcaccctattcccattctcaggagaaactgtcttcatgtcgatggaaaacccaggtctatggattctggggtgccacaactcagactttcggaacagaggcatgaccgccttactgaaggtttctagttgtgacaagaacactggtgattattacgaggacagttatgaagatatttcagcatacttgctgagtaaaaacaatgccattgaaccaagaagcttctctcaaaacccaccagtcttgaaacgccatcaacgggaaataactcgtactactcttcagtcagatcaagaggaaatcgattatgatgataccatatcagttgaaatgaagaaggaagattttgacatttatgatgaggatgaaaatcagagcccccgcagctttcaaaagaaaacacgacactattttattgctgcagtggagaggctctgggattatgggatgagtagctccccacatgttctaagaaacagggctcagggcgcgccaggtacacccggatcgggtacagcgtcatcgagccccggtgcgtcacctggtacgtcgagcacggggtcgccaggggcgtcccctgggacgtcctcaacaggctcgcccggtgcgtcacccggcacgtcgtccacgggttcacctggtagctccccttccgcgtccactggcaccgggcctggaactccggggagcggcacagcgagctcgtcgccgggagcatcgcctgggacatcgagcaccgggtcgccaggagcatcgcccggaacatccagcacaggaagccccggcgcgtcgcccgggacatcaagcacaggttccccgggatcgagcacgccgtccggagccactggatcaccagggagctcgacaccttccggcgcaacgggatcgcccggagccagcccgggtacgtcaagcactggctcccctgcctcgagcagggctcagagtggcagtgtccctcagttcaagaaagttgttttccaggaatttactgatggctcctttactcagcccttataccgtggagaactaaatgaacatttgggactcctggggccatatataagagcagaagttgaagataatatcatggtaactttcagaaatcaggcctctcgtccctattccttctattctagccttatttcttatgaggaagatcagaggcaaggagcagaacctagaaaaaactttgtcaagcctaatgaaaccaaaacttacttttggaaagtgcaacatcatatggcacccactaaagatgagtttgactgcaaagcctgggcttatttctctgatgttgacctggaaaaagatgtgcactcaggcctgattggaccccttctggtctgccacactaacacactgaaccctgctcatgggagacaagtgacagtacaggaatttgctctgtttttcaccatctttgatgagaccaaaagctggtacttcactgaaaatatggaaagaaactgcagggctccctgcaatatccagatggaagatcccacttttaaagagaattatcgcttccatgcaatcaatggctacataatggatacactacctggcttagtaatggctcaggatcaaaggattcgatggtatctgctcagcatgggcagcaatgaaaacatccattctattcatttcagtggacatgtgttcactgtacgaaaaaaagaggagtataaaatggcactgtacaatctctatccaggtgtttttgagacagtggaaatgttaccatccaaagctggaatttggcgggtggaatgccttattggcgagcatctacatgctgggatgagcacactttttctggtgtacagcaataagtgtcagactcccctgggaatggcttctggacacattagagattttcagattacagcttcaggacaatatggacagtgggccccaaagctggccagacttcattattccggatcaatcaatgcctggagcaccaaggagcccttttcttggatcaaggtggatctgttggcaccaatgattattcacggcatcaagacccagggtgcccgtcagaagttctccagcctctacatctctcagtttatcatcatgtatagtcttgatgggaagaagtggcagacttatcgaggaaattccactggaaccttaatggtcttctttggcaatgtggattcatctgggataaaacacaatatttttaaccctccaattattgctcgatacatccgtttgcacccaactcattatagcattcgcagcactcttcgcatggagttgatgggctgtgatttaaatagttgcagcatgccattgggaatggagagtaaagcaatatcagatgcacagattactgcttcatcctactttaccaatatgtttgccacctggtctccttcaaaagctcgacttcacctccaagggaggagtaatgcctggagacctcaggtgaataatccaaaagagtggctgcaagtggacttccagaagacaatgaaagtcacaggagtaactactcagggagtaaaatctctgcttaccagcatgtatgtgaaggagttcctcatctccagcagtcaagatggccatcagtggactctcttttttcagaatggcaaagtaaaggtttttcagggaaatcaagactccttcacacctgtggtgaactctctagacccaccgttactgactcgctaccttcgaattcacccccagagttgggtgcaccagattgccctgaggatggaggttctgggctgcgaggcacaggacctctacggcgccggatcacctggggccgaaacggccgaacaaaaactcatctcagaagaggatctgtcacctgcaaccggtcatcatcaccatcaccattga

SEQ ID NO: 983 - protein, 1772 aa, synthetic construct
  REGION 1..1772: note = Description of Artificial Sequence: Synthetic polypeptide
ATRRYYLGAVELSWDYMQGAPTSESATPESGPGSEPATSGSETPGTSESATPESGPGSEPATSGSETPGTSESATPESGPGTSTEPSEGSAPGSPAGSPTSTEEGTSESATPESGPGSEPATSGSETPGTSESATPESGPGSPAGSPTSTEEGSPAGSPTSTEEGASSSDLGELPVDARFPPRVPKSFPFNTSVVYKKTLFVEFTDHLFNIAKPRPPWMGLLGPTIQAEVYDTVVITLKNMASHPVSLHAVGVSYWKASEGAEYDDQTSQREKEDDKVFPGGSHTYVWQVLKENGPMASDPLCLTYSYLSHVDLVKDLNSGLIGALLVCREGSLAKEKTQTLHKFILLFAVFDEGKSWHSETKNSLMQDRDAASARAWPKMHTVNGYVNRSLPGLIGCHRKSVYWHVIGMGTTPEVHSIFLEGHTFLVRNHRQASLEISPITFLTAQTLLMDLGQFLLFCHISSHQHDGMEAYVKVDSCPEEPQLRMKNNEEAEDYDDDLTDSEMDVVRFDDDNSPSFIQIRSVAKKHPKTWVHYIAAEEEDWDYAPLVLAPDDRSYKSQYLNNGPQRIGRKYKKVRFMAYTDETFKTREAIQHESGILGPLLYGEVGDTLLIIFKNQASRPYNIYPHGITDVRPLYSRRLPKGVKHLKDFPILPGEIFKYKWTVTVEDGPTKSDPRCLTRYYSSFVNMERDLASGLIGPLLICYKESVDQRGNQIMSDKRNVILFSVFDENRSWYLTENIQRFLPNPAGVQLEDPEFQASNIMHSINGYVFDSLQLSVCLHEVAYWYILSIGAQTDFLSVFFSGYTFKHKMVYEDTLTLFPFSGETVFMSMENPGLWILGCHNSDFRNRGMTALLKVSSCDKNTGDYYEDSYEDISAYLLSKNNAIEPRSFSQNPPVLKRHQREITRTTLQSDQEEIDYDDTISVEMKKEDFDIYDEDENQSPRSFQKKTRHYFIAAVERLWDYGMSSSPHVLRNRAQGAPGTPGSGTASSSPGASPGTSSTGSPGASPGTSSTGSPGASPGTSSTGSPGSSPSASTGTGPGTPGSGTASSSPGASPGTSSTGSPGASPGTSSTGSPGASPGTSSTGSPGSSTPSGATGSPGSSTPSGATGSPGASPGTSSTGSPASSRAQSGSVPQFKKVVFQEFTDGSFTQPLYRGELNEHLGLLGPYIRAEVEDNIMVTFRNQASRPYSFYSSLISYEEDQRQGAEPRKNFVKPNETKTYFWKVQHHMAPTKDEFDCKAWAYFSDVDLEKDVHSGLIGPLLVCHTNTLNPAHGRQVTVQEFALFFTIFDETKSWYFTENMERNCRAPCNIQMEDPTFKENYRFHAINGYIMDTLPGLVMAQDQRIRWYLLSMGSNENIHSIHFSGHVFTVRKKEEYKMALYNLYPGVFETVEMLPSKAGIWRVECLIGEHLHAGMSTLFLVYSNKCQTPLGMASGHIRDFQITASGQYGQWAPKLARLHYSGSINAWSTKEPFSWIKVDLLAPMIIHGIKTQGARQKFSSLYISQFIIMYSLDGKKWQTYRGNSTGTLMVFFGNVDSSGIKHNIFNPPIIARYIRLHPTHYSIRSTLRMELMGCDLNSCSMPLGMESKAISDAQITASSYFTNMFATWSPSKARLHLQGRSNAWRPQVNNPKEWLQVDFQKTMKVTGVTTQGVKSLLTSMYVKEFLISSSQDGHQWTLFFQNGKVKVFQGNQDSFTPVVNSLDPPLLTRYLRIHPQSWVHQIALRMEVLGCEAQDLYGAGSPGAETAEQKLISEEDLSPATGHHHHHH

SEQ ID NO: 984 - DNA, 5319 bp, synthetic construct
  misc_feature 1..5319: note = Description of Artificial Sequence: Synthetic polynucleotide
  source 1..5319: mol_type = other DNA
gccaccagaagatactacctgggtgcagtggaactgtcatgggactatatgcaaggcgcgccaacatcagagagcgccacccctgaaagtggtcccgggagcgagccagccacatctgggtcggaaacgccaggcacaagtgagtctgcaactcccgagtccggacctggctccgagcctgccactagcggctccgagactccgggaacttccgagagcgctacaccagaaagcggacccggaaccagtaccgaacctagcgagggctctgctccgggcagcccagccggctctcctacatccacggaggagggcacttccgaatccgccaccccggagtcagggccaggatctgaacccgctacctcaggcagtgagacgccaggaacgagcgagtccgctacaccggagagtgggccagggagccctgctggatctcctacgtccactgaggaagggtcaccagcgggctcgcccaccagcactgaagaaggtgcctcgagcagtgatctcggtgagctgcctgtggacgcaagatttcctcctagagtgccaaaatcttttccattcaacacctcagtcgtgtacaaaaagactctgtttgtagaattcacggatcaccttttcaacatcgctaagccaaggccaccctggatgggtctgctaggtcctaccatccaggctgaggtttatgatacagtggtcattacacttaagaacatggcttcccatcctgtcagtcttcatgctgttggtgtatcctactggaaagcttctgagggagctgaatatgatgatcagaccagtcaaagggagaaagaagatgataaagtcttccctggtggaagccatacatatgtctggcaggtcctgaaagagaatggtccaatggcctctgacccactgtgccttacctactcatatctttctcatgtggacctggtaaaagacttgaattcaggcctcattggagccctactagtatgtagagaagggagtctggccaaggaaaagacacagaccttgcacaaatttatactactttttgctgtatttgatgaagggaaaagttggcactcagaaacaaagaactccttgatgcaggatagggatgctgcatctgctcgggcctggcctaaaatgcacacagtcaatggttatgtaaacaggtctctgccaggtctgattggatgccacaggaaatcagtctattggcatgtgattggaatgggcaccactcctgaagtgcactcaatattcctcgaaggtcacacatttcttgtgaggaaccatcgccaggctagcttggaaatctcgccaataactttccttactgctcaaacactcttgatggaccttggacagtttctactgttttgtcatatctcttcccaccaacatgatggcatggaagcttatgtcaaagtagacagctgtccagaggaaccccaactacgaatgaaaaataatgaagaagcggaagactatgatgatgatcttactgattctgaaatggatgtggtcaggtttgatgatgacaactctccttcctttatccaaattcgctcagttgccaagaagcatcctaaaacttgggtacattacattgctgctgaagaggaggactgggactatgctcccttagtcctcgcccccgatgacagaagttataaaagtcaatatttgaacaatggccctcagcggattggtaggaagtacaaaaaagtccgatttatggcatacacagatgaaacctttaagactcgtgaagctattcagcatgaatcaggaatcttgggacctttactttatggggaagttggagacacactgttgattatatttaagaatcaagcaagcagaccatataacatctaccctcacggaatcactgatgtccgtcctttgtattcaaggagattaccaaaaggtgtaaaacatttgaaggattttccaattctgccaggagaaatattcaaatataaatggacagtgactgtagaagatgggccaactaaatcagatcctcggtgcctgacccgctattactctagtttcgttaatatggagagagatctagcttcaggactcattggccctctcctcatctgctacaaagaatctgtagatcaaagaggaaaccagataatgtcagacaagaggaatgtcatcctgttttctgtatttgatgagaaccgaagctggtacctcacagagaatatacaacgctttctccccaatccagctggagtgcagcttgaggatccagagttccaagcctccaacatcatgcacagcatcaatggctatgtttttgatagtttgcagttgtcagtttgtttgcatgaggtggcatactggtacattctaagcattggagcacagactgacttcctttctgtcttcttctctggatataccttcaaacacaaaatggtctatgaagacacactcaccctattcccattctcaggagaaactgtcttcatgtcgatggaaaacccaggtctatggattctggggtgccacaactcagactttcggaacagaggcatgaccgccttactgaaggtttctagttgtgacaagaacactggtgattattacgaggacagttatgaagatatttcagcatacttgctgagtaaaaacaatgccattgaaccaagaagcttctctcaaaacccaccagtcttgaaacgccatcaacgggaaataactcgtactactcttcagtcagatcaagaggaaatcgattatgatgataccatatcagttgaaatgaagaaggaagattttgacatttatgatgaggatgaaaatcagagcccccgcagctttcaaaagaaaacacgacactattttattgctgcagtggagaggctctgggattatgggatgagtagctccccacatgttctaagaaacagggctcagggcgcgccaggtacacccggatcgggtacagcgtcatcgagccccggtgcgtcacctggtacgtcgagcacggggtcgccaggggcgtcccctgggacgtcctcaacaggctcgcccggtgcgtcacccggcacgtcgtccacgggttcacctggtagctccccttccgcgtccactggcaccgggcctggaactccggggagcggcacagcgagctcgtcgccgggagcatcgcctgggacatcgagcaccgggtcgccaggagcatcgcccggaacatccagcacaggaagccccggcgcgtcgcccgggacatcaagcacaggttccccgggatcgagcacgccgtccggagccactggatcaccagggagctcgacaccttccggcgcaacgggatcgcccggagccagcccgggtacgtcaagcactggctcccctgcctcgagcagggctcagagtggcagtgtccctcagttcaagaaagttgttttccaggaatttactgatggctcctttactcagcccttataccgtggagaactaaatgaacatttgggactcctggggccatatataagagcagaagttgaagataatatcatggtaactttcagaaatcaggcctctcgtccctattccttctattctagccttatttcttatgaggaagatcagaggcaaggagcagaacctagaaaaaactttgtcaagcctaatgaaaccaaaacttacttttggaaagtgcaacatcatatggcacccactaaagatgagtttgactgcaaagcctgggcttatttctctgatgttgacctggaaaaagatgtgcactcaggcctgattggaccccttctggtctgccacactaacacactgaaccctgctcatgggagacaagtgacagtacaggaatttgctctgtttttcaccatctttgatgagaccaaaagctggtacttcactgaaaatatggaaagaaactgcagggctccctgcaatatccagatggaagatcccacttttaaagagaattatcgcttccatgcaatcaatggctacataatggatacactacctggcttagtaatggctcaggatcaaaggattcgatggtatctgctcagcatgggcagcaatgaaaacatccattctattcatttcagtggacatgtgttcactgtacgaaaaaaagaggagtataaaatggcactgtacaatctctatccaggtgtttttgagacagtggaaatgttaccatccaaagctggaatttggcgggtggaatgccttattggcgagcatctacatgctgggatgagcacactttttctggtgtacagcaataagtgtcagactcccctgggaatggcttctggacacattagagattttcagattacagcttcaggacaatatggacagtgggccccaaagctggccagacttcattattccggatcaatcaatgcctggagcaccaaggagcccttttcttggatcaaggtggatctgttggcaccaatgattattcacggcatcaagacccagggtgcccgtcagaagttctccagcctctacatctctcagtttatcatcatgtatagtcttgatgggaagaagtggcagacttatcgaggaaattccactggaaccttaatggtcttctttggcaatgtggattcatctgggataaaacacaatatttttaaccctccaattattgctcgatacatccgtttgcacccaactcattatagcattcgcagcactcttcgcatggagttgatgggctgtgatttaaatagttgcagcatgccattgggaatggagagtaaagcaatatcagatgcacagattactgcttcatcctactttaccaatatgtttgccacctggtctccttcaaaagctcgacttcacctccaagggaggagtaatgcctggagacctcaggtgaataatccaaaagagtggctgcaagtggacttccagaagacaatgaaagtcacaggagtaactactcagggagtaaaatctctgcttaccagcatgtatgtgaaggagttcctcatctccagcagtcaagatggccatcagtggactctcttttttcagaatggcaaagtaaaggtttttcagggaaatcaagactccttcacacctgtggtgaactctctagacccaccgttactgactcgctaccttcgaattcacccccagagttgggtgcaccagattgccctgaggatggaggttctgggctgcgaggcacaggacctctacggcgccggatcacctggggccgaaacggccgaacaaaaactcatctcagaagaggatctgtcacctgcaaccggtcatcatcaccatcaccattga

SEQ ID NO: 985 - protein, 1772 aa, synthetic construct
  REGION 1..1772: note = Description of Artificial Sequence: Synthetic polypeptide
ATRRYYLGAVELSWDYMQSDLGELPVGAPTSESATPESGPGSEPATSGSETPGTSESATPESGPGSEPATSGSETPGTSESATPESGPGTSTEPSEGSAPGSPAGSPTSTEEGTSESATPESGPGSEPATSGSETPGTSESATPESGPGSPAGSPTSTEEGSPAGSPTSTEEGASSDARFPPRVPKSFPFNTSVVYKKTLFVEFTDHLFNIAKPRPPWMGLLGPTIQAEVYDTVVITLKNMASHPVSLHAVGVSYWKASEGAEYDDQTSQREKEDDKVFPGGSHTYVWQVLKENGPMASDPLCLTYSYLSHVDLVKDLNSGLIGALLVCREGSLAKEKTQTLHKFILLFAVFDEGKSWHSETKNSLMQDRDAASARAWPKMHTVNGYVNRSLPGLIGCHRKSVYWHVIGMGTTPEVHSIFLEGHTFLVRNHRQASLEISPITFLTAQTLLMDLGQFLLFCHISSHQHDGMEAYVKVDSCPEEPQLRMKNNEEAEDYDDDLTDSEMDVVRFDDDNSPSFIQIRSVAKKHPKTWVHYIAAEEEDWDYAPLVLAPDDRSYKSQYLNNGPQRIGRKYKKVRFMAYTDETFKTREAIQHESGILGPLLYGEVGDTLLIIFKNQASRPYNIYPHGITDVRPLYSRRLPKGVKHLKDFPILPGEIFKYKWTVTVEDGPTKSDPRCLTRYYSSFVNMERDLASGLIGPLLICYKESVDQRGNQIMSDKRNVILFSVFDENRSWYLTENIQRFLPNPAGVQLEDPEFQASNIMHSINGYVFDSLQLSVCLHEVAYWYILSIGAQTDFLSVFFSGYTFKHKMVYEDTLTLFPFSGETVFMSMENPGLWILGCHNSDFRNRGMTALLKVSSCDKNTGDYYEDSYEDISAYLLSKNNAIEPRSFSQNPPVLKRHQREITRTTLQSDQEEIDYDDTISVEMKKEDFDIYDEDENQSPRSFQKKTRHYFIAAVERLWDYGMSSSPHVLRNRAQGAPGTPGSGTASSSPGASPGTSSTGSPGASPGTSSTGSPGASPGTSSTGSPGSSPSASTGTGPGTPGSGTASSSPGASPGTSSTGSPGASPGTSSTGSPGASPGTSSTGSPGSSTPSGATGSPGSSTPSGATGSPGASPGTSSTGSPASSRAQSGSVPQFKKVVFQEFTDGSFTQPLYRGELNEHLGLLGPYIRAEVEDNIMVTFRNQASRPYSFYSSLISYEEDQRQGAEPRKNFVKPNETKTYFWKVQHHMAPTKDEFDCKAWAYFSDVDLEKDVHSGLIGPLLVCHTNTLNPAHGRQVTVQEFALFFTIFDETKSWYFTENMERNCRAPCNIQMEDPTFKENYRFHAINGYIMDTLPGLVMAQDQRIRWYLLSMGSNENIHSIHFSGHVFTVRKKEEYKMALYNLYPGVFETVEMLPSKAGIWRVECLIGEHLHAGMSTLFLVYSNKCQTPLGMASGHIRDFQITASGQYGQWAPKLARLHYSGSINAWSTKEPFSWIKVDLLAPMIIHGIKTQGARQKFSSLYISQFIIMYSLDGKKWQTYRGNSTGTLMVFFGNVDSSGIKHNIFNPPIIARYIRLHPTHYSIRSTLRMELMGCDLNSCSMPLGMESKAISDAQITASSYFTNMFATWSPSKARLHLQGRSNAWRPQVNNPKEWLQVDFQKTMKVTGVTTQGVKSLLTSMYVKEFLISSSQDGHQWTLFFQNGKVKVFQGNQDSFTPVVNSLDPPLLTRYLRIHPQSWVHQIALRMEVLGCEAQDLYGAGSPGAETAEQKLISEEDLSPATGHHHHHH

SEQ ID NO: 986 - DNA, 5319 bp, synthetic construct
  misc_feature 1..5319: note = Description of Artificial Sequence: Synthetic polynucleotide
  source 1..5319: mol_type = other DNA
gccaccagaagatactacctgggtgcagtggaactgtcatgggactatatgcaaagtgatctcggtgagctgcctgtgggcgcgccaacatcagagagcgccacccctgaaagtggtcccgggagcgagccagccacatctgggtcggaaacgccaggcacaagtgagtctgcaactcccgagtccggacctggctccgagcctgccactagcggctccgagactccgggaacttccgagagcgctacaccagaaagcggacccggaaccagtaccgaacctagcgagggctctgctccgggcagcccagccggctctcctacatccacggaggagggcacttccgaatccgccaccccggagtcagggccaggatctgaacccgctacctcaggcagtgagacgccaggaacgagcgagtccgctacaccggagagtgggccagggagccctgctggatctcctacgtccactgaggaagggtcaccagcgggctcgcccaccagcactgaagaaggtgcctcgagcgacgcaagatttcctcctagagtgccaaaatcttttccattcaacacctcagtcgtgtacaaaaagactctgtttgtagaattcacggatcaccttttcaacatcgctaagccaaggccaccctggatgggtctgctaggtcctaccatccaggctgaggtttatgatacagtggtcattacacttaagaacatggcttcccatcctgtcagtcttcatgctgttggtgtatcctactggaaagcttctgagggagctgaatatgatgatcagaccagtcaaagggagaaagaagatgataaagtcttccctggtggaagccatacatatgtctggcaggtcctgaaagagaatggtccaatggcctctgacccactgtgccttacctactcatatctttctcatgtggacctggtaaaagacttgaattcaggcctcattggagccctactagtatgtagagaagggagtctggccaaggaaaagacacagaccttgcacaaatttatactactttttgctgtatttgatgaagggaaaagttggcactcagaaacaaagaactccttgatgcaggatagggatgctgcatctgctcgggcctggcctaaaatgcacacagtcaatggttatgtaaacaggtctctgccaggtctgattggatgccacaggaaatcagtctattggcatgtgattggaatgggcaccactcctgaagtgcactcaatattcctcgaaggtcacacatttcttgtgaggaaccatcgccaggctagcttggaaatctcgccaataactttccttactgctcaaacactcttgatggaccttggacagtttctactgttttgtcatatctcttcccaccaacatgatggcatggaagcttatgtcaaagtagacagctgtccagaggaaccccaactacgaatgaaaaataatgaagaagcggaagactatgatgatgatcttactgattctgaaatggatgtggtcaggtttgatgatgacaactctccttcctttatccaaattcgctcagttgccaagaagcatcctaaaacttgggtacattacattgctgctgaagaggaggactgggactatgctcccttagtcctcgcccccgatgacagaagttataaaagtcaatatttgaacaatggccctcagcggattggtaggaagtacaaaaaagtccgatttatggcatacacagatgaaacctttaagactcgtgaagctattcagcatgaatcaggaatcttgggacctttactttatggggaagttggagacacactgttgattatatttaagaatcaagcaagcagaccatataacatctaccctcacggaatcactgatgtccgtcctttgtattcaaggagattaccaaaaggtgtaaaacatttgaaggattttccaattctgccaggagaaatattcaaatataaatggacagtgactgtagaagatgggccaactaaatcagatcctcggtgcctgacccgctattactctagtttcgttaatatggagagagatctagcttcaggactcattggccctctcctcatctgctacaaagaatctgtagatcaaagaggaaaccagataatgtcagacaagaggaatgtcatcctgttttctgtatttgatgagaaccgaagctggtacctcacagagaatatacaacgctttctccccaatccagctggagtgcagcttgaggatccagagttccaagcctccaacatcatgcacagcatcaatggctatgtttttgatagtttgcagttgtcagtttgtttgcatgaggtggcatactggtacattctaagcattggagcacagactgacttcctttctgtcttcttctctggatataccttcaaacacaaaatggtctatgaagacacactcaccctattcccattctcaggagaaactgtcttcatgtcgatggaaaacccaggtctatggattctggggtgccacaactcagactttcggaacagaggcatgaccgccttactgaaggtttctagttgtgacaagaacactggtgattattacgaggacagttatgaagatatttcagcatacttgctgagtaaaaacaatgccattgaaccaagaagcttctctcaaaacccaccagtcttgaaacgccatcaacgggaaataactcgtactactcttcagtcagatcaagaggaaatcgattatgatgataccatatcagttgaaatgaagaaggaagattttgacatttatgatgaggatgaaaatcagagcccccgcagctttcaaaagaaaacacgacactattttattgctgcagtggagaggctctgggattatgggatgagtagctccccacatgttctaagaaacagggctcagggcgcgccaggtacacccggatcgggtacagcgtcatcgagccccggtgcgtcacctggtacgtcgagcacggggtcgccaggggcgtcccctgggacgtcctcaacaggctcgcccggtgcgtcacccggcacgtcgtccacgggttcacctggtagctccccttccgcgtccactggcaccgggcctggaactccggggagcggcacagcgagctcgtcgccgggagcatcgcctgggacatcgagcaccgggtcgccaggagcatcgcccggaacatccagcacaggaagccccggcgcgtcgcccgggacatcaagcacaggttccccgggatcgagcacgccgtccggagccactggatcaccagggagctcgacaccttccggcgcaacgggatcgcccggagccagcccgggtacgtcaagcactggctcccctgcctcgagcagggctcagagtggcagtgtccctcagttcaagaaagttgttttccaggaatttactgatggctcctttactcagcccttataccgtggagaactaaatgaacatttgggactcctggggccatatataagagcagaagttgaagataatatcatggtaactttcagaaatcaggcctctcgtccctattccttctattctagccttatttcttatgaggaagatcagaggcaaggagcagaacctagaaaaaactttgtcaagcctaatgaaaccaaaacttacttttggaaagtgcaacatcatatggcacccactaaagatgagtttgactgcaaagcctgggcttatttctctgatgttgacctggaaaaagatgtgcactcaggcctgattggaccccttctggtctgccacactaacacactgaaccctgctcatgggagacaagtgacagtacaggaatttgctctgtttttcaccatctttgatgagaccaaaagctggtacttcactgaaaatatggaaagaaactgcagggctccctgcaatatccagatggaagatcccacttttaaagagaattatcgcttccatgcaatcaatggctacataatggatacactacctggcttagtaatggctcaggatcaaaggattcgatggtatctgctcagcatgggcagcaatgaaaacatccattctattcatttcagtggacatgtgttcactgtacgaaaaaaagaggagtataaaatggcactgtacaatctctatccaggtgtttttgagacagtggaaatgttaccatccaaagctggaatttggcgggtggaatgccttattggcgagcatctacatgctgggatgagcacactttttctggtgtacagcaataagtgtcagactcccctgggaatggcttctggacacattagagattttcagattacagcttcaggacaatatggacagtgggccccaaagctggccagacttcattattccggatcaatcaatgcctggagcaccaaggagcccttttcttggatcaaggtggatctgttggcaccaatgattattcacggcatcaagacccagggtgcccgtcagaagttctccagcctctacatctctcagtttatcatcatgtatagtcttgatgggaagaagtggcagacttatcgaggaaattccactggaaccttaatggtcttctttggcaatgtggattcatctgggataaaacacaatatttttaaccctccaattattgctcgatacatccgtttgcacccaactcattatagcattcgcagcactcttcgcatggagttgatgggctgtgatttaaatagttgcagcatgccattgggaatggagagtaaagcaatatcagatgcacagattactgcttcatcctactttaccaatatgtttgccacctggtctccttcaaaagctcgacttcacctccaagggaggagtaatgcctggagacctcaggtgaataatccaaaagagtggctgcaagtggacttccagaagacaatgaaagtcacaggagtaactactcagggagtaaaatctctgcttaccagcatgtatgtgaaggagttcctcatctccagcagtcaagatggccatcagtggactctcttttttcagaatggcaaagtaaaggtttttcagggaaatcaagactccttcacacctgtggtgaactctctagacccaccgttactgactcgctaccttcgaattcacccccagagttgggtgcaccagattgccctgaggatggaggttctgggctgcgaggcacaggacctctacggcgccggatcacctggggccgaaacggccgaacaaaaactcatctcagaagaggatctgtcacctgcaaccggtcatcatcaccatcaccattga

SEQ ID NO: 987 - protein, 1772 aa, synthetic construct
  REGION 1..1772: note = Description of Artificial Sequence: Synthetic polypeptide
ATRRYYLGAVELSWDYMQGAPGSSPSASTGTGPGSSPSASTGTGPGASPGTSSTGSPGASPGTSSTGSPGSSTPSGATGSPGSSPSASTGTGPGASPGTSSTGSPGSSPSASTGTGPGTPGSGTASSSPGSSTPSGATGSPGSSTPSGATGSPGASPGTSSTGSPASSSDLGELPVDARFPPRVPKSFPFNTSVVYKKTLFVEFTDHLFNIAKPRPPWMGLLGPTIQAEVYDTVVITLKNMASHPVSLHAVGVSYWKASEGAEYDDQTSQREKEDDKVFPGGSHTYVWQVLKENGPMASDPLCLTYSYLSHVDLVKDLNSGLIGALLVCREGSLAKEKTQTLHKFILLFAVFDEGKSWHSETKNSLMQDRDAASARAWPKMHTVNGYVNRSLPGLIGCHRKSVYWHVIGMGTTPEVHSIFLEGHTFLVRNHRQASLEISPITFLTAQTLLMDLGQFLLFCHISSHQHDGMEAYVKVDSCPEEPQLRMKNNEEAEDYDDDLTDSEMDVVRFDDDNSPSFIQIRSVAKKHPKTWVHYIAAEEEDWDYAPLVLAPDDRSYKSQYLNNGPQRIGRKYKKVRFMAYTDETFKTREAIQHESGILGPLLYGEVGDTLLIIFKNQASRPYNIYPHGITDVRPLYSRRLPKGVKHLKDFPILPGEIFKYKWTVTVEDGPTKSDPRCLTRYYSSFVNMERDLASGLIGPLLICYKESVDQRGNQIMSDKRNVILFSVFDENRSWYLTENIQRFLPNPAGVQLEDPEFQASNIMHSINGYVFDSLQLSVCLHEVAYWYILSIGAQTDFLSVFFSGYTFKHKMVYEDTLTLFPFSGETVFMSMENPGLWILGCHNSDFRNRGMTALLKVSSCDKNTGDYYEDSYEDISAYLLSKNNAIEPRSFSQNPPVLKRHQREITRTTLQSDQEEIDYDDTISVEMKKEDFDIYDEDENQSPRSFQKKTRHYFIAAVERLWDYGMSSSPHVLRNRAQGAPGTPGSGTASSSPGASPGTSSTGSPGASPGTSSTGSPGASPGTSSTGSPGSSPSASTGTGPGTPGSGTASSSPGASPGTSSTGSPGASPGTSSTGSPGASPGTSSTGSPGSSTPSGATGSPGSSTPSGATGSPGASPGTSSTGSPASSRAQSGSVPQFKKVVFQEFTDGSFTQPLYRGELNEHLGLLGPYIRAEVEDNIMVTFRNQASRPYSFYSSLISYEEDQRQGAEPRKNFVKPNETKTYFWKVQHHMAPTKDEFDCKAWAYFSDVDLEKDVHSGLIGPLLVCHTNTLNPAHGRQVTVQEFALFFTIFDETKSWYFTENMERNCRAPCNIQMEDPTFKENYRFHAINGYIMDTLPGLVMAQDQRIRWYLLSMGSNENIHSIHFSGHVFTVRKKEEYKMALYNLYPGVFETVEMLPSKAGIWRVECLIGEHLHAGMSTLFLVYSNKCQTPLGMASGHIRDFQITASGQYGQWAPKLARLHYSGSINAWSTKEPFSWIKVDLLAPMIIHGIKTQGARQKFSSLYISQFIIMYSLDGKKWQTYRGNSTGTLMVFFGNVDSSGIKHNIFNPPIIARYIRLHPTHYSIRSTLRMELMGCDLNSCSMPLGMESKAISDAQITASSYFTNMFATWSPSKARLHLQGRSNAWRPQVNNPKEWLQVDFQKTMKVTGVTTQGVKSLLTSMYVKEFLISSSQDGHQWTLFFQNGKVKVFQGNQDSFTPVVNSLDPPLLTRYLRIHPQSWVHQIALRMEVLGCEAQDLYGAGSPGAETAEQKLISEEDLSPATGHHHHHH

SEQ ID NO: 988 - DNA, 5319 bp, synthetic construct
  misc_feature 1..5319: note = Description of Artificial Sequence: Synthetic polynucleotide
  source 1..5319: mol_type = other DNA
gccaccagaagatactacctgggtgcagtggaactgtcatgggactatatgcaaggcgcgccaggctccagcccctccgcgagcacgggaaccggaccaggttcgtcaccctcagcatcaacggggacgggaccgggggcgtcaccaggaacgtcctccaccggctcgccgggtgcatcacccggaacgtcatcgaccggatcgccagggagctcgacgccatcaggcgcaacaggatcacctggctcaagccctagcgcgtcaaccggcacgggtccgggtgcctcccctggcacgtccagcaccggatcacccggatcgagcccatccgcctcaaccggaaccggacccggtacaccagggtcgggaacagcctcctcgtcaccaggctcctcaaccccctcgggagccacgggttcgcccggttcgtcaacgccttccggagcaactggtagccccggagcatcgccaggaacttcgagcacggggtcgcccgcctcgagcagtgatctcggtgagctgcctgtggacgcaagatttcctcctagagtgccaaaatcttttccattcaacacctcagtcgtgtacaaaaagactctgtttgtagaattcacggatcaccttttcaacatcgctaagccaaggccaccctggatgggtctgctaggtcctaccatccaggctgaggtttatgatacagtggtcattacacttaagaacatggcttcccatcctgtcagtcttcatgctgttggtgtatcctactggaaagcttctgagggagctgaatatgatgatcagaccagtcaaagggagaaagaagatgataaagtcttccctggtggaagccatacatatgtctggcaggtcctgaaagagaatggtccaatggcctctgacccactgtgccttacctactcatatctttctcatgtggacctggtaaaagacttgaattcaggcctcattggagccctactagtatgtagagaagggagtctggccaaggaaaagacacagaccttgcacaaatttatactactttttgctgtatttgatgaagggaaaagttggcactcagaaacaaagaactccttgatgcaggatagggatgctgcatctgctcgggcctggcctaaaatgcacacagtcaatggttatgtaaacaggtctctgccaggtctgattggatgccacaggaaatcagtctattggcatgtgattggaatgggcaccactcctgaagtgcactcaatattcctcgaaggtcacacatttcttgtgaggaaccatcgccaggctagcttggaaatctcgccaataactttccttactgctcaaacactcttgatggaccttggacagtttctactgttttgtcatatctcttcccaccaacatgatggcatggaagcttatgtcaaagtagacagctgtccagaggaaccccaactacgaatgaaaaataatgaagaagcggaagactatgatgatgatcttactgattctgaaatggatgtggtcaggtttgatgatgacaactctccttcctttatccaaattcgctcagttgccaagaagcatcctaaaacttgggtacattacattgctgctgaagaggaggactgggactatgctcccttagtcctcgcccccgatgacagaagttataaaagtcaatatttgaacaatggccctcagcggattggtaggaagtacaaaaaagtccgatttatggcatacacagatgaaacctttaagactcgtgaagctattcagcatgaatcaggaatcttgggacctttactttatggggaagttggagacacactgttgattatatttaagaatcaagcaagcagaccatataacatctaccctcacggaatcactgatgtccgtcctttgtattcaaggagattaccaaaaggtgtaaaacatttgaaggattttccaattctgccaggagaaatattcaaatataaatggacagtgactgtagaagatgggccaactaaatcagatcctcggtgcctgacccgctattactctagtttcgttaatatggagagagatctagcttcaggactcattggccctctcctcatctgctacaaagaatctgtagatcaaagaggaaaccagataatgtcagacaagaggaatgtcatcctgttttctgtatttgatgagaaccgaagctggtacctcacagagaatatacaacgctttctccccaatccagctggagtgcagcttgaggatccagagttccaagcctccaacatcatgcacagcatcaatggctatgtttttgatagtttgcagttgtcagtttgtttgcatgaggtggcatactggtacattctaagcattggagcacagactgacttcctttctgtcttcttctctggatataccttcaaacacaaaatggtctatgaagacacactcaccctattcccattctcaggagaaactgtcttcatgtcgatggaaaacccaggtctatggattctggggtgccacaactcagactttcggaacagaggcatgaccgccttactgaaggtttctagttgtgacaagaacactggtgattattacgaggacagttatgaagatatttcagcatacttgctgagtaaaaacaatgccattgaaccaagaagcttctctcaaaacccaccagtcttgaaacgccatcaacgggaaataactcgtactactcttcagtcagatcaagaggaaatcgattatgatgataccatatcagttgaaatgaagaaggaagattttgacatttatgatgaggatgaaaatcagagcccccgcagctttcaaaagaaaacacgacactattttattgctgcagtggagaggctctgggattatgggatgagtagctccccacatgttctaagaaacagggctcagggcgcgccaggtacacccggatcgggtacagcgtcatcgagccccggtgcgtcacctggtacgtcgagcacggggtcgccaggggcgtcccctgggacgtcctcaacaggctcgcccggtgcgtcacccggcacgtcgtccacgggttcacctggtagctccccttccgcgtccactggcaccgggcctggaactccggggagcggcacagcgagctcgtcgccgggagcatcgcctgggacatcgagcaccgggtcgccaggagcatcgcccggaacatccagcacaggaagccccggcgcgtcgcccgggacatcaagcacaggttccccgggatcgagcacgccgtccggagccactggatcaccagggagctcgacaccttccggcgcaacgggatcgcccggagccagcccgggtacgtcaagcactggctcccctgcctcgagcagggctcagagtggcagtgtccctcagttcaagaaagttgttttccaggaatttactgatggctcctttactcagcccttataccgtggagaactaaatgaacatttgggactcctggggccatatataagagcagaagttgaagataatatcatggtaactttcagaaatcaggcctctcgtccctattccttctattctagccttatttcttatgaggaagatcagaggcaaggagcagaacctagaaaaaactttgtcaagcctaatgaaaccaaaacttacttttggaaagtgcaacatcatatggcacccactaaagatgagtttgactgcaaagcctgggcttatttctctgatgttgacctggaaaaagatgtgcactcaggcctgattggaccccttctggtctgccacactaacacactgaaccctgctcatgggagacaagtgacagtacaggaatttgctctgtttttcaccatctttgatgagaccaaaagctggtacttcactgaaaatatggaaagaaactgcagggctccctgcaatatccagatggaagatcccacttttaaagagaattatcgcttccatgcaatcaatggctacataatggatacactacctggcttagtaatggctcaggatcaaaggattcgatggtatctgctcagcatgggcagcaatgaaaacatccattctattcatttcagtggacatgtgttcactgtacgaaaaaaagaggagtataaaatggcactgtacaatctctatccaggtgtttttgagacagtggaaatgttaccatccaaagctggaatttggcgggtggaatgccttattggcgagcatctacatgctgggatgagcacactttttctggtgtacagcaataagtgtcagactcccctgggaatggcttctggacacattagagattttcagattacagcttcaggacaatatggacagtgggccccaaagctggccagacttcattattccggatcaatcaatgcctggagcaccaaggagcccttttcttggatcaaggtggatctgttggcaccaatgattattcacggcatcaagacccagggtgcccgtcagaagttctccagcctctacatctctcagtttatcatcatgtatagtcttgatgggaagaagtggcagacttatcgaggaaattccactggaaccttaatggtcttctttggcaatgtggattcatctgggataaaacacaatatttttaaccctccaattattgctcgatacatccgtttgcacccaactcattatagcattcgcagcactcttcgcatggagttgatgggctgtgatttaaatagttgcagcatgccattgggaatggagagtaaagcaatatcagatgcacagattactgcttcatcctactttaccaatatgtttgccacctggtctccttcaaaagctcgacttcacctccaagggaggagtaatgcctggagacctcaggtgaataatccaaaagagtggctgcaagtggacttccagaagacaatgaaagtcacaggagtaactactcagggagtaaaatctctgcttaccagcatgtatgtgaaggagttcctcatctccagcagtcaagatggccatcagtggactctcttttttcagaatggcaaagtaaaggtttttcagggaaatcaagactccttcacacctgtggtgaactctctagacccaccgttactgactcgctaccttcgaattcacccccagagttgggtgcaccagattgccctgaggatggaggttctgggctgcgaggcacaggacctctacggcgccggatcacctggggccgaaacggccgaacaaaaactcatctcagaagaggatctgtcacctgcaaccggtcatcatcaccatcaccattga

SEQ ID NO: 989 - protein, 1769 aa, synthetic construct
  REGION 1..1769: note = Description of Artificial Sequence: Synthetic polypeptide
ATRRYYLGAVELSWDYMQSDLGELPVGAPTSESATPESGPGSEPATSGSETPGTSESATPESGPGSEPATSGSETPGTSESATPESGPGTSTEPSEGSAPGSPAGSPTSTEEGTSESATPESGPGSEPATSGSETPGTSESATPESGPGSPAGSPTSTEEGSPAGSPTSTEEGASSDARFPPRVPKSFPFNTSVVYKKTLFVEFTDHLFNIAKPRPPWMGLLGPTIQAEVYDTVVITLKNMASHPVSLHAVGVSYWKASEGAEYDDQTSQREKEDDKVFPGGSHTYVWQVLKENGPMASDPLCLTYSYLSHVDLVKDLNSGLIGALLVCREGSLAKEKTQTLHKFILLFAVFDEGKSWHSETKNSLMQDRDAASARAWPKMHTVNGYVNRSLPGLIGCHRKSVYWHVIGMGTTPEVHSIFLEGHTFLVRNHRQASLEISPITFLTAQTLLMDLGQFLLFCHISSHQHDGMEAYVKVDSCPEEPQLRMKNNEEAEDYDDDLTDSEMDVVRFDDDNSPSFIQIRSVAKKHPKTWVHYIAAEEEDWDYAPLVLAPDDRSYKSQYLNNGPQRIGRKYKKVRFMAYTDETFKTREAIQHESGILGPLLYGEVGDTLLIIFKNQASRPYNIYPHGITDVRPLYSRRLPKGVKHLKDFPILPGEIFKYKWTVTVEDGPTKSDPRCLTRYYSSFVNMERDLASGLIGPLLICYKESVDQRGNQIMSDKRNVILFSVFDENRSWYLTENIQRFLPNPAGVQLEDPEFQASNIMHSINGYVFDSLQLSVCLHEVAYWYILSIGAQTDFLSVFFSGYTFKHKMVYEDTLTLFPFSGETVFMSMENPGLWILGCHNSDFRNRGMTALLKVSSCDKNTGDYYEDSYEDISAYLLSKNNAIEPRSFSQNPPVLKRHQREITRTTLQSDQEEIDYDDTISVEMKKEDFDIYDEDENQSPRSFQKKTRHYFIAAVERLWDYGMSSSPHVLRNRAQSGGAPTSESATPESGPGSEPATSGSETPGTSESATPESGPGSEPATSGSETPGTSESATPESGPGTSTEPSEGSAPGTSESATPESGPGSPAGSPTSTEEGSPAGSPTSTEEGSPAGSPTSTEEGTSESATPESGPGTSTEPSEGSAPGASSSVPQFKKVVFQEFTDGSFTQPLYRGELNEHLGLLGPYIRAEVEDNIMVTFRNQASRPYSFYSSLISYEEDQRQGAEPRKNFVKPNETKTYFWKVQHHMAPTKDEFDCKAWAYFSDVDLEKDVHSGLIGPLLVCHTNTLNPAHGRQVTVQEFALFFTIFDETKSWYFTENMERNCRAPCNIQMEDPTFKENYRFHAINGYIMDTLPGLVMAQDQRIRWYLLSMGSNENIHSIHFSGHVFTVRKKEEYKMALYNLYPGVFETVEMLPSKAGIWRVECLIGEHLHAGMSTLFLVYSNKCQTPLGMASGHIRDFQITASGQYGQWAPKLARLHYSGSINAWSTKEPFSWIKVDLLAPMIIHGIKTQGARQKFSSLYISQFIIMYSLDGKKWQTYRGNSTGTLMVFFGNVDSSGIKHNIFNPPIIARYIRLHPTHYSIRSTLRMELMGCDLNSCSMPLGMESKAISDAQITASSYFTNMFATWSPSKARLHLQGRSNAWRPQVNNPKEWLQVDFQKTMKVTGVTTQGVKSLLTSMYVKEFLISSSQDGHQWTLFFQNGKVKVFQGNQDSFTPVVNSLDPPLLTRYLRIHPQSWVHQIALRMEVLGCEAQDLYGAGSPGAETAEQKLISEEDLSPATGHHHHHH

SEQ ID NO: 990 - DNA, 5310 bp, synthetic construct
  misc_feature 1..5310: note = Description of Artificial Sequence: Synthetic polynucleotide
  source 1..5310: mol_type = other DNA
gccaccagaagatactacctgggtgcagtggaactgtcatgggactatatgcaaagtgatctcggtgagctgcctgtgggcgcgccaacatcagagagcgccacccctgaaagtggtcccgggagcgagccagccacatctgggtcggaaacgccaggcacaagtgagtctgcaactcccgagtccggacctggctccgagcctgccactagcggctccgagactccgggaacttccgagagcgctacaccagaaagcggacccggaaccagtaccgaacctagcgagggctctgctccgggcagcccagccggctctcctacatccacggaggagggcacttccgaatccgccaccccggagtcagggccaggatctgaacccgctacctcaggcagtgagacgccaggaacgagcgagtccgctacaccggagagtgggccagggagccctgctggatctcctacgtccactgaggaagggtcaccagcgggctcgcccaccagcactgaagaaggtgcctcgagcgacgcaagatttcctcctagagtgccaaaatcttttccattcaacacctcagtcgtgtacaaaaagactctgtttgtagaattcacggatcaccttttcaacatcgctaagccaaggccaccctggatgggtctgctaggtcctaccatccaggctgaggtttatgatacagtggtcattacacttaagaacatggcttcccatcctgtcagtcttcatgctgttggtgtatcctactggaaagcttctgagggagctgaatatgatgatcagaccagtcaaagggagaaagaagatgataaagtcttccctggtggaagccatacatatgtctggcaggtcctgaaagagaatggtccaatggcctctgacccactgtgccttacctactcatatctttctcatgtggacctggtaaaagacttgaattcaggcctcattggagccctactagtatgtagagaagggagtctggccaaggaaaagacacagaccttgcacaaatttatactactttttgctgtatttgatgaagggaaaagttggcactcagaaacaaagaactccttgatgcaggatagggatgctgcatctgctcgggcctggcctaaaatgcacacagtcaatggttatgtaaacaggtctctgccaggtctgattggatgccacaggaaatcagtctattggcatgtgattggaatgggcaccactcctgaagtgcactcaatattcctcgaaggtcacacatttcttgtgaggaaccatcgccaggctagcttggaaatctcgccaataactttccttactgctcaaacactcttgatggaccttggacagtttctactgttttgtcatatctcttcccaccaacatgatggcatggaagcttatgtcaaagtagacagctgtccagaggaaccccaactacgaatgaaaaataatgaagaagcggaagactatgatgatgatcttactgattctgaaatggatgtggtcaggtttgatgatgacaactctccttcctttatccaaattcgctcagttgccaagaagcatcctaaaacttgggtacattacattgctgctgaagaggaggactgggactatgctcccttagtcctcgcccccgatgacagaagttataaaagtcaatatttgaacaatggccctcagcggattggtaggaagtacaaaaaagtccgatttatggcatacacagatgaaacctttaagactcgtgaagctattcagcatgaatcaggaatcttgggacctttactttatggggaagttggagacacactgttgattatatttaagaatcaagcaagcagaccatataacatctaccctcacggaatcactgatgtccgtcctttgtattcaaggagattaccaaaaggtgtaaaacatttgaaggattttccaattctgccaggagaaatattcaaatataaatggacagtgactgtagaagatgggccaactaaatcagatcctcggtgcctgacccgctattactctagtttcgttaatatggagagagatctagcttcaggactcattggccctctcctcatctgctacaaagaatctgtagatcaaagaggaaaccagataatgtcagacaagaggaatgtcatcctgttttctgtatttgatgagaaccgaagctggtacctcacagagaatatacaacgctttctccccaatccagctggagtgcagcttgaggatccagagttccaagcctccaacatcatgcacagcatcaatggctatgtttttgatagtttgcagttgtcagtttgtttgcatgaggtggcatactggtacattctaagcattggagcacagactgacttcctttctgtcttcttctctggatataccttcaaacacaaaatggtctatgaagacacactcaccctattcccattctcaggagaaactgtcttcatgtcgatggaaaacccaggtctatggattctggggtgccacaactcagactttcggaacagaggcatgaccgccttactgaaggtttctagttgtgacaagaacactggtgattattacgaggacagttatgaagatatttcagcatacttgctgagtaaaaacaatgccattgaaccaagaagcttctctcaaaacccaccagtcttgaaacgccatcaacgggaaataactcgtactactcttcagtcagatcaagaggaaatcgattatgatgataccatatcagttgaaatgaagaaggaagattttgacatttatgatgaggatgaaaatcagagcccccgcagctttcaaaagaaaacacgacactattttattgctgcagtggagaggctctgggattatgggatgagtagctccccacatgttctaagaaacagggctcagagtggcggcgcgccaacgtccgaaagtgctacccctgagtcaggccctggtagtgagcctgccacaagcggaagcgaaactccggggacctcagagtctgccactcccgaatcggggccaggctctgaaccggccacttcagggagcgaaacaccaggaacatcggagagcgctaccccggagagcgggccaggaactagtactgagcctagcgagggaagtgcacctggtacaagcgagtccgccacacccgagtctggccctggctctccagcgggctcacccacgagcactgaagagggctctcccgctggcagcccaacgtcgacagaagaaggatcaccagcaggctcccccacatcaacagaggagggtacatcagaatctgctactcccgagagtggacccggtacctccactgagcccagcgaggggagtgcaccaggtgcctcgagcagtgtccctcagttcaagaaagttgttttccaggaatttactgatggctcctttactcagcccttataccgtggagaactaaatgaacatttgggactcctggggccatatataagagcagaagttgaagataatatcatggtaactttcagaaatcaggcctctcgtccctattccttctattctagccttatttcttatgaggaagatcagaggcaaggagcagaacctagaaaaaactttgtcaagcctaatgaaaccaaaacttacttttggaaagtgcaacatcatatggcacccactaaagatgagtttgactgcaaagcctgggcttatttctctgatgttgacctggaaaaagatgtgcactcaggcctgattggaccccttctggtctgccacactaacacactgaaccctgctcatgggagacaagtgacagtacaggaatttgctctgtttttcaccatctttgatgagaccaaaagctggtacttcactgaaaatatggaaagaaactgcagggctccctgcaatatccagatggaagatcccacttttaaagagaattatcgcttccatgcaatcaatggctacataatggatacactacctggcttagtaatggctcaggatcaaaggattcgatggtatctgctcagcatgggcagcaatgaaaacatccattctattcatttcagtggacatgtgttcactgtacgaaaaaaagaggagtataaaatggcactgtacaatctctatccaggtgtttttgagacagtggaaatgttaccatccaaagctggaatttggcgggtggaatgccttattggcgagcatctacatgctgggatgagcacactttttctggtgtacagcaataagtgtcagactcccctgggaatggcttctggacacattagagattttcagattacagcttcaggacaatatggacagtgggccccaaagctggccagacttcattattccggatcaatcaatgcctggagcaccaaggagcccttttcttggatcaaggtggatctgttggcaccaatgattattcacggcatcaagacccagggtgcccgtcagaagttctccagcctctacatctctcagtttatcatcatgtatagtcttgatgggaagaagtggcagacttatcgaggaaattccactggaaccttaatggtcttctttggcaatgtggattcatctgggataaaacacaatatttttaaccctccaattattgctcgatacatccgtttgcacccaactcattatagcattcgcagcactcttcgcatggagttgatgggctgtgatttaaatagttgcagcatgccattgggaatggagagtaaagcaatatcagatgcacagattactgcttcatcctactttaccaatatgtttgccacctggtctccttcaaaagctcgacttcacctccaagggaggagtaatgcctggagacctcaggtgaataatccaaaagagtggctgcaagtggacttccagaagacaatgaaagtcacaggagtaactactcagggagtaaaatctctgcttaccagcatgtatgtgaaggagttcctcatctccagcagtcaagatggccatcagtggactctcttttttcagaatggcaaagtaaaggtttttcagggaaatcaagactccttcacacctgtggtgaactctctagacccaccgttactgactcgctaccttcgaattcacccccagagttgggtgcaccagattgccctgaggatggaggttctgggctgcgaggcacaggacctctacggcgccggatcacctggggccgaaacggccgaacaaaaactcatctcagaagaggatctgtcacctgcaaccggtcatcatcaccatcaccattga

SEQ ID NO: 991 - protein, 1769 aa, synthetic construct
  REGION 1..1769: note = Description of Artificial Sequence: Synthetic polypeptide
ATRRYYLGAVELSWDYMQSDLGELPVDARFPPRVPKSFPFGAPGSSPSASTGTGPGSSPSASTGTGPGASPGTSSTGSPGASPGTSSTGSPGSSTPSGATGSPGSSPSASTGTGPGASPGTSSTGSPGSSPSASTGTGPGTPGSGTASSSPGSSTPSGATGSPGSSTPSGATGSPGASPGTSSTGSPASSNTSVVYKKTLFVEFTDHLFNIAKPRPPWMGLLGPTIQAEVYDTVVITLKNMASHPVSLHAVGVSYWKASEGAEYDDQTSQREKEDDKVFPGGSHTYVWQVLKENGPMASDPLCLTYSYLSHVDLVKDLNSGLIGALLVCREGSLAKEKTQTLHKFILLFAVFDEGKSWHSETKNSLMQDRDAASARAWPKMHTVNGYVNRSLPGLIGCHRKSVYWHVIGMGTTPEVHSIFLEGHTFLVRNHRQASLEISPITFLTAQTLLMDLGQFLLFCHISSHQHDGMEAYVKVDSCPEEPQLRMKNNEEAEDYDDDLTDSEMDVVRFDDDNSPSFIQIRSVAKKHPKTWVHYIAAEEEDWDYAPLVLAPDDRSYKSQYLNNGPQRIGRKYKKVRFMAYTDETFKTREAIQHESGILGPLLYGEVGDTLLIIFKNQASRPYNIYPHGITDVRPLYSRRLPKGVKHLKDFPILPGEIFKYKWTVTVEDGPTKSDPRCLTRYYSSFVNMERDLASGLIGPLLICYKESVDQRGNQIMSDKRNVILFSVFDENRSWYLTENIQRFLPNPAGVQLEDPEFQASNIMHSINGYVFDSLQLSVCLHEVAYWYILSIGAQTDFLSVFFSGYTFKHKMVYEDTLTLFPFSGETVFMSMENPGLWILGCHNSDFRNRGMTALLKVSSCDKNTGDYYEDSYEDISAYLLSKNNAIEPRSFSQNPPVLKRHQREITRTTLQSDQEEIDYDDTISVEMKKEDFDIYDEDENQSPRSFQKKTRHYFIAAVERLWDYGMSSSPHVLRNRAQSGGAPTSESATPESGPGSEPATSGSETPGTSESATPESGPGSEPATSGSETPGTSESATPESGPGTSTEPSEGSAPGTSESATPESGPGSPAGSPTSTEEGSPAGSPTSTEEGSPAGSPTSTEEGTSESATPESGPGTSTEPSEGSAPGASSSVPQFKKVVFQEFTDGSFTQPLYRGELNEHLGLLGPYIRAEVEDNIMVTFRNQASRPYSFYSSLISYEEDQRQGAEPRKNFVKPNETKTYFWKVQHHMAPTKDEFDCKAWAYFSDVDLEKDVHSGLIGPLLVCHTNTLNPAHGRQVTVQEFALFFTIFDETKSWYFTENMERNCRAPCNIQMEDPTFKENYRFHAINGYIMDTLPGLVMAQDQRIRWYLLSMGSNENIHSIHFSGHVFTVRKKEEYKMALYNLYPGVFETVEMLPSKAGIWRVECLIGEHLHAGMSTLFLVYSNKCQTPLGMASGHIRDFQITASGQYGQWAPKLARLHYSGSINAWSTKEPFSWIKVDLLAPMIIHGIKTQGARQKFSSLYISQFIIMYSLDGKKWQTYRGNSTGTLMVFFGNVDSSGIKHNIFNPPIIARYIRLHPTHYSIRSTLRMELMGCDLNSCSMPLGMESKAISDAQITASSYFTNMFATWSPSKARLHLQGRSNAWRPQVNNPKEWLQVDFQKTMKVTGVTTQGVKSLLTSMYVKEFLISSSQDGHQWTLFFQNGKVKVFQGNQDSFTPVVNSLDPPLLTRYLRIHPQSWVHQIALRMEVLGCEAQDLYGAGSPGAETAEQKLISEEDLSPATGHHHHHH

SEQ ID NO: 992 - DNA, 5310 bp, synthetic construct
  misc_feature 1..5310: note = Description of Artificial Sequence: Synthetic polynucleotide
  source 1..5310: mol_type = other DNA
gccaccagaagatactacctgggtgcagtggaactgtcatgggactatatgcaaagtgatctcggtgagctgcctgtggacgcaagatttcctcctagagtgccaaaatcttttccattcggcgcgccaggctccagcccctccgcgagcacgggaaccggaccaggttcgtcaccctcagcatcaacggggacgggaccgggggcgtcaccaggaacgtcctccaccggctcgccgggtgcatcacccggaacgtcatcgaccggatcgccagggagctcgacgccatcaggcgcaacaggatcacctggctcaagccctagcgcgtcaaccggcacgggtccgggtgcctcccctggcacgtccagcaccggatcacccggatcgagcccatccgcctcaaccggaaccggacccggtacaccagggtcgggaacagcctcctcgtcaccaggctcctcaaccccctcgggagccacgggttcgcccggttcgtcaacgccttccggagcaactggtagccccggagcatcgccaggaacttcgagcacggggtcgcccgcctcgagcaacacctcagtcgtgtacaaaaagactctgtttgtagaattcacggatcaccttttcaacatcgctaagccaaggccaccctggatgggtctgctaggtcctaccatccaggctgaggtttatgatacagtggtcattacacttaagaacatggcttcccatcctgtcagtcttcatgctgttggtgtatcctactggaaagcttctgagggagctgaatatgatgatcagaccagtcaaagggagaaagaagatgataaagtcttccctggtggaagccatacatatgtctggcaggtcctgaaagagaatggtccaatggcctctgacccactgtgccttacctactcatatctttctcatgtggacctggtaaaagacttgaattcaggcctcattggagccctactagtatgtagagaagggagtctggccaaggaaaagacacagaccttgcacaaatttatactactttttgctgtatttgatgaagggaaaagttggcactcagaaacaaagaactccttgatgcaggatagggatgctgcatctgctcgggcctggcctaaaatgcacacagtcaatggttatgtaaacaggtctctgccaggtctgattggatgccacaggaaatcagtctattggcatgtgattggaatgggcaccactcctgaagtgcactcaatattcctcgaaggtcacacatttcttgtgaggaaccatcgccaggctagcttggaaatctcgccaataactttccttactgctcaaacactcttgatggaccttggacagtttctactgttttgtcatatctcttcccaccaacatgatggcatggaagcttatgtcaaagtagacagctgtccagaggaaccccaactacgaatgaaaaataatgaagaagcggaagactatgatgatgatcttactgattctgaaatggatgtggtcaggtttgatgatgacaactctccttcctttatccaaattcgctcagttgccaagaagcatcctaaaacttgggtacattacattgctgctgaagaggaggactgggactatgctcccttagtcctcgcccccgatgacagaagttataaaagtcaatatttgaacaatggccctcagcggattggtaggaagtacaaaaaagtccgatttatggcatacacagatgaaacctttaagactcgtgaagctattcagcatgaatcaggaatcttgggacctttactttatggggaagttggagacacactgttgattatatttaagaatcaagcaagcagaccatataacatctaccctcacggaatcactgatgtccgtcctttgtattcaaggagattaccaaaaggtgtaaaacatttgaaggattttccaattctgccaggagaaatattcaaatataaatggacagtgactgtagaagatgggccaactaaatcagatcctcggtgcctgacccgctattactctagtttcgttaatatggagagagatctagcttcaggactcattggccctctcctcatctgctacaaagaatctgtagatcaaagaggaaaccagataatgtcagacaagaggaatgtcatcctgttttctgtatttgatgagaaccgaagctggtacctcacagagaatatacaacgctttctccccaatccagctggagtgcagcttgaggatccagagttccaagcctccaacatcatgcacagcatcaatggctatgtttttgatagtttgcagttgtcagtttgtttgcatgaggtggcatactggtacattctaagcattggagcacagactgacttcctttctgtcttcttctctggatataccttcaaacacaaaatggtctatgaagacacactcaccctattcccattctcaggagaaactgtcttcatgtcgatggaaaacccaggtctatggattctggggtgccacaactcagactttcggaacagaggcatgaccgccttactgaaggtttctagttgtgacaagaacactggtgattattacgaggacagttatgaagatatttcagcatacttgctgagtaaaaacaatgccattgaaccaagaagcttctctcaaaacccaccagtcttgaaacgccatcaacgggaaataactcgtactactcttcagtcagatcaagaggaaatcgattatgatgataccatatcagttgaaatgaagaaggaagattttgacatttatgatgaggatgaaaatcagagcccccgcagctttcaaaagaaaacacgacactattttattgctgcagtggagaggctctgggattatgggatgagtagctccccacatgttctaagaaacagggctcagagtggcggcgcgccaacgtccgaaagtgctacccctgagtcaggccctggtagtgagcctgccacaagcggaagcgaaactccggggacctcagagtctgccactcccgaatcggggccaggctctgaaccggccacttcagggagcgaaacaccaggaacatcggagagcgctaccccggagagcgggccaggaactagtactgagcctagcgagggaagtgcacctggtacaagcgagtccgccacacccgagtctggccctggctctccagcgggctcacccacgagcactgaagagggctctcccgctggcagcccaacgtcgacagaagaaggatcaccagcaggctcccccacatcaacagaggagggtacatcagaatctgctactcccgagagtggacccggtacctccactgagcccagcgaggggagtgcaccaggtgcctcgagcagtgtccctcagttcaagaaagttgttttccaggaatttactgatggctcctttactcagcccttataccgtggagaactaaatgaacatttgggactcctggggccatatataagagcagaagttgaagataatatcatggtaactttcagaaatcaggcctctcgtccctattccttctattctagccttatttcttatgaggaagatcagaggcaaggagcagaacctagaaaaaactttgtcaagcctaatgaaaccaaaacttacttttggaaagtgcaacatcatatggcacccactaaagatgagtttgactgcaaagcctgggcttatttctctgatgttgacctggaaaaagatgtgcactcaggcctgattggaccccttctggtctgccacactaacacactgaaccctgctcatgggagacaagtgacagtacaggaatttgctctgtttttcaccatctttgatgagaccaaaagctggtacttcactgaaaatatggaaagaaactgcagggctccctgcaatatccagatggaagatcccacttttaaagagaattatcgcttccatgcaatcaatggctacataatggatacactacctggcttagtaatggctcaggatcaaaggattcgatggtatctgctcagcatgggcagcaatgaaaacatccattctattcatttcagtggacatgtgttcactgtacgaaaaaaagaggagtataaaatggcactgtacaatctctatccaggtgtttttgagacagtggaaatgttaccatccaaagctggaatttggcgggtggaatgccttattggcgagcatctacatgctgggatgagcacactttttctggtgtacagcaataagtgtcagactcccctgggaatggcttctggacacattagagattttcagattacagcttcaggacaatatggacagtgggccccaaagctggccagacttcattattccggatcaatcaatgcctggagcaccaaggagcccttttcttggatcaaggtggatctgttggcaccaatgattattcacggcatcaagacccagggtgcccgtcagaagttctccagcctctacatctctcagtttatcatcatgtatagtcttgatgggaagaagtggcagacttatcgaggaaattccactggaaccttaatggtcttctttggcaatgtggattcatctgggataaaacacaatatttttaaccctccaattattgctcgatacatccgtttgcacccaactcattatagcattcgcagcactcttcgcatggagttgatgggctgtgatttaaatagttgcagcatgccattgggaatggagagtaaagcaatatcagatgcacagattactgcttcatcctactttaccaatatgtttgccacctggtctccttcaaaagctcgacttcacctccaagggaggagtaatgcctggagacctcaggtgaataatccaaaagagtggctgcaagtggacttccagaagacaatgaaagtcacaggagtaactactcagggagtaaaatctctgcttaccagcatgtatgtgaaggagttcctcatctccagcagtcaagatggccatcagtggactctcttttttcagaatggcaaagtaaaggtttttcagggaaatcaagactccttcacacctgtggtgaactctctagacccaccgttactgactcgctaccttcgaattcacccccagagttgggtgcaccagattgccctgaggatggaggttctgggctgcgaggcacaggacctctacggcgccggatcacctggggccgaaacggccgaacaaaaactcatctcagaagaggatctgtcacctgcaaccggtcatcatcaccatcaccattga

SEQ ID NO: 993 - protein, 1769 aa, synthetic construct
  REGION 1..1769: note = Description of Artificial Sequence: Synthetic polypeptide
ATRRYYLGAVELSWDYMQSDLGELPVGAPGSSPSASTGTGPGSSPSASTGTGPGASPGTSSTGSPGASPGTSSTGSPGSSTPSGATGSPGSSPSASTGTGPGASPGTSSTGSPGSSPSASTGTGPGTPGSGTASSSPGSSTPSGATGSPGSSTPSGATGSPGASPGTSSTGSPASSDARFPPRVPKSFPFNTSVVYKKTLFVEFTDHLFNIAKPRPPWMGLLGPTIQAEVYDTVVITLKNMASHPVSLHAVGVSYWKASEGAEYDDQTSQREKEDDKVFPGGSHTYVWQVLKENGPMASDPLCLTYSYLSHVDLVKDLNSGLIGALLVCREGSLAKEKTQTLHKFILLFAVFDEGKSWHSETKNSLMQDRDAASARAWPKMHTVNGYVNRSLPGLIGCHRKSVYWHVIGMGTTPEVHSIFLEGHTFLVRNHRQASLEISPITFLTAQTLLMDLGQFLLFCHISSHQHDGMEAYVKVDSCPEEPQLRMKNNEEAEDYDDDLTDSEMDVVRFDDDNSPSFIQIRSVAKKHPKTWVHYIAAEEEDWDYAPLVLAPDDRSYKSQYLNNGPQRIGRKYKKVRFMAYTDETFKTREAIQHESGILGPLLYGEVGDTLLIIFKNQASRPYNIYPHGITDVRPLYSRRLPKGVKHLKDFPILPGEIFKYKWTVTVEDGPTKSDPRCLTRYYSSFVNMERDLASGLIGPLLICYKESVDQRGNQIMSDKRNVILFSVFDENRSWYLTENIQRFLPNPAGVQLEDPEFQASNIMHSINGYVFDSLQLSVCLHEVAYWYILSIGAQTDFLSVFFSGYTFKHKMVYEDTLTLFPFSGETVFMSMENPGLWILGCHNSDFRNRGMTALLKVSSCDKNTGDYYEDSYEDISAYLLSKNNAIEPRSFSQNPPVLKRHQREITRTTLQSDQEEIDYDDTISVEMKKEDFDIYDEDENQSPRSFQKKTRHYFIAAVERLWDYGMSSSPHVLRNRAQSGGAPTSESATPESGPGSEPATSGSETPGTSESATPESGPGSEPATSGSETPGTSESATPESGPGTSTEPSEGSAPGTSESATPESGPGSPAGSPTSTEEGSPAGSPTSTEEGSPAGSPTSTEEGTSESATPESGPGTSTEPSEGSAPGASSSVPQFKKVVFQEFTDGSFTQPLYRGELNEHLGLLGPYIRAEVEDNIMVTFRNQASRPYSFYSSLISYEEDQRQGAEPRKNFVKPNETKTYFWKVQHHMAPTKDEFDCKAWAYFSDVDLEKDVHSGLIGPLLVCHTNTLNPAHGRQVTVQEFALFFTIFDETKSWYFTENMERNCRAPCNIQMEDPTFKENYRFHAINGYIMDTLPGLVMAQDQRIRWYLLSMGSNENIHSIHFSGHVFTVRKKEEYKMALYNLYPGVFETVEMLPSKAGIWRVECLIGEHLHAGMSTLFLVYSNKCQTPLGMASGHIRDFQITASGQYGQWAPKLARLHYSGSINAWSTKEPFSWIKVDLLAPMIIHGIKTQGARQKFSSLYISQFIIMYSLDGKKWQTYRGNSTGTLMVFFGNVDSSGIKHNIFNPPIIARYIRLHPTHYSIRSTLRMELMGCDLNSCSMPLGMESKAISDAQITASSYFTNMFATWSPSKARLHLQGRSNAWRPQVNNPKEWLQVDFQKTMKVTGVTTQGVKSLLTSMYVKEFLISSSQDGHQWTLFFQNGKVKVFQGNQDSFTPVVNSLDPPLLTRYLRIHPQSWVHQIALRMEVLGCEAQDLYGAGSPGAETAEQKLISEEDLSPATGHHHHHH

SEQ ID NO: 994 - DNA, 5310 bp, synthetic construct
  misc_feature 1..5310: note = Description of Artificial Sequence: Synthetic polynucleotide
  source 1..5310: mol_type = other DNA
gccaccagaagatactacctgggtgcagtggaactgtcatgggactatatgcaaagtgatctcggtgagctgcctgtgggcgcgccaggctccagcccctccgcgagcacgggaaccggaccaggttcgtcaccctcagcatcaacggggacgggaccgggggcgtcaccaggaacgtcctccaccggctcgccgggtgcatcacccggaacgtcatcgaccggatcgccagggagctcgacgccatcaggcgcaacaggatcacctggctcaagccctagcgcgtcaaccggcacgggtccgggtgcctcccctggcacgtccagcaccggatcacccggatcgagcccatccgcctcaaccggaaccggacccggtacaccagggtcgggaacagcctcctcgtcaccaggctcctcaaccccctcgggagccacgggttcgcccggttcgtcaacgccttccggagcaactggtagccccggagcatcgccaggaacttcgagcacggggtcgcccgcctcgagcgacgcaagatttcctcctagagtgccaaaatcttttccattcaacacctcagtcgtgtacaaaaagactctgtttgtagaattcacggatcaccttttcaacatcgctaagccaaggccaccctggatgggtctgctaggtcctaccatccaggctgaggtttatgatacagtggtcattacacttaagaacatggcttcccatcctgtcagtcttcatgctgttggtgtatcctactggaaagcttctgagggagctgaatatgatgatcagaccagtcaaagggagaaagaagatgataaagtcttccctggtggaagccatacatatgtctggcaggtcctgaaagagaatggtccaatggcctctgacccactgtgccttacctactcatatctttctcatgtggacctggtaaaagacttgaattcaggcctcattggagccctactagtatgtagagaagggagtctggccaaggaaaagacacagaccttgcacaaatttatactactttttgctgtatttgatgaagggaaaagttggcactcagaaacaaagaactccttgatgcaggatagggatgctgcatctgctcgggcctggcctaaaatgcacacagtcaatggttatgtaaacaggtctctgccaggtctgattggatgccacaggaaatcagtctattggcatgtgattggaatgggcaccactcctgaagtgcactcaatattcctcgaaggtcacacatttcttgtgaggaaccatcgccaggctagcttggaaatctcgccaataactttccttactgctcaaacactcttgatggaccttggacagtttctactgttttgtcatatctcttcccaccaacatgatggcatggaagcttatgtcaaagtagacagctgtccagaggaaccccaactacgaatgaaaaataatgaagaagcggaagactatgatgatgatcttactgattctgaaatggatgtggtcaggtttgatgatgacaactctccttcctttatccaaattcgctcagttgccaagaagcatcctaaaacttgggtacattacattgctgctgaagaggaggactgggactatgctcccttagtcctcgcccccgatgacagaagttataaaagtcaatatttgaacaatggccctcagcggattggtaggaagtacaaaaaagtccgatttatggcatacacagatgaaacctttaagactcgtgaagctattcagcatgaatcaggaatcttgggacctttactttatggggaagttggagacacactgttgattatatttaagaatcaagcaagcagaccatataacatctaccctcacggaatcactgatgtccgtcctttgtattcaaggagattaccaaaaggtgtaaaacatttgaaggattttccaattctgccaggagaaatattcaaatataaatggacagtgactgtagaagatgggccaactaaatcagatcctcggtgcctgacccgctattactctagtttcgttaatatggagagagatctagcttcaggactcattggccctctcctcatctgctacaaagaatctgtagatcaaagaggaaaccagataatgtcagacaagaggaatgtcatcctgttttctgtatttgatgagaaccgaagctggtacctcacagagaatatacaacgctttctccccaatccagctggagtgcagcttgaggatccagagttccaagcctccaacatcatgcacagcatcaatggctatgtttttgatagtttgcagttgtcagtttgtttgcatgaggtggcatactggtacattctaagcattggagcacagactgacttcctttctgtcttcttctctggatataccttcaaacacaaaatggtctatgaagacacactcaccctattcccattctcaggagaaactgtcttcatgtcgatggaaaacccaggtctatggattctggggtgccacaactcagactttcggaacagaggcatgaccgccttactgaaggtttctagttgtgacaagaacactggtgattattacgaggacagttatgaagatatttcagcatacttgctgagtaaaaacaatgccattgaaccaagaagcttctctcaaaacccaccagtcttgaaacgccatcaacgggaaataactcgtactactcttcagtcagatcaagaggaaatcgattatgatgataccatatcagttgaaatgaagaaggaagattttgacatttatgatgaggatgaaaatcagagcccccgcagctttcaaaagaaaacacgacactattttattgctgcagtggagaggctctgggattatgggatgagtagctccccacatgttctaagaaacagggctcagagtggcggcgcgccaacgtccgaaagtgctacccctgagtcaggccctggtagtgagcctgccacaagcggaagcgaaactccggggacctcagagtctgccactcccgaatcggggccaggctctgaaccggccacttcagggagcgaaacaccaggaacatcggagagcgctaccccggagagcgggccaggaactagtactgagcctagcgagggaagtgcacctggtacaagcgagtccgccacacccgagtctggccctggctctccagcgggctcacccacgagcactgaagagggctctcccgctggcagcccaacgtcgacagaagaaggatcaccagcaggctcccccacatcaacagaggagggtacatcagaatctgctactcccgagagtggacccggtacctccactgagcccagcgaggggagtgcaccaggtgcctcgagcagtgtccctcagttcaagaaagttgttttccaggaatttactgatggctcctttactcagcccttataccgtggagaactaaatgaacatttgggactcctggggccatatataagagcagaagttgaagataatatcatggtaactttcagaaatcaggcctctcgtccctattccttctattctagccttatttcttatgaggaagatcagaggcaaggagcagaacctagaaaaaactttgtcaagcctaatgaaaccaaaacttacttttggaaagtgcaacatcatatggcacccactaaagatgagtttgactgcaaagcctgggcttatttctctgatgttgacctggaaaaagatgtgcactcaggcctgattggaccccttctggtctgccacactaacacactgaaccctgctcatgggagacaagtgacagtacaggaatttgctctgtttttcaccatctttgatgagaccaaaagctggtacttcactgaaaatatggaaagaaactgcagggctccctgcaatatccagatggaagatcccacttttaaagagaattatcgcttccatgcaatcaatggctacataatggatacactacctggcttagtaatggctcaggatcaaaggattcgatggtatctgctcagcatgggcagcaatgaaaacatccattctattcatttcagtggacatgtgttcactgtacgaaaaaaagaggagtataaaatggcactgtacaatctctatccaggtgtttttgagacagtggaaatgttaccatccaaagctggaatttggcgggtggaatgccttattggcgagcatctacatgctgggatgagcacactttttctggtgtacagcaataagtgtcagactcccctgggaatggcttctggacacattagagattttcagattacagcttcaggacaatatggacagtgggccccaaagctggccagacttcattattccggatcaatcaatgcctggagcaccaaggagcccttttcttggatcaaggtggatctgttggcaccaatgattattcacggcatcaagacccagggtgcccgtcagaagttctccagcctctacatctctcagtttatcatcatgtatagtcttgatgggaagaagtggcagacttatcgaggaaattccactggaaccttaatggtcttctttggcaatgtggattcatctgggataaaacacaatatttttaaccctccaattattgctcgatacatccgtttgcacccaactcattatagcattcgcagcactcttcgcatggagttgatgggctgtgatttaaatagttgcagcatgccattgggaatggagagtaaagcaatatcagatgcacagattactgcttcatcctactttaccaatatgtttgccacctggtctccttcaaaagctcgacttcacctccaagggaggagtaatgcctggagacctcaggtgaataatccaaaagagtggctgcaagtggacttccagaagacaatgaaagtcacaggagtaactactcagggagtaaaatctctgcttaccagcatgtatgtgaaggagttcctcatctccagcagtcaagatggccatcagtggactctcttttttcagaatggcaaagtaaaggtttttcagggaaatcaagactccttcacacctgtggtgaactctctagacccaccgttactgactcgctaccttcgaattcacccccagagttgggtgcaccagattgccctgaggatggaggttctgggctgcgaggcacaggacctctacggcgccggatcacctggggccgaaacggccgaacaaaaactcatctcagaagaggatctgtcacctgcaaccggtcatcatcaccatcaccattga

SEQ ID NO: 995 - protein, 1769 aa, synthetic construct
  REGION 1..1769: note = Description of Artificial Sequence: Synthetic polypeptide
ATRRYYLGAVELSWDYMQGAPTSESATPESGPGSEPATSGSETPGTSESATPESGPGSEPATSGSETPGTSESATPESGPGTSTEPSEGSAPGSPAGSPTSTEEGTSESATPESGPGSEPATSGSETPGTSESATPESGPGSPAGSPTSTEEGSPAGSPTSTEEGASSSDLGELPVDARFPPRVPKSFPFNTSVVYKKTLFVEFTDHLFNIAKPRPPWMGLLGPTIQAEVYDTVVITLKNMASHPVSLHAVGVSYWKASEGAEYDDQTSQREKEDDKVFPGGSHTYVWQVLKENGPMASDPLCLTYSYLSHVDLVKDLNSGLIGALLVCREGSLAKEKTQTLHKFILLFAVFDEGKSWHSETKNSLMQDRDAASARAWPKMHTVNGYVNRSLPGLIGCHRKSVYWHVIGMGTTPEVHSIFLEGHTFLVRNHRQASLEISPITFLTAQTLLMDLGQFLLFCHISSHQHDGMEAYVKVDSCPEEPQLRMKNNEEAEDYDDDLTDSEMDVVRFDDDNSPSFIQIRSVAKKHPKTWVHYIAAEEEDWDYAPLVLAPDDRSYKSQYLNNGPQRIGRKYKKVRFMAYTDETFKTREAIQHESGILGPLLYGEVGDTLLIIFKNQASRPYNIYPHGITDVRPLYSRRLPKGVKHLKDFPILPGEIFKYKWTVTVEDGPTKSDPRCLTRYYSSFVNMERDLASGLIGPLLICYKESVDQRGNQIMSDKRNVILFSVFDENRSWYLTENIQRFLPNPAGVQLEDPEFQASNIMHSINGYVFDSLQLSVCLHEVAYWYILSIGAQTDFLSVFFSGYTFKHKMVYEDTLTLFPFSGETVFMSMENPGLWILGCHNSDFRNRGMTALLKVSSCDKNTGDYYEDSYEDISAYLLSKNNAIEPRSFSQNPPVLKRHQREITRTTLQSDQEEIDYDDTISVEMKKEDFDIYDEDENQSPRSFQKKTRHYFIAAVERLWDYGMSSSPHVLRNRAQSGGAPTSESATPESGPGSEPATSGSETPGTSESATPESGPGSEPATSGSETPGTSESATPESGPGTSTEPSEGSAPGTSESATPESGPGSPAGSPTSTEEGSPAGSPTSTEEGSPAGSPTSTEEGTSESATPESGPGTSTEPSEGSAPGASSSVPQFKKVVFQEFTDGSFTQPLYRGELNEHLGLLGPYIRAEVEDNIMVTFRNQASRPYSFYSSLISYEEDQRQGAEPRKNFVKPNETKTYFWKVQHHMAPTKDEFDCKAWAYFSDVDLEKDVHSGLIGPLLVCHTNTLNPAHGRQVTVQEFALFFTIFDETKSWYFTENMERNCRAPCNIQMEDPTFKENYRFHAINGYIMDTLPGLVMAQDQRIRWYLLSMGSNENIHSIHFSGHVFTVRKKEEYKMALYNLYPGVFETVEMLPSKAGIWRVECLIGEHLHAGMSTLFLVYSNKCQTPLGMASGHIRDFQITASGQYGQWAPKLARLHYSGSINAWSTKEPFSWIKVDLLAPMIIHGIKTQGARQKFSSLYISQFIIMYSLDGKKWQTYRGNSTGTLMVFFGNVDSSGIKHNIFNPPIIARYIRLHPTHYSIRSTLRMELMGCDLNSCSMPLGMESKAISDAQITASSYFTNMFATWSPSKARLHLQGRSNAWRPQVNNPKEWLQVDFQKTMKVTGVTTQGVKSLLTSMYVKEFLISSSQDGHQWTLFFQNGKVKVFQGNQDSFTPVVNSLDPPLLTRYLRIHPQSWVHQIALRMEVLGCEAQDLYGAGSPGAETAEQKLISEEDLSPATGHHHHHH

SEQ ID NO: 996 - DNA, 5310 bp, synthetic construct
  misc_feature 1..5310: note = Description of Artificial Sequence: Synthetic polynucleotide
  source 1..5310: mol_type = other DNA
gccaccagaagatactacctgggtgcagtggaactgtcatgggactatatgcaaggcgcgccaacatcagagagcgccacccctgaaagtggtcccgggagcgagccagccacatctgggtcggaaacgccaggcacaagtgagtctgcaactcccgagtccggacctggctccgagcctgccactagcggctccgagactccgggaacttccgagagcgctacaccagaaagcggacccggaaccagtaccgaacctagcgagggctctgctccgggcagcccagccggctctcctacatccacggaggagggcacttccgaatccgccaccccggagtcagggccaggatctgaacccgctacctcaggcagtgagacgccaggaacgagcgagtccgctacaccggagagtgggccagggagccctgctggatctcctacgtccactgaggaagggtcaccagcgggctcgcccaccagcactgaagaaggtgcctcgagcagtgatctcggtgagctgcctgtggacgcaagatttcctcctagagtgccaaaatcttttccattcaacacctcagtcgtgtacaaaaagactctgtttgtagaattcacggatcaccttttcaacatcgctaagccaaggccaccctggatgggtctgctaggtcctaccatccaggctgaggtttatgatacagtggtcattacacttaagaacatggcttcccatcctgtcagtcttcatgctgttggtgtatcctactggaaagcttctgagggagctgaatatgatgatcagaccagtcaaagggagaaagaagatgataaagtcttccctggtggaagccatacatatgtctggcaggtcctgaaagagaatggtccaatggcctctgacccactgtgccttacctactcatatctttctcatgtggacctggtaaaagacttgaattcaggcctcattggagccctactagtatgtagagaagggagtctggccaaggaaaagacacagaccttgcacaaatttatactactttttgctgtatttgatgaagggaaaagttggcactcagaaacaaagaactccttgatgcaggatagggatgctgcatctgctcgggcctggcctaaaatgcacacagtcaatggttatgtaaacaggtctctgccaggtctgattggatgccacaggaaatcagtctattggcatgtgattggaatgggcaccactcctgaagtgcactcaatattcctcgaaggtcacacatttcttgtgaggaaccatcgccaggctagcttggaaatctcgccaataactttccttactgctcaaacactcttgatggaccttggacagtttctactgttttgtcatatctcttcccaccaacatgatggcatggaagcttatgtcaaagtagacagctgtccagaggaaccccaactacgaatgaaaaataatgaagaagcggaagactatgatgatgatcttactgattctgaaatggatgtggtcaggtttgatgatgacaactctccttcctttatccaaattcgctcagttgccaagaagcatcctaaaacttgggtacattacattgctgctgaagaggaggactgggactatgctcccttagtcctcgcccccgatgacagaagttataaaagtcaatatttgaacaatggccctcagcggattggtaggaagtacaaaaaagtccgatttatggcatacacagatgaaacctttaagactcgtgaagctattcagcatgaatcaggaatcttgggacctttactttatggggaagttggagacacactgttgattatatttaagaatcaagcaagcagaccatataacatctaccctcacggaatcactgatgtccgtcctttgtattcaaggagattaccaaaaggtgtaaaacatttgaaggattttccaattctgccaggagaaatattcaaatataaatggacagtgactgtagaagatgggccaactaaatcagatcctcggtgcctgacccgctattactctagtttcgttaatatggagagagatctagcttcaggactcattggccctctcctcatctgctacaaagaatctgtagatcaaagaggaaaccagataatgtcagacaagaggaatgtcatcctgttttctgtatttgatgagaaccgaagctggtacctcacagagaatatacaacgctttctccccaatccagctggagtgcagcttgaggatccagagttccaagcctccaacatcatgcacagcatcaatggctatgtttttgatagtttgcagttgtcagtttgtttgcatgaggtggcatactggtacattctaagcattggagcacagactgacttcctttctgtcttcttctctggatataccttcaaacacaaaatggtctatgaagacacactcaccctattcccattctcaggagaaactgtcttcatgtcgatggaaaacccaggtctatggattctggggtgccacaactcagactttcggaacagaggcatgaccgccttactgaaggtttctagttgtgacaagaacactggtgattattacgaggacagttatgaagatatttcagcatacttgctgagtaaaaacaatgccattgaaccaagaagcttctctcaaaacccaccagtcttgaaacgccatcaacgggaaataactcgtactactcttcagtcagatcaagaggaaatcgattatgatgataccatatcagttgaaatgaagaaggaagattttgacatttatgatgaggatgaaaatcagagcccccgcagctttcaaaagaaaacacgacactattttattgctgcagtggagaggctctgggattatgggatgagtagctccccacatgttctaagaaacagggctcagagtggcggcgcgccaacgtccgaaagtgctacccctgagtcaggccctggtagtgagcctgccacaagcggaagcgaaactccggggacctcagagtctgccactcccgaatcggggccaggctctgaaccggccacttcagggagcgaaacaccaggaacatcggagagcgctaccccggagagcgggccaggaactagtactgagcctagcgagggaagtgcacctggtacaagcgagtccgccacacccgagtctggccctggctctccagcgggctcacccacgagcactgaagagggctctcccgctggcagcccaacgtcgacagaagaaggatcaccagcaggctcccccacatcaacagaggagggtacatcagaatctgctactcccgagagtggacccggtacctccactgagcccagcgaggggagtgcaccaggtgcctcgagcagtgtccctcagttcaagaaagttgttttccaggaatttactgatggctcctttactcagcccttataccgtggagaactaaatgaacatttgggactcctggggccatatataagagcagaagttgaagataatatcatggtaactttcagaaatcaggcctctcgtccctattccttctattctagccttatttcttatgaggaagatcagaggcaaggagcagaacctagaaaaaactttgtcaagcctaatgaaaccaaaacttacttttggaaagtgcaacatcatatggcacccactaaagatgagtttgactgcaaagcctgggcttatttctctgatgttgacctggaaaaagatgtgcactcaggcctgattggaccccttctggtctgccacactaacacactgaaccctgctcatgggagacaagtgacagtacaggaatttgctctgtttttcaccatctttgatgagaccaaaagctggtacttcactgaaaatatggaaagaaactgcagggctccctgcaatatccagatggaagatcccacttttaaagagaattatcgcttccatgcaatcaatggctacataatggatacactacctggcttagtaatggctcaggatcaaaggattcgatggtatctgctcagcatgggcagcaatgaaaacatccattctattcatttcagtggacatgtgttcactgtacgaaaaaaagaggagtataaaatggcactgtacaatctctatccaggtgtttttgagacagtggaaatgttaccatccaaagctggaatttggcgggtggaatgccttattggcgagcatctacatgctgggatgagcacactttttctggtgtacagcaataagtgtcagactcccctgggaatggcttctggacacattagagattttcagattacagcttcaggacaatatggacagtgggccccaaagctggccagacttcattattccggatcaatcaatgcctggagcaccaaggagcccttttcttggatcaaggtggatctgttggcaccaatgattattcacggcatcaagacccagggtgcccgtcagaagttctccagcctctacatctctcagtttatcatcatgtatagtcttgatgggaagaagtggcagacttatcgaggaaattccactggaaccttaatggtcttctttggcaatgtggattcatctgggataaaacacaatatttttaaccctccaattattgctcgatacatccgtttgcacccaactcattatagcattcgcagcactcttcgcatggagttgatgggctgtgatttaaatagttgcagcatgccattgggaatggagagtaaagcaatatcagatgcacagattactgcttcatcctactttaccaatatgtttgccacctggtctccttcaaaagctcgacttcacctccaagggaggagtaatgcctggagacctcaggtgaataatccaaaagagtggctgcaagtggacttccagaagacaatgaaagtcacaggagtaactactcagggagtaaaatctctgcttaccagcatgtatgtgaaggagttcctcatctccagcagtcaagatggccatcagtggactctcttttttcagaatggcaaagtaaaggtttttcagggaaatcaagactccttcacacctgtggtgaactctctagacccaccgttactgactcgctaccttcgaattcacccccagagttgggtgcaccagattgccctgaggatggaggttctgggctgcgaggcacaggacctctacggcgccggatcacctggggccgaaacggccgaacaaaaactcatctcagaagaggatctgtcacctgcaaccggtcatcatcaccatcaccattga

SEQ ID NO: 997 - protein, 1769 aa, synthetic construct
  REGION 1..1769: note = Description of Artificial Sequence: Synthetic polypeptide
ATRRYYLGAVELSWDYMQSDLGELPVDARFPPRVPKSFPFGAPTSESATPESGPGSEPATSGSETPGTSESATPESGPGSEPATSGSETPGTSESATPESGPGTSTEPSEGSAPGSPAGSPTSTEEGTSESATPESGPGSEPATSGSETPGTSESATPESGPGSPAGSPTSTEEGSPAGSPTSTEEGASSNTSVVYKKTLFVEFTDHLFNIAKPRPPWMGLLGPTIQAEVYDTVVITLKNMASHPVSLHAVGVSYWKASEGAEYDDQTSQREKEDDKVFPGGSHTYVWQVLKENGPMASDPLCLTYSYLSHVDLVKDLNSGLIGALLVCREGSLAKEKTQTLHKFILLFAVFDEGKSWHSETKNSLMQDRDAASARAWPKMHTVNGYVNRSLPGLIGCHRKSVYWHVIGMGTTPEVHSIFLEGHTFLVRNHRQASLEISPITFLTAQTLLMDLGQFLLFCHISSHQHDGMEAYVKVDSCPEEPQLRMKNNEEAEDYDDDLTDSEMDVVRFDDDNSPSFIQIRSVAKKHPKTWVHYIAAEEEDWDYAPLVLAPDDRSYKSQYLNNGPQRIGRKYKKVRFMAYTDETFKTREAIQHESGILGPLLYGEVGDTLLIIFKNQASRPYNIYPHGITDVRPLYSRRLPKGVKHLKDFPILPGEIFKYKWTVTVEDGPTKSDPRCLTRYYSSFVNMERDLASGLIGPLLICYKESVDQRGNQIMSDKRNVILFSVFDENRSWYLTENIQRFLPNPAGVQLEDPEFQASNIMHSINGYVFDSLQLSVCLHEVAYWYILSIGAQTDFLSVFFSGYTFKHKMVYEDTLTLFPFSGETVFMSMENPGLWILGCHNSDFRNRGMTALLKVSSCDKNTGDYYEDSYEDISAYLLSKNNAIEPRSFSQNPPVLKRHQREITRTTLQSDQEEIDYDDTISVEMKKEDFDIYDEDENQSPRSFQKKTRHYFIAAVERLWDYGMSSSPHVLRNRAQSGGAPTSESATPESGPGSEPATSGSETPGTSESATPESGPGSEPATSGSETPGTSESATPESGPGTSTEPSEGSAPGTSESATPESGPGSPAGSPTSTEEGSPAGSPTSTEEGSPAGSPTSTEEGTSESATPESGPGTSTEPSEGSAPGASSSVPQFKKVVFQEFTDGSFTQPLYRGELNEHLGLLGPYIRAEVEDNIMVTFRNQASRPYSFYSSLISYEEDQRQGAEPRKNFVKPNETKTYFWKVQHHMAPTKDEFDCKAWAYFSDVDLEKDVHSGLIGPLLVCHTNTLNPAHGRQVTVQEFALFFTIFDETKSWYFTENMERNCRAPCNIQMEDPTFKENYRFHAINGYIMDTLPGLVMAQDQRIRWYLLSMGSNENIHSIHFSGHVFTVRKKEEYKMALYNLYPGVFETVEMLPSKAGIWRVECLIGEHLHAGMSTLFLVYSNKCQTPLGMASGHIRDFQITASGQYGQWAPKLARLHYSGSINAWSTKEPFSWIKVDLLAPMIIHGIKTQGARQKFSSLYISQFIIMYSLDGKKWQTYRGNSTGTLMVFFGNVDSSGIKHNIFNPPIIARYIRLHPTHYSIRSTLRMELMGCDLNSCSMPLGMESKAISDAQITASSYFTNMFATWSPSKARLHLQGRSNAWRPQVNNPKEWLQVDFQKTMKVTGVTTQGVKSLLTSMYVKEFLISSSQDGHQWTLFFQNGKVKVFQGNQDSFTPVVNSLDPPLLTRYLRIHPQSWVHQIALRMEVLGCEAQDLYGAGSPGAETAEQKLISEEDLSPATGHHHHHH

SEQ ID NO: 998 - DNA, 5310 bp, synthetic construct
  misc_feature 1..5310: note = Description of Artificial Sequence: Synthetic polynucleotide
  source 1..5310: mol_type = other DNA
gccaccagaagatactacctgggtgcagtggaactgtcatgggactatatgcaaagtgatctcggtgagctgcctgtggacgcaagatttcctcctagagtgccaaaatcttttccattcggcgcgccaacatcagagagcgccacccctgaaagtggtcccgggagcgagccagccacatctgggtcggaaacgccaggcacaagtgagtctgcaactcccgagtccggacctggctccgagcctgccactagcggctccgagactccgggaacttccgagagcgctacaccagaaagcggacccggaaccagtaccgaacctagcgagggctctgctccgggcagcccagccggctctcctacatccacggaggagggcacttccgaatccgccaccccggagtcagggccaggatctgaacccgctacctcaggcagtgagacgccaggaacgagcgagtccgctacaccggagagtgggccagggagccctgctggatctcctacgtccactgaggaagggtcaccagcgggctcgcccaccagcactgaagaaggtgcctcgagcaacacctcagtcgtgtacaaaaagactctgtttgtagaattcacggatcaccttttcaacatcgctaagccaaggccaccctggatgggtctgctaggtcctaccatccaggctgaggtttatgatacagtggtcattacacttaagaacatggcttcccatcctgtcagtcttcatgctgttggtgtatcctactggaaagcttctgagggagctgaatatgatgatcagaccagtcaaagggagaaagaagatgataaagtcttccctggtggaagccatacatatgtctggcaggtcctgaaagagaatggtccaatggcctctgacccactgtgccttacctactcatatctttctcatgtggacctggtaaaagacttgaattcaggcctcattggagccctactagtatgtagagaagggagtctggccaaggaaaagacacagaccttgcacaaatttatactactttttgctgtatttgatgaagggaaaagttggcactcagaaacaaagaactccttgatgcaggatagggatgctgcatctgctcgggcctggcctaaaatgcacacagtcaatggttatgtaaacaggtctctgccaggtctgattggatgccacaggaaatcagtctattggcatgtgattggaatgggcaccactcctgaagtgcactcaatattcctcgaaggtcacacatttcttgtgaggaaccatcgccaggctagcttggaaatctcgccaataactttccttactgctcaaacactcttgatggaccttggacagtttctactgttttgtcatatctcttcccaccaacatgatggcatggaagcttatgtcaaagtagacagctgtccagaggaaccccaactacgaatgaaaaataatgaagaagcggaagactatgatgatgatcttactgattctgaaatggatgtggtcaggtttgatgatgacaactctccttcctttatccaaattcgctcagttgccaagaagcatcctaaaacttgggtacattacattgctgctgaagaggaggactgggactatgctcccttagtcctcgcccccgatgacagaagttataaaagtcaatatttgaacaatggccctcagcggattggtaggaagtacaaaaaagtccgatttatggcatacacagatgaaacctttaagactcgtgaagctattcagcatgaatcaggaatcttgggacctttactttatggggaagttggagacacactgttgattatatttaagaatcaagcaagcagaccatataacatctaccctcacggaatcactgatgtccgtcctttgtattcaaggagattaccaaaaggtgtaaaacatttgaaggattttccaattctgccaggagaaatattcaaatataaatggacagtgactgtagaagatgggccaactaaatcagatcctcggtgcctgacccgctattactctagtttcgttaatatggagagagatctagcttcaggactcattggccctctcctcatctgctacaaagaatctgtagatcaaagaggaaaccagataatgtcagacaagaggaatgtcatcctgttttctgtatttgatgagaaccgaagctggtacctcacagagaatatacaacgctttctccccaatccagctggagtgcagcttgaggatccagagttccaagcctccaacatcatgcacagcatcaatggctatgtttttgatagtttgcagttgtcagtttgtttgcatgaggtggcatactggtacattctaagcattggagcacagactgacttcctttctgtcttcttctctggatataccttcaaacacaaaatggtctatgaagacacactcaccctattcccattctcaggagaaactgtcttcatgtcgatggaaaacccaggtctatggattctggggtgccacaactcagactttcggaacagaggcatgaccgccttactgaaggtttctagttgtgacaagaacactggtgattattacgaggacagttatgaagatatttcagcatacttgctgagtaaaaacaatgccattgaaccaagaagcttctctcaaaacccaccagtcttgaaacgccatcaacgggaaataactcgtactactcttcagtcagatcaagaggaaatcgattatgatgataccatatcagttgaaatgaagaaggaagattttgacatttatgatgaggatgaaaatcagagcccccgcagctttcaaaagaaaacacgacactattttattgctgcagtggagaggctctgggattatgggatgagtagctccccacatgttctaagaaacagggctcagagtggcggcgcgccaacgtccgaaagtgctacccctgagtcaggccctggtagtgagcctgccacaagcggaagcgaaactccggggacctcagagtctgccactcccgaatcggggccaggctctgaaccggccacttcagggagcgaaacaccaggaacatcggagagcgctaccccggagagcgggccaggaactagtactgagcctagcgagggaagtgcacctggtacaagcgagtccgccacacccgagtctggccctggctctccagcgggctcacccacgagcactgaagagggctctcccgctggcagcccaacgtcgacagaagaaggatcaccagcaggctcccccacatcaacagaggagggtacatcagaatctgctactcccgagagtggacccggtacctccactgagcccagcgaggggagtgcaccaggtgcctcgagcagtgtccctcagttcaagaaagttgttttccaggaatttactgatggctcctttactcagcccttataccgtggagaactaaatgaacatttgggactcctggggccatatataagagcagaagttgaagataatatcatggtaactttcagaaatcaggcctctcgtccctattccttctattctagccttatttcttatgaggaagatcagaggcaaggagcagaacctagaaaaaactttgtcaagcctaatgaaaccaaaacttacttttggaaagtgcaacatcatatggcacccactaaagatgagtttgactgcaaagcctgggcttatttctctgatgttgacctggaaaaagatgtgcactcaggcctgattggaccccttctggtctgccacactaacacactgaaccctgctcatgggagacaagtgacagtacaggaatttgctctgtttttcaccatctttgatgagaccaaaagctggtacttcactgaaaatatggaaagaaactgcagggctccctgcaatatccagatggaagatcccacttttaaagagaattatcgcttccatgcaatcaatggctacataatggatacactacctggcttagtaatggctcaggatcaaaggattcgatggtatctgctcagcatgggcagcaatgaaaacatccattctattcatttcagtggacatgtgttcactgtacgaaaaaaagaggagtataaaatggcactgtacaatctctatccaggtgtttttgagacagtggaaatgttaccatccaaagctggaatttggcgggtggaatgccttattggcgagcatctacatgctgggatgagcacactttttctggtgtacagcaataagtgtcagactcccctgggaatggcttctggacacattagagattttcagattacagcttcaggacaatatggacagtgggccccaaagctggccagacttcattattccggatcaatcaatgcctggagcaccaaggagcccttttcttggatcaaggtggatctgttggcaccaatgattattcacggcatcaagacccagggtgcccgtcagaagttctccagcctctacatctctcagtttatcatcatgtatagtcttgatgggaagaagtggcagacttatcgaggaaattccactggaaccttaatggtcttctttggcaatgtggattcatctgggataaaacacaatatttttaaccctccaattattgctcgatacatccgtttgcacccaactcattatagcattcgcagcactcttcgcatggagttgatgggctgtgatttaaatagttgcagcatgccattgggaatggagagtaaagcaatatcagatgcacagattactgcttcatcctactttaccaatatgtttgccacctggtctccttcaaaagctcgacttcacctccaagggaggagtaatgcctggagacctcaggtgaataatccaaaagagtggctgcaagtggacttccagaagacaatgaaagtcacaggagtaactactcagggagtaaaatctctgcttaccagcatgtatgtgaaggagttcctcatctccagcagtcaagatggccatcagtggactctcttttttcagaatggcaaagtaaaggtttttcagggaaatcaagactccttcacacctgtggtgaactctctagacccaccgttactgactcgctaccttcgaattcacccccagagttgggtgcaccagattgccctgaggatggaggttctgggctgcgaggcacaggacctctacggcgccggatcacctggggccgaaacggccgaacaaaaactcatctcagaagaggatctgtcacctgcaaccggtcatcatcaccatcaccattga

SEQ ID NO: 999 - protein, 1769 aa, synthetic construct
  REGION 1..1769: note = Description of Artificial Sequence: Synthetic polypeptide
ATRRYYLGAVELSWDYMQGAPGSSPSASTGTGPGSSPSASTGTGPGASPGTSSTGSPGASPGTSSTGSPGSSTPSGATGSPGSSPSASTGTGPGASPGTSSTGSPGSSPSASTGTGPGTPGSGTASSSPGSSTPSGATGSPGSSTPSGATGSPGASPGTSSTGSPASSSDLGELPVDARFPPRVPKSFPFNTSVVYKKTLFVEFTDHLFNIAKPRPPWMGLLGPTIQAEVYDTVVITLKNMASHPVSLHAVGVSYWKASEGAEYDDQTSQREKEDDKVFPGGSHTYVWQVLKENGPMASDPLCLTYSYLSHVDLVKDLNSGLIGALLVCREGSLAKEKTQTLHKFILLFAVFDEGKSWHSETKNSLMQDRDAASARAWPKMHTVNGYVNRSLPGLIGCHRKSVYWHVIGMGTTPEVHSIFLEGHTFLVRNHRQASLEISPITFLTAQTLLMDLGQFLLFCHISSHQHDGMEAYVKVDSCPEEPQLRMKNNEEAEDYDDDLTDSEMDVVRFDDDNSPSFIQIRSVAKKHPKTWVHYIAAEEEDWDYAPLVLAPDDRSYKSQYLNNGPQRIGRKYKKVRFMAYTDETFKTREAIQHESGILGPLLYGEVGDTLLIIFKNQASRPYNIYPHGITDVRPLYSRRLPKGVKHLKDFPILPGEIFKYKWTVTVEDGPTKSDPRCLTRYYSSFVNMERDLASGLIGPLLICYKESVDQRGNQIMSDKRNVILFSVFDENRSWYLTENIQRFLPNPAGVQLEDPEFQASNIMHSINGYVFDSLQLSVCLHEVAYWYILSIGAQTDFLSVFFSGYTFKHKMVYEDTLTLFPFSGETVFMSMENPGLWILGCHNSDFRNRGMTALLKVSSCDKNTGDYYEDSYEDISAYLLSKNNAIEPRSFSQNPPVLKRHQREITRTTLQSDQEEIDYDDTISVEMKKEDFDIYDEDENQSPRSFQKKTRHYFIAAVERLWDYGMSSSPHVLRNRAQSGGAPTSESATPESGPGSEPATSGSETPGTSESATPESGPGSEPATSGSETPGTSESATPESGPGTSTEPSEGSAPGTSESATPESGPGSPAGSPTSTEEGSPAGSPTSTEEGSPAGSPTSTEEGTSESATPESGPGTSTEPSEGSAPGASSSVPQFKKVVFQEFTDGSFTQPLYRGELNEHLGLLGPYIRAEVEDNIMVTFRNQASRPYSFYSSLISYEEDQRQGAEPRKNFVKPNETKTYFWKVQHHMAPTKDEFDCKAWAYFSDVDLEKDVHSGLIGPLLVCHTNTLNPAHGRQVTVQEFALFFTIFDETKSWYFTENMERNCRAPCNIQMEDPTFKENYRFHAINGYIMDTLPGLVMAQDQRIRWYLLSMGSNENIHSIHFSGHVFTVRKKEEYKMALYNLYPGVFETVEMLPSKAGIWRVECLIGEHLHAGMSTLFLVYSNKCQTPLGMASGHIRDFQITASGQYGQWAPKLARLHYSGSINAWSTKEPFSWIKVDLLAPMIIHGIKTQGARQKFSSLYISQFIIMYSLDGKKWQTYRGNSTGTLMVFFGNVDSSGIKHNIFNPPIIARYIRLHPTHYSIRSTLRMELMGCDLNSCSMPLGMESKAISDAQITASSYFTNMFATWSPSKARLHLQGRSNAWRPQVNNPKEWLQVDFQKTMKVTGVTTQGVKSLLTSMYVKEFLISSSQDGHQWTLFFQNGKVKVFQGNQDSFTPVVNSLDPPLLTRYLRIHPQSWVHQIALRMEVLGCEAQDLYGAGSPGAETAEQKLISEEDLSPATGHHHHHH

SEQ ID NO: 1000 - DNA, 5310 bp, synthetic construct
  misc_feature 1..5310: note = Description of Artificial Sequence: Synthetic polynucleotide
  source 1..5310: mol_type = other DNA
gccaccagaagatactacctgggtgcagtggaactgtcatgggactatatgcaaggcgcgccaggctccagcccctccgcgagcacgggaaccggaccaggttcgtcaccctcagcatcaacggggacgggaccgggggcgtcaccaggaacgtcctccaccggctcgccgggtgcatcacccggaacgtcatcgaccggatcgccagggagctcgacgccatcaggcgcaacaggatcacctggctcaagccctagcgcgtcaaccggcacgggtccgggtgcctcccctggcacgtccagcaccggatcacccggatcgagcccatccgcctcaaccggaaccggacccggtacaccagggtcgggaacagcctcctcgtcaccaggctcctcaaccccctcgggagccacgggttcgcccggttcgtcaacgccttccggagcaactggtagccccggagcatcgccaggaacttcgagcacggggtcgcccgcctcgagcagtgatctcggtgagctgcctgtggacgcaagatttcctcctagagtgccaaaatcttttccattcaacacctcagtcgtgtacaaaaagactctgtttgtagaattcacggatcaccttttcaacatcgctaagccaaggccaccctggatgggtctgctaggtcctaccatccaggctgaggtttatgatacagtggtcattacacttaagaacatggcttcccatcctgtcagtcttcatgctgttggtgtatcctactggaaagcttctgagggagctgaatatgatgatcagaccagtcaaagggagaaagaagatgataaagtcttccctggtggaagccatacatatgtctggcaggtcctgaaagagaatggtccaatggcctctgacccactgtgccttacctactcatatctttctcatgtggacctggtaaaagacttgaattcaggcctcattggagccctactagtatgtagagaagggagtctggccaaggaaaagacacagaccttgcacaaatttatactactttttgctgtatttgatgaagggaaaagttggcactcagaaacaaagaactccttgatgcaggatagggatgctgcatctgctcgggcctggcctaaaatgcacacagtcaatggttatgtaaacaggtctctgccaggtctgattggatgccacaggaaatcagtctattggcatgtgattggaatgggcaccactcctgaagtgcactcaatattcctcgaaggtcacacatttcttgtgaggaaccatcgccaggctagcttggaaatctcgccaataactttccttactgctcaaacactcttgatggaccttggacagtttctactgttttgtcatatctcttcccaccaacatgatggcatggaagcttatgtcaaagtagacagctgtccagaggaaccccaactacgaatgaaaaataatgaagaagcggaagactatgatgatgatcttactgattctgaaatggatgtggtcaggtttgatgatgacaactctccttcctttatccaaattcgctcagttgccaagaagcatcctaaaacttgggtacattacattgctgctgaagaggaggactgggactatgctcccttagtcctcgcccccgatgacagaagttataaaagtcaatatttgaacaatggccctcagcggattggtaggaagtacaaaaaagtccgatttatggcatacacagatgaaacctttaagactcgtgaagctattcagcatgaatcaggaatcttgggacctttactttatggggaagttggagacacactgttgattatatttaagaatcaagcaagcagaccatataacatctaccctcacggaatcactgatgtccgtcctttgtattcaaggagattaccaaaaggtgtaaaacatttgaaggattttccaattctgccaggagaaatattcaaatataaatggacagtgactgtagaagatgggccaactaaatcagatcctcggtgcctgacccgctattactctagtttcgttaatatggagagagatctagcttcaggactcattggccctctcctcatctgctacaaagaatctgtagatcaaagaggaaaccagataatgtcagacaagaggaatgtcatcctgttttctgtatttgatgagaaccgaagctggtacctcacagagaatatacaacgctttctccccaatccagctggagtgcagcttgaggatccagagttccaagcctccaacatcatgcacagcatcaatggctatgtttttgatagtttgcagttgtcagtttgtttgcatgaggtggcatactggtacattctaagcattggagcacagactgacttcctttctgtcttcttctctggatataccttcaaacacaaaatggtctatgaagacacactcaccctattcccattctcaggagaaactgtcttcatgtcgatggaaaacccaggtctatggattctggggtgccacaactcagactttcggaacagaggcatgaccgccttactgaaggtttctagttgtgacaagaacactggtgattattacgaggacagttatgaagatatttcagcatacttgctgagtaaaaacaatgccattgaaccaagaagcttctctcaaaacccaccagtcttgaaacgccatcaacgggaaataactcgtactactcttcagtcagatcaagaggaaatcgattatgatgataccatatcagttgaaatgaagaaggaagattttgacatttatgatgaggatgaaaatcagagcccccgcagctttcaaaagaaaacacgacactattttattgctgcagtggagaggctctgggattatgggatgagtagctccccacatgttctaagaaacagggctcagagtggcggcgcgccaacgtccgaaagtgctacccctgagtcaggccctggtagtgagcctgccacaagcggaagcgaaactccggggacctcagagtctgccactcccgaatcggggccaggctctgaaccggccacttcagggagcgaaacaccaggaacatcggagagcgctaccccggagagcgggccaggaactagtactgagcctagcgagggaagtgcacctggtacaagcgagtccgccacacccgagtctggccctggctctccagcgggctcacccacgagcactgaagagggctctcccgctggcagcccaacgtcgacagaagaaggatcaccagcaggctcccccacatcaacagaggagggtacatcagaatctgctactcccgagagtggacccggtacctccactgagcccagcgaggggagtgcaccaggtgcctcgagcagtgtccctcagttcaagaaagttgttttccaggaatttactgatggctcctttactcagcccttataccgtggagaactaaatgaacatttgggactcctggggccatatataagagcagaagttgaagataatatcatggtaactttcagaaatcaggcctctcgtccctattccttctattctagccttatttcttatgaggaagatcagaggcaaggagcagaacctagaaaaaactttgtcaagcctaatgaaaccaaaacttacttttggaaagtgcaacatcatatggcacccactaaagatgagtttgactgcaaagcctgggcttatttctctgatgttgacctggaaaaagatgtgcactcaggcctgattggaccccttctggtctgccacactaacacactgaaccctgctcatgggagacaagtgacagtacaggaatttgctctgtttttcaccatctttgatgagaccaaaagctggtacttcactgaaaatatggaaagaaactgcagggctccctgcaatatccagatggaagatcccacttttaaagagaattatcgcttccatgcaatcaatggctacataatggatacactacctggcttagtaatggctcaggatcaaaggattcgatggtatctgctcagcatgggcagcaatgaaaacatccattctattcatttcagtggacatgtgttcactgtacgaaaaaaagaggagtataaaatggcactgtacaatctctatccaggtgtttttgagacagtggaaatgttaccatccaaagctggaatttggcgggtggaatgccttattggcgagcatctacatgctgggatgagcacactttttctggtgtacagcaataagtgtcagactcccctgggaatggcttctggacacattagagattttcagattacagcttcaggacaatatggacagtgggccccaaagctggccagacttcattattccggatcaatcaatgcctggagcaccaaggagcccttttcttggatcaaggtggatctgttggcaccaatgattattcacggcatcaagacccagggtgcccgtcagaagttctccagcctctacatctctcagtttatcatcatgtatagtcttgatgggaagaagtggcagacttatcgaggaaattccactggaaccttaatggtcttctttggcaatgtggattcatctgggataaaacacaatatttttaaccctccaattattgctcgatacatccgtttgcacccaactcattatagcattcgcagcactcttcgcatggagttgatgggctgtgatttaaatagttgcagcatgccattgggaatggagagtaaagcaatatcagatgcacagattactgcttcatcctactttaccaatatgtttgccacctggtctccttcaaaagctcgacttcacctccaagggaggagtaatgcctggagacctcaggtgaataatccaaaagagtggctgcaagtggacttccagaagacaatgaaagtcacaggagtaactactcagggagtaaaatctctgcttaccagcatgtatgtgaaggagttcctcatctccagcagtcaagatggccatcagtggactctcttttttcagaatggcaaagtaaaggtttttcagggaaatcaagactccttcacacctgtggtgaactctctagacccaccgttactgactcgctaccttcgaattcacccccagagttgggtgcaccagattgccctgaggatggaggttctgggctgcgaggcacaggacctctacggcgccggatcacctggggccgaaacggccgaacaaaaactcatctcagaagaggatctgtcacctgcaaccggtcatcatcaccatcaccattga

SEQ ID NO: 1001 - protein, 1772 aa, synthetic construct
  REGION 1..1772: note = Description of Artificial Sequence: Synthetic polypeptide
ATRRYYLGAVELSWDYMQSDLGELPVDARFPPRVPKSFPFNTSVVYKKTLFVEFTDHLFNIAKPRPPWMGLLGPTIQAEVYDTVVITLKNMASHPVSLHAVGVSYWKASEGAEYDDQTSQREKEDDKVFPGGSHTYVWQVLKENGPMASDPLCLTYSYLSHVDLVKDLNSGLIGALLVCREGSLAKEKTQTLHKFILLFAVFDEGKSWHSETKNSLMQDRDAASARAWPKMHTVNGYVNRSLPGLIGCHRKSVYWHVIGMGTTPEVHSIFLEGHTFLVRNHRQASLEISPITFLTAQTLLMDLGQFLLFCHISSHQHDGMEAYVKVDSCPEEPQLRMKNNEEAEDYDDDLTDSEMDVVRFDDDNSPSFIQIRSVAKKHPKTWVHYIAAEEEDWDYAPLVLAPDGAPGASPGTSSTGSPGSSPSASTGTGPGSSPSASTGTGPGTPGSGTASSSPGSSTPSGATGSPGSSPSASTGTGPGASPGTSSTGSPGTPGSGTASSSPGSSTPSGATGSPGTPGSGTASSSPGASPGTSSTGSPGASPGTSSTGSPASSDRSYKSQYLNNGPQRIGRKYKKVRFMAYTDETFKTREAIQHESGILGPLLYGEVGDTLLIIFKNQASRPYNIYPHGITDVRPLYSRRLPKGVKHLKDFPILPGEIFKYKWTVTVEDGPTKSDPRCLTRYYSSFVNMERDLASGLIGPLLICYKESVDQRGNQIMSDKRNVILFSVFDENRSWYLTENIQRFLPNPAGVQLEDPEFQASNIMHSINGYVFDSLQLSVCLHEVAYWYILSIGAQTDFLSVFFSGYTFKHKMVYEDTLTLFPFSGETVFMSMENPGLWILGCHNSDFRNRGMTALLKVSSCDKNTGDYYEDSYEDISAYLLSKNNAIEPRSFSQNPPVLKRHQREITRTTLQSDQEEIDYDDTISVEMKKEDFDIYDEDENQSPRSFQKKTRHYFIAAVERLWDYGMSSSPHVLRNRAQGAPGTPGSGTASSSPGASPGTSSTGSPGASPGTSSTGSPGASPGTSSTGSPGSSPSASTGTGPGTPGSGTASSSPGASPGTSSTGSPGASPGTSSTGSPGASPGTSSTGSPGSSTPSGATGSPGSSTPSGATGSPGASPGTSSTGSPASSRAQSGSVPQFKKVVFQEFTDGSFTQPLYRGELNEHLGLLGPYIRAEVEDNIMVTFRNQASRPYSFYSSLISYEEDQRQGAEPRKNFVKPNETKTYFWKVQHHMAPTKDEFDCKAWAYFSDVDLEKDVHSGLIGPLLVCHTNTLNPAHGRQVTVQEFALFFTIFDETKSWYFTENMERNCRAPCNIQMEDPTFKENYRFHAINGYIMDTLPGLVMAQDQRIRWYLLSMGSNENIHSIHFSGHVFTVRKKEEYKMALYNLYPGVFETVEMLPSKAGIWRVECLIGEHLHAGMSTLFLVYSNKCQTPLGMASGHIRDFQITASGQYGQWAPKLARLHYSGSINAWSTKEPFSWIKVDLLAPMIIHGIKTQGARQKFSSLYISQFIIMYSLDGKKWQTYRGNSTGTLMVFFGNVDSSGIKHNIFNPPIIARYIRLHPTHYSIRSTLRMELMGCDLNSCSMPLGMESKAISDAQITASSYFTNMFATWSPSKARLHLQGRSNAWRPQVNNPKEWLQVDFQKTMKVTGVTTQGVKSLLTSMYVKEFLISSSQDGHQWTLFFQNGKVKVFQGNQDSFTPVVNSLDPPLLTRYLRIHPQSWVHQIALRMEVLGCEAQDLYGAGSPGAETAEQKLISEEDLSPATGHHHHHH

SEQ ID NO: 1002 - DNA, 5319 bp, synthetic construct
  misc_feature 1..5319: note = Description of Artificial Sequence: Synthetic polynucleotide
  source 1..5319: mol_type = other DNA
gccaccagaagatactacctgggtgcagtggaactgtcatgggactatatgcaaagtgatctcggtgagctgcctgtggacgcaagatttcctcctagagtgccaaaatcttttccattcaacacctcagtcgtgtacaaaaagactctgtttgtagaattcacggatcaccttttcaacatcgctaagccaaggccaccctggatgggtctgctaggtcctaccatccaggctgaggtttatgatacagtggtcattacacttaagaacatggcttcccatcctgtcagtcttcatgctgttggtgtatcctactggaaagcttctgagggagctgaatatgatgatcagaccagtcaaagggagaaagaagatgataaagtcttccctggtggaagccatacatatgtctggcaggtcctgaaagagaatggtccaatggcctctgacccactgtgccttacctactcatatctttctcatgtggacctggtaaaagacttgaattcaggcctcattggagccctactagtatgtagagaagggagtctggccaaggaaaagacacagaccttgcacaaatttatactactttttgctgtatttgatgaagggaaaagttggcactcagaaacaaagaactccttgatgcaggatagggatgctgcatctgctcgggcctggcctaaaatgcacacagtcaatggttatgtaaacaggtctctgccaggtctgattggatgccacaggaaatcagtctattggcatgtgattggaatgggcaccactcctgaagtgcactcaatattcctcgaaggtcacacatttcttgtgaggaaccatcgccaggctagcttggaaatctcgccaataactttccttactgctcaaacactcttgatggaccttggacagtttctactgttttgtcatatctcttcccaccaacatgatggcatggaagcttatgtcaaagtagacagctgtccagaggaaccccaactacgaatgaaaaataatgaagaagcggaagactatgatgatgatcttactgattctgaaatggatgtggtcaggtttgatgatgacaactctccttcctttatccaaattcgctcagttgccaagaagcatcctaaaacttgggtacattacattgctgctgaagaggaggactgggactatgctcccttagtcctcgcccccgatggcgcgccaggtgcctcgccgggaacatcatcaactggttcacccgggtcatccccctcggcctcaaccgggacgggtcccggctcatcccccagcgccagcactggaacaggtcctggcactcctggttccggtacggcatcgtcatccccgggaagctcaacaccgtccggagcgacaggatcacctggctcgtcaccttcggcgtcaactggaacggggccaggggcctcacccggaacgtcctcgactgggtcgcctggtacgccgggatcaggaacggcctcatcctcgcctgggtcctcaacgccctcgggtgcgactggttcgccgggaactcctggctcggggacggcctcgtcgtcgcctggggcatcaccggggacgagctccacggggtcccctggagcgtcaccggggacctcctcgacaggtagcccggcctcgagcgacagaagttataaaagtcaatatttgaacaatggccctcagcggattggtaggaagtacaaaaaagtccgatttatggcatacacagatgaaacctttaagactcgtgaagctattcagcatgaatcaggaatcttgggacctttactttatggggaagttggagacacactgttgattatatttaagaatcaagcaagcagaccatataacatctaccctcacggaatcactgatgtccgtcctttgtattcaaggagattaccaaaaggtgtaaaacatttgaaggattttccaattctgccaggagaaatattcaaatataaatggacagtgactgtagaagatgggccaactaaatcagatcctcggtgcctgacccgctattactctagtttcgttaatatggagagagatctagcttcaggactcattggccctctcctcatctgctacaaagaatctgtagatcaaagaggaaaccagataatgtcagacaagaggaatgtcatcctgttttctgtatttgatgagaaccgaagctggtacctcacagagaatatacaacgctttctccccaatccagctggagtgcagcttgaggatccagagttccaagcctccaacatcatgcacagcatcaatggctatgtttttgatagtttgcagttgtcagtttgtttgcatgaggtggcatactggtacattctaagcattggagcacagactgacttcctttctgtcttcttctctggatataccttcaaacacaaaatggtctatgaagacacactcaccctattcccattctcaggagaaactgtcttcatgtcgatggaaaacccaggtctatggattctggggtgccacaactcagactttcggaacagaggcatgaccgccttactgaaggtttctagttgtgacaagaacactggtgattattacgaggacagttatgaagatatttcagcatacttgctgagtaaaaacaatgccattgaaccaagaagcttctctcaaaacccaccagtcttgaaacgccatcaacgggaaataactcgtactactcttcagtcagatcaagaggaaatcgattatgatgataccatatcagttgaaatgaagaaggaagattttgacatttatgatgaggatgaaaatcagagcccccgcagctttcaaaagaaaacacgacactattttattgctgcagtggagaggctctgggattatgggatgagtagctccccacatgttctaagaaacagggctcagggcgcgccaggtacacccggatcgggtacagcgtcatcgagccccggtgcgtcacctggtacgtcgagcacggggtcgccaggggcgtcccctgggacgtcctcaacaggctcgcccggtgcgtcacccggcacgtcgtccacgggttcacctggtagctccccttccgcgtccactggcaccgggcctggaactccggggagcggcacagcgagctcgtcgccgggagcatcgcctgggacatcgagcaccgggtcgccaggagcatcgcccggaacatccagcacaggaagccccggcgcgtcgcccgggacatcaagcacaggttccccgggatcgagcacgccgtccggagccactggatcaccagggagctcgacaccttccggcgcaacgggatcgcccggagccagcccgggtacgtcaagcactggctcccctgcctcgagcagggctcagagtggcagtgtccctcagttcaagaaagttgttttccaggaatttactgatggctcctttactcagcccttataccgtggagaactaaatgaacatttgggactcctggggccatatataagagcagaagttgaagataatatcatggtaactttcagaaatcaggcctctcgtccctattccttctattctagccttatttcttatgaggaagatcagaggcaaggagcagaacctagaaaaaactttgtcaagcctaatgaaaccaaaacttacttttggaaagtgcaacatcatatggcacccactaaagatgagtttgactgcaaagcctgggcttatttctctgatgttgacctggaaaaagatgtgcactcaggcctgattggaccccttctggtctgccacactaacacactgaaccctgctcatgggagacaagtgacagtacaggaatttgctctgtttttcaccatctttgatgagaccaaaagctggtacttcactgaaaatatggaaagaaactgcagggctccctgcaatatccagatggaagatcccacttttaaagagaattatcgcttccatgcaatcaatggctacataatggatacactacctggcttagtaatggctcaggatcaaaggattcgatggtatctgctcagcatgggcagcaatgaaaacatccattctattcatttcagtggacatgtgttcactgtacgaaaaaaagaggagtataaaatggcactgtacaatctctatccaggtgtttttgagacagtggaaatgttaccatccaaagctggaatttggcgggtggaatgccttattggcgagcatctacatgctgggatgagcacactttttctggtgtacagcaataagtgtcagactcccctgggaatggcttctggacacattagagattttcagattacagcttcaggacaatatggacagtgggccccaaagctggccagacttcattattccggatcaatcaatgcctggagcaccaaggagcccttttcttggatcaaggtggatctgttggcaccaatgattattcacggcatcaagacccagggtgcccgtcagaagttctccagcctctacatctctcagtttatcatcatgtatagtcttgatgggaagaagtggcagacttatcgaggaaattccactggaaccttaatggtcttctttggcaatgtggattcatctgggataaaacacaatatttttaaccctccaattattgctcgatacatccgtttgcacccaactcattatagcattcgcagcactcttcgcatggagttgatgggctgtgatttaaatagttgcagcatgccattgggaatggagagtaaagcaatatcagatgcacagattactgcttcatcctactttaccaatatgtttgccacctggtctccttcaaaagctcgacttcacctccaagggaggagtaatgcctggagacctcaggtgaataatccaaaagagtggctgcaagtggacttccagaagacaatgaaagtcacaggagtaactactcagggagtaaaatctctgcttaccagcatgtatgtgaaggagttcctcatctccagcagtcaagatggccatcagtggactctcttttttcagaatggcaaagtaaaggtttttcagggaaatcaagactccttcacacctgtggtgaactctctagacccaccgttactgactcgctaccttcgaattcacccccagagttgggtgcaccagattgccctgaggatggaggttctgggctgcgaggcacaggacctctacggcgccggatcacctggggccgaaacggccgaacaaaaactcatctcagaagaggatctgtcacctgcaaccggtcatcatcaccatcaccattga

SEQ ID NO: 1003 - protein, 1772 aa, synthetic construct
  REGION 1..1772: note = Description of Artificial Sequence: Synthetic polypeptide
ATRRYYLGAVELSWDYMQSDLGELPVDARFPPRVPKSFPFNTSVVYKKTLFVEFTDHLFNIAKPRPPWMGLLGPTIQAEVYDTVVITLKNMASHPVSLHAVGVSYWKASEGAEYDDQTSQREKEDDKVFPGGSHTYVWQVLKENGPMASDPLCLTYSYLSHVDLVKDLNSGLIGALLVCREGSLAKEKTQTLHKFILLFAVFDEGKSWHSETKNSLMQDRDAASARAWPKMHTVNGYVNRSLPGLIGCHRKSVYWHVIGMGTTPEVHSIFLEGHTFLVRNHRQASLEISPITFLTAQTLLMDLGQFLLFCHISSHQHDGMEAYVKVDSCPEEPQLRMKNNEEAEDYDDDLTDSEMDVVRFDDDNSPSFIQIRSVAKKHPKTWVHYIAAEEEDWDYAPLVGAPTSTEPSEGSAPGSPAGSPTSTEEGTSTEPSEGSAPGTSTEPSEGSAPGTSESATPESGPGTSTEPSEGSAPGTSESATPESGPGSEPATSGSETPGTSTEPSEGSAPGTSTEPSEGSAPGTSESATPESGPGTSESATPESGPGASSLAPDDRSYKSQYLNNGPQRIGRKYKKVRFMAYTDETFKTREAIQHESGILGPLLYGEVGDTLLIIFKNQASRPYNIYPHGITDVRPLYSRRLPKGVKHLKDFPILPGEIFKYKWTVTVEDGPTKSDPRCLTRYYSSFVNMERDLASGLIGPLLICYKESVDQRGNQIMSDKRNVILFSVFDENRSWYLTENIQRFLPNPAGVQLEDPEFQASNIMHSINGYVFDSLQLSVCLHEVAYWYILSIGAQTDFLSVFFSGYTFKHKMVYEDTLTLFPFSGETVFMSMENPGLWILGCHNSDFRNRGMTALLKVSSCDKNTGDYYEDSYEDISAYLLSKNNAIEPRSFSQNPPVLKRHQREITRTTLQSDQEEIDYDDTISVEMKKEDFDIYDEDENQSPRSFQKKTRHYFIAAVERLWDYGMSSSPHVLRNRAQGAPGTPGSGTASSSPGASPGTSSTGSPGASPGTSSTGSPGASPGTSSTGSPGSSPSASTGTGPGTPGSGTASSSPGASPGTSSTGSPGASPGTSSTGSPGASPGTSSTGSPGSSTPSGATGSPGSSTPSGATGSPGASPGTSSTGSPASSRAQSGSVPQFKKVVFQEFTDGSFTQPLYRGELNEHLGLLGPYIRAEVEDNIMVTFRNQASRPYSFYSSLISYEEDQRQGAEPRKNFVKPNETKTYFWKVQHHMAPTKDEFDCKAWAYFSDVDLEKDVHSGLIGPLLVCHTNTLNPAHGRQVTVQEFALFFTIFDETKSWYFTENMERNCRAPCNIQMEDPTFKENYRFHAINGYIMDTLPGLVMAQDQRIRWYLLSMGSNENIHSIHFSGHVFTVRKKEEYKMALYNLYPGVFETVEMLPSKAGIWRVECLIGEHLHAGMSTLFLVYSNKCQTPLGMASGHIRDFQITASGQYGQWAPKLARLHYSGSINAWSTKEPFSWIKVDLLAPMIIHGIKTQGARQKFSSLYISQFIIMYSLDGKKWQTYRGNSTGTLMVFFGNVDSSGIKHNIFNPPIIARYIRLHPTHYSIRSTLRMELMGCDLNSCSMPLGMESKAISDAQITASSYFTNMFATWSPSKARLHLQGRSNAWRPQVNNPKEWLQVDFQKTMKVTGVTTQGVKSLLTSMYVKEFLISSSQDGHQWTLFFQNGKVKVFQGNQDSFTPVVNSLDPPLLTRYLRIHPQSWVHQIALRMEVLGCEAQDLYGAGSPGAETAEQKLISEEDLSPATGHHHHHH

SEQ ID NO: 1004 - DNA, 5319 bp, synthetic construct
  misc_feature 1..5319: note = Description of Artificial Sequence: Synthetic polynucleotide
  source 1..5319: mol_type = other DNA
gccaccagaagatactacctgggtgcagtggaactgtcatgggactatatgcaaagtgatctcggtgagctgcctgtggacgcaagatttcctcctagagtgccaaaatcttttccattcaacacctcagtcgtgtacaaaaagactctgtttgtagaattcacggatcaccttttcaacatcgctaagccaaggccaccctggatgggtctgctaggtcctaccatccaggctgaggtttatgatacagtggtcattacacttaagaacatggcttcccatcctgtcagtcttcatgctgttggtgtatcctactggaaagcttctgagggagctgaatatgatgatcagaccagtcaaagggagaaagaagatgataaagtcttccctggtggaagccatacatatgtctggcaggtcctgaaagagaatggtccaatggcctctgacccactgtgccttacctactcatatctttctcatgtggacctggtaaaagacttgaattcaggcctcattggagccctactagtatgtagagaagggagtctggccaaggaaaagacacagaccttgcacaaatttatactactttttgctgtatttgatgaagggaaaagttggcactcagaaacaaagaactccttgatgcaggatagggatgctgcatctgctcgggcctggcctaaaatgcacacagtcaatggttatgtaaacaggtctctgccaggtctgattggatgccacaggaaatcagtctattggcatgtgattggaatgggcaccactcctgaagtgcactcaatattcctcgaaggtcacacatttcttgtgaggaaccatcgccaggctagcttggaaatctcgccaataactttccttactgctcaaacactcttgatggaccttggacagtttctactgttttgtcatatctcttcccaccaacatgatggcatggaagcttatgtcaaagtagacagctgtccagaggaaccccaactacgaatgaaaaataatgaagaagcggaagactatgatgatgatcttactgattctgaaatggatgtggtcaggtttgatgatgacaactctccttcctttatccaaattcgctcagttgccaagaagcatcctaaaacttgggtacattacattgctgctgaagaggaggactgggactatgctcccttagtcggcgcgccaaccagtacggagccgtccgaggggagcgcaccaggaagcccggctgggagcccgacttctaccgaagagggtacatctaccgaaccaagtgaaggttcagcaccaggcacctcaacagaaccctctgagggctcggcgcctggtacaagtgagtccgccaccccagaatccgggcctgggacaagcacagaaccttcggaagggagtgcccctggaacatccgaatcggcaaccccagaatcagggccaggatctgagcccgcgacttcgggctccgagacgcctgggacatccaccgagccctccgaaggatcagccccaggcaccagcacggagccctctgagggaagcgcacctggtaccagcgaaagcgcaactcccgaatcaggtcccggtacgagcgagtcggcgaccccggagagcgggccaggtgcctcgagcctcgcccccgatgacagaagttataaaagtcaatatttgaacaatggccctcagcggattggtaggaagtacaaaaaagtccgatttatggcatacacagatgaaacctttaagactcgtgaagctattcagcatgaatcaggaatcttgggacctttactttatggggaagttggagacacactgttgattatatttaagaatcaagcaagcagaccatataacatctaccctcacggaatcactgatgtccgtcctttgtattcaaggagattaccaaaaggtgtaaaacatttgaaggattttccaattctgccaggagaaatattcaaatataaatggacagtgactgtagaagatgggccaactaaatcagatcctcggtgcctgacccgctattactctagtttcgttaatatggagagagatctagcttcaggactcattggccctctcctcatctgctacaaagaatctgtagatcaaagaggaaaccagataatgtcagacaagaggaatgtcatcctgttttctgtatttgatgagaaccgaagctggtacctcacagagaatatacaacgctttctccccaatccagctggagtgcagcttgaggatccagagttccaagcctccaacatcatgcacagcatcaatggctatgtttttgatagtttgcagttgtcagtttgtttgcatgaggtggcatactggtacattctaagcattggagcacagactgacttcctttctgtcttcttctctggatataccttcaaacacaaaatggtctatgaagacacactcaccctattcccattctcaggagaaactgtcttcatgtcgatggaaaacccaggtctatggattctggggtgccacaactcagactttcggaacagaggcatgaccgccttactgaaggtttctagttgtgacaagaacactggtgattattacgaggacagttatgaagatatttcagcatacttgctgagtaaaaacaatgccattgaaccaagaagcttctctcaaaacccaccagtcttgaaacgccatcaacgggaaataactcgtactactcttcagtcagatcaagaggaaatcgattatgatgataccatatcagttgaaatgaagaaggaagattttgacatttatgatgaggatgaaaatcagagcccccgcagctttcaaaagaaaacacgacactattttattgctgcagtggagaggctctgggattatgggatgagtagctccccacatgttctaagaaacagggctcagggcgcgccaggtacacccggatcgggtacagcgtcatcgagccccggtgcgtcacctggtacgtcgagcacggggtcgccaggggcgtcccctgggacgtcctcaacaggctcgcccggtgcgtcacccggcacgtcgtccacgggttcacctggtagctccccttccgcgtccactggcaccgggcctggaactccggggagcggcacagcgagctcgtcgccgggagcatcgcctgggacatcgagcaccgggtcgccaggagcatcgcccggaacatccagcacaggaagccccggcgcgtcgcccgggacatcaagcacaggttccccgggatcgagcacgccgtccggagccactggatcaccagggagctcgacaccttccggcgcaacgggatcgcccggagccagcccgggtacgtcaagcactggctcccctgcctcgagcagggctcagagtggcagtgtccctcagttcaagaaagttgttttccaggaatttactgatggctcctttactcagcccttataccgtggagaactaaatgaacatttgggactcctggggccatatataagagcagaagttgaagataatatcatggtaactttcagaaatcaggcctctcgtccctattccttctattctagccttatttcttatgaggaagatcagaggcaaggagcagaacctagaaaaaactttgtcaagcctaatgaaaccaaaacttacttttggaaagtgcaacatcatatggcacccactaaagatgagtttgactgcaaagcctgggcttatttctctgatgttgacctggaaaaagatgtgcactcaggcctgattggaccccttctggtctgccacactaacacactgaaccctgctcatgggagacaagtgacagtacaggaatttgctctgtttttcaccatctttgatgagaccaaaagctggtacttcactgaaaatatggaaagaaactgcagggctccctgcaatatccagatggaagatcccacttttaaagagaattatcgcttccatgcaatcaatggctacataatggatacactacctggcttagtaatggctcaggatcaaaggattcgatggtatctgctcagcatgggcagcaatgaaaacatccattctattcatttcagtggacatgtgttcactgtacgaaaaaaagaggagtataaaatggcactgtacaatctctatccaggtgtttttgagacagtggaaatgttaccatccaaagctggaatttggcgggtggaatgccttattggcgagcatctacatgctgggatgagcacactttttctggtgtacagcaataagtgtcagactcccctgggaatggcttctggacacattagagattttcagattacagcttcaggacaatatggacagtgggccccaaagctggccagacttcattattccggatcaatcaatgcctggagcaccaaggagcccttttcttggatcaaggtggatctgttggcaccaatgattattcacggcatcaagacccagggtgcccgtcagaagttctccagcctctacatctctcagtttatcatcatgtatagtcttgatgggaagaagtggcagacttatcgaggaaattccactggaaccttaatggtcttctttggcaatgtggattcatctgggataaaacacaatatttttaaccctccaattattgctcgatacatccgtttgcacccaactcattatagcattcgcagcactcttcgcatggagttgatgggctgtgatttaaatagttgcagcatgccattgggaatggagagtaaagcaatatcagatgcacagattactgcttcatcctactttaccaatatgtttgccacctggtctccttcaaaagctcgacttcacctccaagggaggagtaatgcctggagacctcaggtgaataatccaaaagagtggctgcaagtggacttccagaagacaatgaaagtcacaggagtaactactcagggagtaaaatctctgcttaccagcatgtatgtgaaggagttcctcatctccagcagtcaagatggccatcagtggactctcttttttcagaatggcaaagtaaaggtttttcagggaaatcaagactccttcacacctgtggtgaactctctagacccaccgttactgactcgctaccttcgaattcacccccagagttgggtgcaccagattgccctgaggatggaggttctgggctgcgaggcacaggacctctacggcgccggatcacctggggccgaaacggccgaacaaaaactcatctcagaagaggatctgtcacctgcaaccggtcatcatcaccatcaccattga

SEQ ID NO: 1005 - protein, 1769 aa, synthetic construct
  REGION 1..1769: note = Description of Artificial Sequence: Synthetic polypeptide
ATRRYYLGAVELSWDYMQSDLGELPVDARFPPRVPKSFPFNTSVVYKKTLFVEFTDHLFNIAKPRPPWMGLLGPTIQAEVYDTVVITLKNMASHPVSLHAVGVSYWKASEGAEYDDQTSQREKEDDKVFPGGSHTYVWQVLKENGPMASDPLCLTYSYLSHVDLVKDLNSGLIGALLVCREGSLAKEKTQTLHKFILLFAVFDEGKSWHSETKNSLMQDRDAASARAWPKMHTVNGYVNRSLPGLIGCHRKSVYWHVIGMGTTPEVHSIFLEGHTFLVRNHRQASLEISPITFLTAQTLLMDLGQFLLFCHISSHQHDGMEAYVKVDSCPEEPQLRMKNNEEAEDYDDDLTDSEMDVVRFDDDNSPSFIQIRSVAKKHPKTWVHYIAAEEEDWDYAPLVLAPDGAPGASPGTSSTGSPGSSPSASTGTGPGSSPSASTGTGPGTPGSGTASSSPGSSTPSGATGSPGSSPSASTGTGPGASPGTSSTGSPGTPGSGTASSSPGSSTPSGATGSPGTPGSGTASSSPGASPGTSSTGSPGASPGTSSTGSPASSDRSYKSQYLNNGPQRIGRKYKKVRFMAYTDETFKTREAIQHESGILGPLLYGEVGDTLLIIFKNQASRPYNIYPHGITDVRPLYSRRLPKGVKHLKDFPILPGEIFKYKWTVTVEDGPTKSDPRCLTRYYSSFVNMERDLASGLIGPLLICYKESVDQRGNQIMSDKRNVILFSVFDENRSWYLTENIQRFLPNPAGVQLEDPEFQASNIMHSINGYVFDSLQLSVCLHEVAYWYILSIGAQTDFLSVFFSGYTFKHKMVYEDTLTLFPFSGETVFMSMENPGLWILGCHNSDFRNRGMTALLKVSSCDKNTGDYYEDSYEDISAYLLSKNNAIEPRSFSQNPPVLKRHQREITRTTLQSDQEEIDYDDTISVEMKKEDFDIYDEDENQSPRSFQKKTRHYFIAAVERLWDYGMGAPTSESATPESGPGSEPATSGSETPGTSESATPESGPGSEPATSGSETPGTSESATPESGPGTSTEPSEGSAPGTSESATPESGPGSPAGSPTSTEEGSPAGSPTSTEEGSPAGSPTSTEEGTSESATPESGPGTSTEPSEGSAPGASSSSSPHVLRNRAQSGSVPQFKKVVFQEFTDGSFTQPLYRGELNEHLGLLGPYIRAEVEDNIMVTFRNQASRPYSFYSSLISYEEDQRQGAEPRKNFVKPNETKTYFWKVQHHMAPTKDEFDCKAWAYFSDVDLEKDVHSGLIGPLLVCHTNTLNPAHGRQVTVQEFALFFTIFDETKSWYFTENMERNCRAPCNIQMEDPTFKENYRFHAINGYIMDTLPGLVMAQDQRIRWYLLSMGSNENIHSIHFSGHVFTVRKKEEYKMALYNLYPGVFETVEMLPSKAGIWRVECLIGEHLHAGMSTLFLVYSNKCQTPLGMASGHIRDFQITASGQYGQWAPKLARLHYSGSINAWSTKEPFSWIKVDLLAPMIIHGIKTQGARQKFSSLYISQFIIMYSLDGKKWQTYRGNSTGTLMVFFGNVDSSGIKHNIFNPPIIARYIRLHPTHYSIRSTLRMELMGCDLNSCSMPLGMESKAISDAQITASSYFTNMFATWSPSKARLHLQGRSNAWRPQVNNPKEWLQVDFQKTMKVTGVTTQGVKSLLTSMYVKEFLISSSQDGHQWTLFFQNGKVKVFQGNQDSFTPVVNSLDPPLLTRYLRIHPQSWVHQIALRMEVLGCEAQDLYGAGSPGAETAEQKLISEEDLSPATGHHHHHH

SEQ ID NO: 1006 - DNA, 5310 bp, synthetic construct
  misc_feature 1..5310: note = Description of Artificial Sequence: Synthetic polynucleotide
  source 1..5310: mol_type = other DNA
gccaccagaagatactacctgggtgcagtggaactgtcatgggactatatgcaaagtgatctcggtgagctgcctgtggacgcaagatttcctcctagagtgccaaaatcttttccattcaacacctcagtcgtgtacaaaaagactctgtttgtagaattcacggatcaccttttcaacatcgctaagccaaggccaccctggatgggtctgctaggtcctaccatccaggctgaggtttatgatacagtggtcattacacttaagaacatggcttcccatcctgtcagtcttcatgctgttggtgtatcctactggaaagcttctgagggagctgaatatgatgatcagaccagtcaaagggagaaagaagatgataaagtcttccctggtggaagccatacatatgtctggcaggtcctgaaagagaatggtccaatggcctctgacccactgtgccttacctactcatatctttctcatgtggacctggtaaaagacttgaattcaggcctcattggagccctactagtatgtagagaagggagtctggccaaggaaaagacacagaccttgcacaaatttatactactttttgctgtatttgatgaagggaaaagttggcactcagaaacaaagaactccttgatgcaggatagggatgctgcatctgctcgggcctggcctaaaatgcacacagtcaatggttatgtaaacaggtctctgccaggtctgattggatgccacaggaaatcagtctattggcatgtgattggaatgggcaccactcctgaagtgcactcaatattcctcgaaggtcacacatttcttgtgaggaaccatcgccaggctagcttggaaatctcgccaataactttccttactgctcaaacactcttgatggaccttggacagtttctactgttttgtcatatctcttcccaccaacatgatggcatggaagcttatgtcaaagtagacagctgtccagaggaaccccaactacgaatgaaaaataatgaagaagcggaagactatgatgatgatcttactgattctgaaatggatgtggtcaggtttgatgatgacaactctccttcctttatccaaattcgctcagttgccaagaagcatcctaaaacttgggtacattacattgctgctgaagaggaggactgggactatgctcccttagtcctcgcccccgatggcgcgccaggtgcctcgccgggaacatcatcaactggttcacccgggtcatccccctcggcctcaaccgggacgggtcccggctcatcccccagcgccagcactggaacaggtcctggcactcctggttccggtacggcatcgtcatccccgggaagctcaacaccgtccggagcgacaggatcacctggctcgtcaccttcggcgtcaactggaacggggccaggggcctcacccggaacgtcctcgactgggtcgcctggtacgccgggatcaggaacggcctcatcctcgcctgggtcctcaacgccctcgggtgcgactggttcgccgggaactcctggctcggggacggcctcgtcgtcgcctggggcatcaccggggacgagctccacggggtcccctggagcgtcaccggggacctcctcgacaggtagcccggcctcgagcgacagaagttataaaagtcaatatttgaacaatggccctcagcggattggtaggaagtacaaaaaagtccgatttatggcatacacagatgaaacctttaagactcgtgaagctattcagcatgaatcaggaatcttgggacctttactttatggggaagttggagacacactgttgattatatttaagaatcaagcaagcagaccatataacatctaccctcacggaatcactgatgtccgtcctttgtattcaaggagattaccaaaaggtgtaaaacatttgaaggattttccaattctgccaggagaaatattcaaatataaatggacagtgactgtagaagatgggccaactaaatcagatcctcggtgcctgacccgctattactctagtttcgttaatatggagagagatctagcttcaggactcattggccctctcctcatctgctacaaagaatctgtagatcaaagaggaaaccagataatgtcagacaagaggaatgtcatcctgttttctgtatttgatgagaaccgaagctggtacctcacagagaatatacaacgctttctccccaatccagctggagtgcagcttgaggatccagagttccaagcctccaacatcatgcacagcatcaatggctatgtttttgatagtttgcagttgtcagtttgtttgcatgaggtggcatactggtacattctaagcattggagcacagactgacttcctttctgtcttcttctctggatataccttcaaacacaaaatggtctatgaagacacactcaccctattcccattctcaggagaaactgtcttcatgtcgatggaaaacccaggtctatggattctggggtgccacaactcagactttcggaacagaggcatgaccgccttactgaaggtttctagttgtgacaagaacactggtgattattacgaggacagttatgaagatatttcagcatacttgctgagtaaaaacaatgccattgaaccaagaagcttctctcaaaacccaccagtcttgaaacgccatcaacgggaaataactcgtactactcttcagtcagatcaagaggaaatcgattatgatgataccatatcagttgaaatgaagaaggaagattttgacatttatgatgaggatgaaaatcagagcccccgcagctttcaaaagaaaacacgacactattttattgctgcagtggagaggctctgggattatgggatgggcgcgccaacgtccgaaagtgctacccctgagtcaggccctggtagtgagcctgccacaagcggaagcgaaactccggggacctcagagtctgccactcccgaatcggggccaggctctgaaccggccacttcagggagcgaaacaccaggaacatcggagagcgctaccccggagagcgggccaggaactagtactgagcctagcgagggaagtgcacctggtacaagcgagtccgccacacccgagtctggccctggctctccagcgggctcacccacgagcactgaagagggctctcccgctggcagcccaacgtcgacagaagaaggatcaccagcaggctcccccacatcaacagaggagggtacatcagaatctgctactcccgagagtggacccggtacctccactgagcccagcgaggggagtgcaccaggtgcctcgagcagtagctccccacatgttctaagaaacagggctcagagtggcagtgtccctcagttcaagaaagttgttttccaggaatttactgatggctcctttactcagcccttataccgtggagaactaaatgaacatttgggactcctggggccatatataagagcagaagttgaagataatatcatggtaactttcagaaatcaggcctctcgtccctattccttctattctagccttatttcttatgaggaagatcagaggcaaggagcagaacctagaaaaaactttgtcaagcctaatgaaaccaaaacttacttttggaaagtgcaacatcatatggcacccactaaagatgagtttgactgcaaagcctgggcttatttctctgatgttgacctggaaaaagatgtgcactcaggcctgattggaccccttctggtctgccacactaacacactgaaccctgctcatgggagacaagtgacagtacaggaatttgctctgtttttcaccatctttgatgagaccaaaagctggtacttcactgaaaatatggaaagaaactgcagggctccctgcaatatccagatggaagatcccacttttaaagagaattatcgcttccatgcaatcaatggctacataatggatacactacctggcttagtaatggctcaggatcaaaggattcgatggtatctgctcagcatgggcagcaatgaaaacatccattctattcatttcagtggacatgtgttcactgtacgaaaaaaagaggagtataaaatggcactgtacaatctctatccaggtgtttttgagacagtggaaatgttaccatccaaagctggaatttggcgggtggaatgccttattggcgagcatctacatgctgggatgagcacactttttctggtgtacagcaataagtgtcagactcccctgggaatggcttctggacacattagagattttcagattacagcttcaggacaatatggacagtgggccccaaagctggccagacttcattattccggatcaatcaatgcctggagcaccaaggagcccttttcttggatcaaggtggatctgttggcaccaatgattattcacggcatcaagacccagggtgcccgtcagaagttctccagcctctacatctctcagtttatcatcatgtatagtcttgatgggaagaagtggcagacttatcgaggaaattccactggaaccttaatggtcttctttggcaatgtggattcatctgggataaaacacaatatttttaaccctccaattattgctcgatacatccgtttgcacccaactcattatagcattcgcagcactcttcgcatggagttgatgggctgtgatttaaatagttgcagcatgccattgggaatggagagtaaagcaatatcagatgcacagattactgcttcatcctactttaccaatatgtttgccacctggtctccttcaaaagctcgacttcacctccaagggaggagtaatgcctggagacctcaggtgaataatccaaaagagtggctgcaagtggacttccagaagacaatgaaagtcacaggagtaactactcagggagtaaaatctctgcttaccagcatgtatgtgaaggagttcctcatctccagcagtcaagatggccatcagtggactctcttttttcagaatggcaaagtaaaggtttttcagggaaatcaagactccttcacacctgtggtgaactctctagacccaccgttactgactcgctaccttcgaattcacccccagagttgggtgcaccagattgccctgaggatggaggttctgggctgcgaggcacaggacctctacggcgccggatcacctggggccgaaacggccgaacaaaaactcatctcagaagaggatctgtcacctgcaaccggtcatcatcaccatcaccattga

SEQ ID NO: 1007 - protein, 1772 aa, synthetic construct
  REGION 1..1772: note = Description of Artificial Sequence: Synthetic polypeptide
ATRRYYLGAVELSWDYMQSDLGELPVDARFPPRVPKSFPFNTSVVYKKTLFVEFTDHLFNIAKPRPPWMGLLGPTIQAEVYDTVVITLKNMASHPVSLHAVGVSYWKASEGAEYDDQTSQREKEDDKVFPGGSHTYVWQVLKENGPMASDPLCLTYSYLSHVDLVKDLNSGLIGALLVCREGSLAKEKTQTLHKFILLFAVFDEGKSWHSETKNSLMQDRDAASARAWPKMHTVNGYVNRSLPGLIGCHRKSVYWHVIGMGTTPEVHSIFLEGHTFLVRNHRQASLEISPITFLTAQTLLMDLGQFLLFCHISSHQHDGMEAYVKVDSCPEEPQLRMKNNEEAEDYDDDLTDSEMDVVRFDDDNSPSFIQIRSVAKKHPKTWVHYIAAEEEDWDYAPLVLAPDGAPTSTEPSEGSAPGSPAGSPTSTEEGTSTEPSEGSAPGTSTEPSEGSAPGTSESATPESGPGTSTEPSEGSAPGTSESATPESGPGSEPATSGSETPGTSTEPSEGSAPGTSTEPSEGSAPGTSESATPESGPGTSESATPESGPGASSDRSYKSQYLNNGPQRIGRKYKKVRFMAYTDETFKTREAIQHESGILGPLLYGEVGDTLLIIFKNQASRPYNIYPHGITDVRPLYSRRLPKGVKHLKDFPILPGEIFKYKWTVTVEDGPTKSDPRCLTRYYSSFVNMERDLASGLIGPLLICYKESVDQRGNQIMSDKRNVILFSVFDENRSWYLTENIQRFLPNPAGVQLEDPEFQASNIMHSINGYVFDSLQLSVCLHEVAYWYILSIGAQTDFLSVFFSGYTFKHKMVYEDTLTLFPFSGETVFMSMENPGLWILGCHNSDFRNRGMTALLKVSSCDKNTGDYYEDSYEDISAYLLSKNNAIEPRSFSQNPPVLKRHQREITRTTLQSDQEEIDYDDTISVEMKKEDFDIYDEDENQSPRSFQKKTRHYFIAAVERLWDYGMSSSPHVLRNRAQGAPGTPGSGTASSSPGASPGTSSTGSPGASPGTSSTGSPGASPGTSSTGSPGSSPSASTGTGPGTPGSGTASSSPGASPGTSSTGSPGASPGTSSTGSPGASPGTSSTGSPGSSTPSGATGSPGSSTPSGATGSPGASPGTSSTGSPASSRAQSGSVPQFKKVVFQEFTDGSFTQPLYRGELNEHLGLLGPYIRAEVEDNIMVTFRNQASRPYSFYSSLISYEEDQRQGAEPRKNFVKPNETKTYFWKVQHHMAPTKDEFDCKAWAYFSDVDLEKDVHSGLIGPLLVCHTNTLNPAHGRQVTVQEFALFFTIFDETKSWYFTENMERNCRAPCNIQMEDPTFKENYRFHAINGYIMDTLPGLVMAQDQRIRWYLLSMGSNENIHSIHFSGHVFTVRKKEEYKMALYNLYPGVFETVEMLPSKAGIWRVECLIGEHLHAGMSTLFLVYSNKCQTPLGMASGHIRDFQITASGQYGQWAPKLARLHYSGSINAWSTKEPFSWIKVDLLAPMIIHGIKTQGARQKFSSLYISQFIIMYSLDGKKWQTYRGNSTGTLMVFFGNVDSSGIKHNIFNPPIIARYIRLHPTHYSIRSTLRMELMGCDLNSCSMPLGMESKAISDAQITASSYFTNMFATWSPSKARLHLQGRSNAWRPQVNNPKEWLQVDFQKTMKVTGVTTQGVKSLLTSMYVKEFLISSSQDGHQWTLFFQNGKVKVFQGNQDSFTPVVNSLDPPLLTRYLRIHPQSWVHQIALRMEVLGCEAQDLYGAGSPGAETAEQKLISEEDLSPATGHHHHHH

SEQ ID NO: 1008 - DNA, 5319 bp, synthetic construct
  misc_feature 1..5319: note = Description of Artificial Sequence: Synthetic polynucleotide
  source 1..5319: mol_type = other DNA
gccaccagaagatactacctgggtgcagtggaactgtcatgggactatatgcaaagtgatctcggtgagctgcctgtggacgcaagatttcctcctagagtgccaaaatcttttccattcaacacctcagtcgtgtacaaaaagactctgtttgtagaattcacggatcaccttttcaacatcgctaagccaaggccaccctggatgggtctgctaggtcctaccatccaggctgaggtttatgatacagtggtcattacacttaagaacatggcttcccatcctgtcagtcttcatgctgttggtgtatcctactggaaagcttctgagggagctgaatatgatgatcagaccagtcaaagggagaaagaagatgataaagtcttccctggtggaagccatacatatgtctggcaggtcctgaaagagaatggtccaatggcctctgacccactgtgccttacctactcatatctttctcatgtggacctggtaaaagacttgaattcaggcctcattggagccctactagtatgtagagaagggagtctggccaaggaaaagacacagaccttgcacaaatttatactactttttgctgtatttgatgaagggaaaagttggcactcagaaacaaagaactccttgatgcaggatagggatgctgcatctgctcgggcctggcctaaaatgcacacagtcaatggttatgtaaacaggtctctgccaggtctgattggatgccacaggaaatcagtctattggcatgtgattggaatgggcaccactcctgaagtgcactcaatattcctcgaaggtcacacatttcttgtgaggaaccatcgccaggctagcttggaaatctcgccaataactttccttactgctcaaacactcttgatggaccttggacagtttctactgttttgtcatatctcttcccaccaacatgatggcatggaagcttatgtcaaagtagacagctgtccagaggaaccccaactacgaatgaaaaataatgaagaagcggaagactatgatgatgatcttactgattctgaaatggatgtggtcaggtttgatgatgacaactctccttcctttatccaaattcgctcagttgccaagaagcatcctaaaacttgggtacattacattgctgctgaagaggaggactgggactatgctcccttagtcctcgcccccgatggcgcgccaaccagtacggagccgtccgaggggagcgcaccaggaagcccggctgggagcccgacttctaccgaagagggtacatctaccgaaccaagtgaaggttcagcaccaggcacctcaacagaaccctctgagggctcggcgcctggtacaagtgagtccgccaccccagaatccgggcctgggacaagcacagaaccttcggaagggagtgcccctggaacatccgaatcggcaaccccagaatcagggccaggatctgagcccgcgacttcgggctccgagacgcctgggacatccaccgagccctccgaaggatcagccccaggcaccagcacggagccctctgagggaagcgcacctggtaccagcgaaagcgcaactcccgaatcaggtcccggtacgagcgagtcggcgaccccggagagcgggccaggtgcctcgagcgacagaagttataaaagtcaatatttgaacaatggccctcagcggattggtaggaagtacaaaaaagtccgatttatggcatacacagatgaaacctttaagactcgtgaagctattcagcatgaatcaggaatcttgggacctttactttatggggaagttggagacacactgttgattatatttaagaatcaagcaagcagaccatataacatctaccctcacggaatcactgatgtccgtcctttgtattcaaggagattaccaaaaggtgtaaaacatttgaaggattttccaattctgccaggagaaatattcaaatataaatggacagtgactgtagaagatgggccaactaaatcagatcctcggtgcctgacccgctattactctagtttcgttaatatggagagagatctagcttcaggactcattggccctctcctcatctgctacaaagaatctgtagatcaaagaggaaaccagataatgtcagacaagaggaatgtcatcctgttttctgtatttgatgagaaccgaagctggtacctcacagagaatatacaacgctttctccccaatccagctggagtgcagcttgaggatccagagttccaagcctccaacatcatgcacagcatcaatggctatgtttttgatagtttgcagttgtcagtttgtttgcatgaggtggcatactggtacattctaagcattggagcacagactgacttcctttctgtcttcttctctggatataccttcaaacacaaaatggtctatgaagacacactcaccctattcccattctcaggagaaactgtcttcatgtcgatggaaaacccaggtctatggattctggggtgccacaactcagactttcggaacagaggcatgaccgccttactgaaggtttctagttgtgacaagaacactggtgattattacgaggacagttatgaagatatttcagcatacttgctgagtaaaaacaatgccattgaaccaagaagcttctctcaaaacccaccagtcttgaaacgccatcaacgggaaataactcgtactactcttcagtcagatcaagaggaaatcgattatgatgataccatatcagttgaaatgaagaaggaagattttgacatttatgatgaggatgaaaatcagagcccccgcagctttcaaaagaaaacacgacactattttattgctgcagtggagaggctctgggattatgggatgagtagctccccacatgttctaagaaacagggctcagggcgcgccaggtacacccggatcgggtacagcgtcatcgagccccggtgcgtcacctggtacgtcgagcacggggtcgccaggggcgtcccctgggacgtcctcaacaggctcgcccggtgcgtcacccggcacgtcgtccacgggttcacctggtagctccccttccgcgtccactggcaccgggcctggaactccggggagcggcacagcgagctcgtcgccgggagcatcgcctgggacatcgagcaccgggtcgccaggagcatcgcccggaacatccagcacaggaagccccggcgcgtcgcccgggacatcaagcacaggttccccgggatcgagcacgccgtccggagccactggatcaccagggagctcgacaccttccggcgcaacgggatcgcccggagccagcccgggtacgtcaagcactggctcccctgcctcgagcagggctcagagtggcagtgtccctcagttcaagaaagttgttttccaggaatttactgatggctcctttactcagcccttataccgtggagaactaaatgaacatttgggactcctggggccatatataagagcagaagttgaagataatatcatggtaactttcagaaatcaggcctctcgtccctattccttctattctagccttatttcttatgaggaagatcagaggcaaggagcagaacctagaaaaaactttgtcaagcctaatgaaaccaaaacttacttttggaaagtgcaacatcatatggcacccactaaagatgagtttgactgcaaagcctgggcttatttctctgatgttgacctggaaaaagatgtgcactcaggcctgattggaccccttctggtctgccacactaacacactgaaccctgctcatgggagacaagtgacagtacaggaatttgctctgtttttcaccatctttgatgagaccaaaagctggtacttcactgaaaatatggaaagaaactgcagggctccctgcaatatccagatggaagatcccacttttaaagagaattatcgcttccatgcaatcaatggctacataatggatacactacctggcttagtaatggctcaggatcaaaggattcgatggtatctgctcagcatgggcagcaatgaaaacatccattctattcatttcagtggacatgtgttcactgtacgaaaaaaagaggagtataaaatggcactgtacaatctctatccaggtgtttttgagacagtggaaatgttaccatccaaagctggaatttggcgggtggaatgccttattggcgagcatctacatgctgggatgagcacactttttctggtgtacagcaataagtgtcagactcccctgggaatggcttctggacacattagagattttcagattacagcttcaggacaatatggacagtgggccccaaagctggccagacttcattattccggatcaatcaatgcctggagcaccaaggagcccttttcttggatcaaggtggatctgttggcaccaatgattattcacggcatcaagacccagggtgcccgtcagaagttctccagcctctacatctctcagtttatcatcatgtatagtcttgatgggaagaagtggcagacttatcgaggaaattccactggaaccttaatggtcttctttggcaatgtggattcatctgggataaaacacaatatttttaaccctccaattattgctcgatacatccgtttgcacccaactcattatagcattcgcagcactcttcgcatggagttgatgggctgtgatttaaatagttgcagcatgccattgggaatggagagtaaagcaatatcagatgcacagattactgcttcatcctactttaccaatatgtttgccacctggtctccttcaaaagctcgacttcacctccaagggaggagtaatgcctggagacctcaggtgaataatccaaaagagtggctgcaagtggacttccagaagacaatgaaagtcacaggagtaactactcagggagtaaaatctctgcttaccagcatgtatgtgaaggagttcctcatctccagcagtcaagatggccatcagtggactctcttttttcagaatggcaaagtaaaggtttttcagggaaatcaagactccttcacacctgtggtgaactctctagacccaccgttactgactcgctaccttcgaattcacccccagagttgggtgcaccagattgccctgaggatggaggttctgggctgcgaggcacaggacctctacggcgccggatcacctggggccgaaacggccgaacaaaaactcatctcagaagaggatctgtcacctgcaaccggtcatcatcaccatcaccattga

SEQ ID NO: 1009 - protein, 1769 aa, synthetic construct
  REGION 1..1769: note = Description of Artificial Sequence: Synthetic polypeptide
ATRRYYLGAVELSWDYMQSDLGELPVDARFPPRVPKSFPFNTSVVYKKTLFVEFTDHLFNIAKPRPPWMGLLGPTIQAEVYDTVVITLKNMASHPVSLHAVGVSYWKASEGAEYDDQTSQREKEDDKVFPGGSHTYVWQVLKENGPMASDPLCLTYSYLSHVDLVKDLNSGLIGALLVCREGSLAKEKTQTLHKFILLFAVFDEGKSWHSETKNSLMQDRDAASARAWPKMHTVNGYVNRSLPGLIGCHRKSVYWHVIGMGTTPEVHSIFLEGHTFLVRNHRQASLEISPITFLTAQTLLMDLGQFLLFCHISSHQHDGMEAYVKVDSCPEEPQLRMKNNEEAEDYDDDLTDSEMDVVRFDDDNSPSFIQIRSVAKKHPKTWVHYIAAEEEDWDYAPLVLAPDGAPGASPGTSSTGSPGSSPSASTGTGPGSSPSASTGTGPGTPGSGTASSSPGSSTPSGATGSPGSSPSASTGTGPGASPGTSSTGSPGTPGSGTASSSPGSSTPSGATGSPGTPGSGTASSSPGASPGTSSTGSPGASPGTSSTGSPASSDRSYKSQYLNNGPQRIGRKYKKVRFMAYTDETFKTREAIQHESGILGPLLYGEVGDTLLIIFKNQASRPYNIYPHGITDVRPLYSRRLPKGVKHLKDFPILPGEIFKYKWTVTVEDGPTKSDPRCLTRYYSSFVNMERDLASGLIGPLLICYKESVDQRGNQIMSDKRNVILFSVFDENRSWYLTENIQRFLPNPAGVQLEDPEFQASNIMHSINGYVFDSLQLSVCLHEVAYWYILSIGAQTDFLSVFFSGYTFKHKMVYEDTLTLFPFSGETVFMSMENPGLWILGCHNSDFRNRGMTALLKVSSCDKNTGDYYEDSYEDISAYLLSKNNAIEPRSFSQNPPVLKRHQREITRTTLQSDQEEIDYDDTISVEMKKEDFDIYDEDENQSPRSFQKKTRHYFIAAVERLWDYGMSSSPHVLRNRAQSGGAPTSESATPESGPGSEPATSGSETPGTSESATPESGPGSEPATSGSETPGTSESATPESGPGTSTEPSEGSAPGTSESATPESGPGSPAGSPTSTEEGSPAGSPTSTEEGSPAGSPTSTEEGTSESATPESGPGTSTEPSEGSAPGASSSVPQFKKVVFQEFTDGSFTQPLYRGELNEHLGLLGPYIRAEVEDNIMVTFRNQASRPYSFYSSLISYEEDQRQGAEPRKNFVKPNETKTYFWKVQHHMAPTKDEFDCKAWAYFSDVDLEKDVHSGLIGPLLVCHTNTLNPAHGRQVTVQEFALFFTIFDETKSWYFTENMERNCRAPCNIQMEDPTFKENYRFHAINGYIMDTLPGLVMAQDQRIRWYLLSMGSNENIHSIHFSGHVFTVRKKEEYKMALYNLYPGVFETVEMLPSKAGIWRVECLIGEHLHAGMSTLFLVYSNKCQTPLGMASGHIRDFQITASGQYGQWAPKLARLHYSGSINAWSTKEPFSWIKVDLLAPMIIHGIKTQGARQKFSSLYISQFIIMYSLDGKKWQTYRGNSTGTLMVFFGNVDSSGIKHNIFNPPIIARYIRLHPTHYSIRSTLRMELMGCDLNSCSMPLGMESKAISDAQITASSYFTNMFATWSPSKARLHLQGRSNAWRPQVNNPKEWLQVDFQKTMKVTGVTTQGVKSLLTSMYVKEFLISSSQDGHQWTLFFQNGKVKVFQGNQDSFTPVVNSLDPPLLTRYLRIHPQSWVHQIALRMEVLGCEAQDLYGAGSPGAETAEQKLISEEDLSPATGHHHHHH

SEQ ID NO: 1010 - DNA, 5310 bp, synthetic construct
  misc_feature 1..5310: note = Description of Artificial Sequence: Synthetic polynucleotide
  source 1..5310: mol_type = other DNA
gccaccagaagatactacctgggtgcagtggaactgtcatgggactatatgcaaagtgatctcggtgagctgcctgtggacgcaagatttcctcctagagtgccaaaatcttttccattcaacacctcagtcgtgtacaaaaagactctgtttgtagaattcacggatcaccttttcaacatcgctaagccaaggccaccctggatgggtctgctaggtcctaccatccaggctgaggtttatgatacagtggtcattacacttaagaacatggcttcccatcctgtcagtcttcatgctgttggtgtatcctactggaaagcttctgagggagctgaatatgatgatcagaccagtcaaagggagaaagaagatgataaagtcttccctggtggaagccatacatatgtctggcaggtcctgaaagagaatggtccaatggcctctgacccactgtgccttacctactcatatctttctcatgtggacctggtaaaagacttgaattcaggcctcattggagccctactagtatgtagagaagggagtctggccaaggaaaagacacagaccttgcacaaatttatactactttttgctgtatttgatgaagggaaaagttggcactcagaaacaaagaactccttgatgcaggatagggatgctgcatctgctcgggcctggcctaaaatgcacacagtcaatggttatgtaaacaggtctctgccaggtctgattggatgccacaggaaatcagtctattggcatgtgattggaatgggcaccactcctgaagtgcactcaatattcctcgaaggtcacacatttcttgtgaggaaccatcgccaggctagcttggaaatctcgccaataactttccttactgctcaaacactcttgatggaccttggacagtttctactgttttgtcatatctcttcccaccaacatgatggcatggaagcttatgtcaaagtagacagctgtccagaggaaccccaactacgaatgaaaaataatgaagaagcggaagactatgatgatgatcttactgattctgaaatggatgtggtcaggtttgatgatgacaactctccttcctttatccaaattcgctcagttgccaagaagcatcctaaaacttgggtacattacattgctgctgaagaggaggactgggactatgctcccttagtcctcgcccccgatggcgcgccaggtgcctcgccgggaacatcatcaactggttcacccgggtcatccccctcggcctcaaccgggacgggtcccggctcatcccccagcgccagcactggaacaggtcctggcactcctggttccggtacggcatcgtcatccccgggaagctcaacaccgtccggagcgacaggatcacctggctcgtcaccttcggcgtcaactggaacggggccaggggcctcacccggaacgtcctcgactgggtcgcctggtacgccgggatcaggaacggcctcatcctcgcctgggtcctcaacgccctcgggtgcgactggttcgccgggaactcctggctcggggacggcctcgtcgtcgcctggggcatcaccggggacgagctccacggggtcccctggagcgtcaccggggacctcctcgacaggtagcccggcctcgagcgacagaagttataaaagtcaatatttgaacaatggccctcagcggattggtaggaagtacaaaaaagtccgatttatggcatacacagatgaaacctttaagactcgtgaagctattcagcatgaatcaggaatcttgggacctttactttatggggaagttggagacacactgttgattatatttaagaatcaagcaagcagaccatataacatctaccctcacggaatcactgatgtccgtcctttgtattcaaggagattaccaaaaggtgtaaaacatttgaaggattttccaattctgccaggagaaatattcaaatataaatggacagtgactgtagaagatgggccaactaaatcagatcctcggtgcctgacccgctattactctagtttcgttaatatggagagagatctagcttcaggactcattggccctctcctcatctgctacaaagaatctgtagatcaaagaggaaaccagataatgtcagacaagaggaatgtcatcctgttttctgtatttgatgagaaccgaagctggtacctcacagagaatatacaacgctttctccccaatccagctggagtgcagcttgaggatccagagttccaagcctccaacatcatgcacagcatcaatggctatgtttttgatagtttgcagttgtcagtttgtttgcatgaggtggcatactggtacattctaagcattggagcacagactgacttcctttctgtcttcttctctggatataccttcaaacacaaaatggtctatgaagacacactcaccctattcccattctcaggagaaactgtcttcatgtcgatggaaaacccaggtctatggattctggggtgccacaactcagactttcggaacagaggcatgaccgccttactgaaggtttctagttgtgacaagaacactggtgattattacgaggacagttatgaagatatttcagcatacttgctgagtaaaaacaatgccattgaaccaagaagcttctctcaaaacccaccagtcttgaaacgccatcaacgggaaataactcgtactactcttcagtcagatcaagaggaaatcgattatgatgataccatatcagttgaaatgaagaaggaagattttgacatttatgatgaggatgaaaatcagagcccccgcagctttcaaaagaaaacacgacactattttattgctgcagtggagaggctctgggattatgggatgagtagctccccacatgttctaagaaacagggctcagagtggcggcgcgccaacgtccgaaagtgctacccctgagtcaggccctggtagtgagcctgccacaagcggaagcgaaactccggggacctcagagtctgccactcccgaatcggggccaggctctgaaccggccacttcagggagcgaaacaccaggaacatcggagagcgctaccccggagagcgggccaggaactagtactgagcctagcgagggaagtgcacctggtacaagcgagtccgccacacccgagtctggccctggctctccagcgggctcacccacgagcactgaagagggctctcccgctggcagcccaacgtcgacagaagaaggatcaccagcaggctcccccacatcaacagaggagggtacatcagaatctgctactcccgagagtggacccggtacctccactgagcccagcgaggggagtgcaccaggtgcctcgagcagtgtccctcagttcaagaaagttgttttccaggaatttactgatggctcctttactcagcccttataccgtggagaactaaatgaacatttgggactcctggggccatatataagagcagaagttgaagataatatcatggtaactttcagaaatcaggcctctcgtccctattccttctattctagccttatttcttatgaggaagatcagaggcaaggagcagaacctagaaaaaactttgtcaagcctaatgaaaccaaaacttacttttggaaagtgcaacatcatatggcacccactaaagatgagtttgactgcaaagcctgggcttatttctctgatgttgacctggaaaaagatgtgcactcaggcctgattggaccccttctggtctgccacactaacacactgaaccctgctcatgggagacaagtgacagtacaggaatttgctctgtttttcaccatctttgatgagaccaaaagctggtacttcactgaaaatatggaaagaaactgcagggctccctgcaatatccagatggaagatcccacttttaaagagaattatcgcttccatgcaatcaatggctacataatggatacactacctggcttagtaatggctcaggatcaaaggattcgatggtatctgctcagcatgggcagcaatgaaaacatccattctattcatttcagtggacatgtgttcactgtacgaaaaaaagaggagtataaaatggcactgtacaatctctatccaggtgtttttgagacagtggaaatgttaccatccaaagctggaatttggcgggtggaatgccttattggcgagcatctacatgctgggatgagcacactttttctggtgtacagcaataagtgtcagactcccctgggaatggcttctggacacattagagattttcagattacagcttcaggacaatatggacagtgggccccaaagctggccagacttcattattccggatcaatcaatgcctggagcaccaaggagcccttttcttggatcaaggtggatctgttggcaccaatgattattcacggcatcaagacccagggtgcccgtcagaagttctccagcctctacatctctcagtttatcatcatgtatagtcttgatgggaagaagtggcagacttatcgaggaaattccactggaaccttaatggtcttctttggcaatgtggattcatctgggataaaacacaatatttttaaccctccaattattgctcgatacatccgtttgcacccaactcattatagcattcgcagcactcttcgcatggagttgatgggctgtgatttaaatagttgcagcatgccattgggaatggagagtaaagcaatatcagatgcacagattactgcttcatcctactttaccaatatgtttgccacctggtctccttcaaaagctcgacttcacctccaagggaggagtaatgcctggagacctcaggtgaataatccaaaagagtggctgcaagtggacttccagaagacaatgaaagtcacaggagtaactactcagggagtaaaatctctgcttaccagcatgtatgtgaaggagttcctcatctccagcagtcaagatggccatcagtggactctcttttttcagaatggcaaagtaaaggtttttcagggaaatcaagactccttcacacctgtggtgaactctctagacccaccgttactgactcgctaccttcgaattcacccccagagttgggtgcaccagattgccctgaggatggaggttctgggctgcgaggcacaggacctctacggcgccggatcacctggggccgaaacggccgaacaaaaactcatctcagaagaggatctgtcacctgcaaccggtcatcatcaccatcaccattga

SEQ ID NO: 1011 - protein, 1769 aa, synthetic construct
  REGION 1..1769: note = Description of Artificial Sequence: Synthetic polypeptide
ATRRYYLGAVELSWDYMQSDLGELPVDARFPPRVPKSFPFNTSVVYKKTLFVEFTDHLFNIAKPRPPWMGLLGPTIQAEVYDTVVITLKNMASHPVSLHAVGVSYWKASEGAEYDDQTSQREKEDDKVFPGGSHTYVWQVLKENGPMASDPLCLTYSYLSHVDLVKDLNSGLIGALLVCREGSLAKEKTQTLHKFILLFAVFDEGKSWHSETKNSLMQDRDAASARAWPKMHTVNGYVNRSLPGLIGCHRKSVYWHVIGMGTTPEVHSIFLEGHTFLVRNHRQASLEISPITFLTAQTLLMDLGQFLLFCHISSHQHDGMEAYVKVDSCPEEPQLRMKNNEEAEDYDDDLTDSEMDVVRFDDDNSPSFIQIRSVAKKHPKTWVHYIAAEEEDWDYAPLVLAPDGAPTSTEPSEGSAPGSPAGSPTSTEEGTSTEPSEGSAPGTSTEPSEGSAPGTSESATPESGPGTSTEPSEGSAPGTSESATPESGPGSEPATSGSETPGTSTEPSEGSAPGTSTEPSEGSAPGTSESATPESGPGTSESATPESGPGASSDRSYKSQYLNNGPQRIGRKYKKVRFMAYTDETFKTREAIQHESGILGPLLYGEVGDTLLIIFKNQASRPYNIYPHGITDVRPLYSRRLPKGVKHLKDFPILPGEIFKYKWTVTVEDGPTKSDPRCLTRYYSSFVNMERDLASGLIGPLLICYKESVDQRGNQIMSDKRNVILFSVFDENRSWYLTENIQRFLPNPAGVQLEDPEFQASNIMHSINGYVFDSLQLSVCLHEVAYWYILSIGAQTDFLSVFFSGYTFKHKMVYEDTLTLFPFSGETVFMSMENPGLWILGCHNSDFRNRGMTALLKVSSCDKNTGDYYEDSYEDISAYLLSKNNAIEPRSFSQNPPVLKRHQREITRTTLQSDQEEIDYDDTISVEMKKEDFDIYDEDENQSPRSFQKKTRHYFIAAVERLWDYGMSSSPHVLRNRAQSGGAPTSESATPESGPGSEPATSGSETPGTSESATPESGPGSEPATSGSETPGTSESATPESGPGTSTEPSEGSAPGTSESATPESGPGSPAGSPTSTEEGSPAGSPTSTEEGSPAGSPTSTEEGTSESATPESGPGTSTEPSEGSAPGASSSVPQFKKVVFQEFTDGSFTQPLYRGELNEHLGLLGPYIRAEVEDNIMVTFRNQASRPYSFYSSLISYEEDQRQGAEPRKNFVKPNETKTYFWKVQHHMAPTKDEFDCKAWAYFSDVDLEKDVHSGLIGPLLVCHTNTLNPAHGRQVTVQEFALFFTIFDETKSWYFTENMERNCRAPCNIQMEDPTFKENYRFHAINGYIMDTLPGLVMAQDQRIRWYLLSMGSNENIHSIHFSGHVFTVRKKEEYKMALYNLYPGVFETVEMLPSKAGIWRVECLIGEHLHAGMSTLFLVYSNKCQTPLGMASGHIRDFQITASGQYGQWAPKLARLHYSGSINAWSTKEPFSWIKVDLLAPMIIHGIKTQGARQKFSSLYISQFIIMYSLDGKKWQTYRGNSTGTLMVFFGNVDSSGIKHNIFNPPIIARYIRLHPTHYSIRSTLRMELMGCDLNSCSMPLGMESKAISDAQITASSYFTNMFATWSPSKARLHLQGRSNAWRPQVNNPKEWLQVDFQKTMKVTGVTTQGVKSLLTSMYVKEFLISSSQDGHQWTLFFQNGKVKVFQGNQDSFTPVVNSLDPPLLTRYLRIHPQSWVHQIALRMEVLGCEAQDLYGAGSPGAETAEQKLISEEDLSPATGHHHHHH

SEQ ID NO: 1012 - DNA, 5310 bp, synthetic construct
  misc_feature 1..5310: note = Description of Artificial Sequence: Synthetic polynucleotide
  source 1..5310: mol_type = other DNA
gccaccagaagatactacctgggtgcagtggaactgtcatgggactatatgcaaagtgatctcggtgagctgcctgtggacgcaagatttcctcctagagtgccaaaatcttttccattcaacacctcagtcgtgtacaaaaagactctgtttgtagaattcacggatcaccttttcaacatcgctaagccaaggccaccctggatgggtctgctaggtcctaccatccaggctgaggtttatgatacagtggtcattacacttaagaacatggcttcccatcctgtcagtcttcatgctgttggtgtatcctactggaaagcttctgagggagctgaatatgatgatcagaccagtcaaagggagaaagaagatgataaagtcttccctggtggaagccatacatatgtctggcaggtcctgaaagagaatggtccaatggcctctgacccactgtgccttacctactcatatctttctcatgtggacctggtaaaagacttgaattcaggcctcattggagccctactagtatgtagagaagggagtctggccaaggaaaagacacagaccttgcacaaatttatactactttttgctgtatttgatgaagggaaaagttggcactcagaaacaaagaactccttgatgcaggatagggatgctgcatctgctcgggcctggcctaaaatgcacacagtcaatggttatgtaaacaggtctctgccaggtctgattggatgccacaggaaatcagtctattggcatgtgattggaatgggcaccactcctgaagtgcactcaatattcctcgaaggtcacacatttcttgtgaggaaccatcgccaggctagcttggaaatctcgccaataactttccttactgctcaaacactcttgatggaccttggacagtttctactgttttgtcatatctcttcccaccaacatgatggcatggaagcttatgtcaaagtagacagctgtccagaggaaccccaactacgaatgaaaaataatgaagaagcggaagactatgatgatgatcttactgattctgaaatggatgtggtcaggtttgatgatgacaactctccttcctttatccaaattcgctcagttgccaagaagcatcctaaaacttgggtacattacattgctgctgaagaggaggactgggactatgctcccttagtcctcgcccccgatggcgcgccaaccagtacggagccgtccgaggggagcgcaccaggaagcccggctgggagcccgacttctaccgaagagggtacatctaccgaaccaagtgaaggttcagcaccaggcacctcaacagaaccctctgagggctcggcgcctggtacaagtgagtccgccaccccagaatccgggcctgggacaagcacagaaccttcggaagggagtgcccctggaacatccgaatcggcaaccccagaatcagggccaggatctgagcccgcgacttcgggctccgagacgcctgggacatccaccgagccctccgaaggatcagccccaggcaccagcacggagccctctgagggaagcgcacctggtaccagcgaaagcgcaactcccgaatcaggtcccggtacgagcgagtcggcgaccccggagagcgggccaggtgcctcgagcgacagaagttataaaagtcaatatttgaacaatggccctcagcggattggtaggaagtacaaaaaagtccgatttatggcatacacagatgaaacctttaagactcgtgaagctattcagcatgaatcaggaatcttgggacctttactttatggggaagttggagacacactgttgattatatttaagaatcaagcaagcagaccatataacatctaccctcacggaatcactgatgtccgtcctttgtattcaaggagattaccaaaaggtgtaaaacatttgaaggattttccaattctgccaggagaaatattcaaatataaatggacagtgactgtagaagatgggccaactaaatcagatcctcggtgcctgacccgctattactctagtttcgttaatatggagagagatctagcttcaggactcattggccctctcctcatctgctacaaagaatctgtagatcaaagaggaaaccagataatgtcagacaagaggaatgtcatcctgttttctgtatttgatgagaaccgaagctggtacctcacagagaatatacaacgctttctccccaatccagctggagtgcagcttgaggatccagagttccaagcctccaacatcatgcacagcatcaatggctatgtttttgatagtttgcagttgtcagtttgtttgcatgaggtggcatactggtacattctaagcattggagcacagactgacttcctttctgtcttcttctctggatataccttcaaacacaaaatggtctatgaagacacactcaccctattcccattctcaggagaaactgtcttcatgtcgatggaaaacccaggtctatggattctggggtgccacaactcagactttcggaacagaggcatgaccgccttactgaaggtttctagttgtgacaagaacactggtgattattacgaggacagttatgaagatatttcagcatacttgctgagtaaaaacaatgccattgaaccaagaagcttctctcaaaacccaccagtcttgaaacgccatcaacgggaaataactcgtactactcttcagtcagatcaagaggaaatcgattatgatgataccatatcagttgaaatgaagaaggaagattttgacatttatgatgaggatgaaaatcagagcccccgcagctttcaaaagaaaacacgacactattttattgctgcagtggagaggctctgggattatgggatgagtagctccccacatgttctaagaaacagggctcagagtggcggcgcgccaacgtccgaaagtgctacccctgagtcaggccctggtagtgagcctgccacaagcggaagcgaaactccggggacctcagagtctgccactcccgaatcggggccaggctctgaaccggccacttcagggagcgaaacaccaggaacatcggagagcgctaccccggagagcgggccaggaactagtactgagcctagcgagggaagtgcacctggtacaagcgagtccgccacacccgagtctggccctggctctccagcgggctcacccacgagcactgaagagggctctcccgctggcagcccaacgtcgacagaagaaggatcaccagcaggctcccccacatcaacagaggagggtacatcagaatctgctactcccgagagtggacccggtacctccactgagcccagcgaggggagtgcaccaggtgcctcgagcagtgtccctcagttcaagaaagttgttttccaggaatttactgatggctcctttactcagcccttataccgtggagaactaaatgaacatttgggactcctggggccatatataagagcagaagttgaagataatatcatggtaactttcagaaatcaggcctctcgtccctattccttctattctagccttatttcttatgaggaagatcagaggcaaggagcagaacctagaaaaaactttgtcaagcctaatgaaaccaaaacttacttttggaaagtgcaacatcatatggcacccactaaagatgagtttgactgcaaagcctgggcttatttctctgatgttgacctggaaaaagatgtgcactcaggcctgattggaccccttctggtctgccacactaacacactgaaccctgctcatgggagacaagtgacagtacaggaatttgctctgtttttcaccatctttgatgagaccaaaagctggtacttcactgaaaatatggaaagaaactgcagggctccctgcaatatccagatggaagatcccacttttaaagagaattatcgcttccatgcaatcaatggctacataatggatacactacctggcttagtaatggctcaggatcaaaggattcgatggtatctgctcagcatgggcagcaatgaaaacatccattctattcatttcagtggacatgtgttcactgtacgaaaaaaagaggagtataaaatggcactgtacaatctctatccaggtgtttttgagacagtggaaatgttaccatccaaagctggaatttggcgggtggaatgccttattggcgagcatctacatgctgggatgagcacactttttctggtgtacagcaataagtgtcagactcccctgggaatggcttctggacacattagagattttcagattacagcttcaggacaatatggacagtgggccccaaagctggccagacttcattattccggatcaatcaatgcctggagcaccaaggagcccttttcttggatcaaggtggatctgttggcaccaatgattattcacggcatcaagacccagggtgcccgtcagaagttctccagcctctacatctctcagtttatcatcatgtatagtcttgatgggaagaagtggcagacttatcgaggaaattccactggaaccttaatggtcttctttggcaatgtggattcatctgggataaaacacaatatttttaaccctccaattattgctcgatacatccgtttgcacccaactcattatagcattcgcagcactcttcgcatggagttgatgggctgtgatttaaatagttgcagcatgccattgggaatggagagtaaagcaatatcagatgcacagattactgcttcatcctactttaccaatatgtttgccacctggtctccttcaaaagctcgacttcacctccaagggaggagtaatgcctggagacctcaggtgaataatccaaaagagtggctgcaagtggacttccagaagacaatgaaagtcacaggagtaactactcagggagtaaaatctctgcttaccagcatgtatgtgaaggagttcctcatctccagcagtcaagatggccatcagtggactctcttttttcagaatggcaaagtaaaggtttttcagggaaatcaagactccttcacacctgtggtgaactctctagacccaccgttactgactcgctaccttcgaattcacccccagagttgggtgcaccagattgccctgaggatggaggttctgggctgcgaggcacaggacctctacggcgccggatcacctggggccgaaacggccgaacaaaaactcatctcagaagaggatctgtcacctgcaaccggtcatcatcaccatcaccattga

SEQ ID NO: 1013 - protein, 1769 aa, synthetic construct
  REGION 1..1769: note = Description of Artificial Sequence: Synthetic polypeptide
ATRRYYLGAVELSWDYMQSDLGELPVDARFPPRVPKSFPFNTSVVYKKTLFVEFTDHLFNIAKPRPPWMGLLGPTIQAEVYDTVVITLKNMASHPVSLHAVGVSYWKASEGAEYDDQTSQREKEDDKVFPGGSHTYVWQVLKENGPMASDPLCLTYSYLSHVDLVKDLNSGLIGALLVCREGSLAKEKTQTLHKFILLFAVFDEGKSWHSETKNSLMQDRDAASARAWPKMHTVNGYVNRSLPGLIGCHRKSVYWHVIGMGTTPEVHSIFLEGHTFLVRNHRQASLEISPITFLTAQTLLMDLGQFLLFCHISSHQHDGMEAYVKVDSCPEEPQLRMKNNEEAEDYDDDLTDSEMDVVRFDDDNSPSFIQIRSVAKKHPKTWVHYIAAEEEDWDYAPLVGAPTSTEPSEGSAPGSPAGSPTSTEEGTSTEPSEGSAPGTSTEPSEGSAPGTSESATPESGPGTSTEPSEGSAPGTSESATPESGPGSEPATSGSETPGTSTEPSEGSAPGTSTEPSEGSAPGTSESATPESGPGTSESATPESGPGASSLAPDDRSYKSQYLNNGPQRIGRKYKKVRFMAYTDETFKTREAIQHESGILGPLLYGEVGDTLLIIFKNQASRPYNIYPHGITDVRPLYSRRLPKGVKHLKDFPILPGEIFKYKWTVTVEDGPTKSDPRCLTRYYSSFVNMERDLASGLIGPLLICYKESVDQRGNQIMSDKRNVILFSVFDENRSWYLTENIQRFLPNPAGVQLEDPEFQASNIMHSINGYVFDSLQLSVCLHEVAYWYILSIGAQTDFLSVFFSGYTFKHKMVYEDTLTLFPFSGETVFMSMENPGLWILGCHNSDFRNRGMTALLKVSSCDKNTGDYYEDSYEDISAYLLSKNNAIEPRSFSQNPPVLKRHQREITRTTLQSDQEEIDYDDTISVEMKKEDFDIYDEDENQSPRSFQKKTRHYFIAAVERLWDYGMSSSPHVLRNRAQSGGAPTSESATPESGPGSEPATSGSETPGTSESATPESGPGSEPATSGSETPGTSESATPESGPGTSTEPSEGSAPGTSESATPESGPGSPAGSPTSTEEGSPAGSPTSTEEGSPAGSPTSTEEGTSESATPESGPGTSTEPSEGSAPGASSSVPQFKKVVFQEFTDGSFTQPLYRGELNEHLGLLGPYIRAEVEDNIMVTFRNQASRPYSFYSSLISYEEDQRQGAEPRKNFVKPNETKTYFWKVQHHMAPTKDEFDCKAWAYFSDVDLEKDVHSGLIGPLLVCHTNTLNPAHGRQVTVQEFALFFTIFDETKSWYFTENMERNCRAPCNIQMEDPTFKENYRFHAINGYIMDTLPGLVMAQDQRIRWYLLSMGSNENIHSIHFSGHVFTVRKKEEYKMALYNLYPGVFETVEMLPSKAGIWRVECLIGEHLHAGMSTLFLVYSNKCQTPLGMASGHIRDFQITASGQYGQWAPKLARLHYSGSINAWSTKEPFSWIKVDLLAPMIIHGIKTQGARQKFSSLYISQFIIMYSLDGKKWQTYRGNSTGTLMVFFGNVDSSGIKHNIFNPPIIARYIRLHPTHYSIRSTLRMELMGCDLNSCSMPLGMESKAISDAQITASSYFTNMFATWSPSKARLHLQGRSNAWRPQVNNPKEWLQVDFQKTMKVTGVTTQGVKSLLTSMYVKEFLISSSQDGHQWTLFFQNGKVKVFQGNQDSFTPVVNSLDPPLLTRYLRIHPQSWVHQIALRMEVLGCEAQDLYGAGSPGAETAEQKLISEEDLSPATGHHHHHH

SEQ ID NO: 1014 - DNA, 5310 bp, synthetic construct
  misc_feature 1..5310: note = Description of Artificial Sequence: Synthetic polynucleotide
  source 1..5310: mol_type = other DNA
gccaccagaagatactacctgggtgcagtggaactgtcatgggactatatgcaaagtgatctcggtgagctgcctgtggacgcaagatttcctcctagagtgccaaaatcttttccattcaacacctcagtcgtgtacaaaaagactctgtttgtagaattcacggatcaccttttcaacatcgctaagccaaggccaccctggatgggtctgctaggtcctaccatccaggctgaggtttatgatacagtggtcattacacttaagaacatggcttcccatcctgtcagtcttcatgctgttggtgtatcctactggaaagcttctgagggagctgaatatgatgatcagaccagtcaaagggagaaagaagatgataaagtcttccctggtggaagccatacatatgtctggcaggtcctgaaagagaatggtccaatggcctctgacccactgtgccttacctactcatatctttctcatgtggacctggtaaaagacttgaattcaggcctcattggagccctactagtatgtagagaagggagtctggccaaggaaaagacacagaccttgcacaaatttatactactttttgctgtatttgatgaagggaaaagttggcactcagaaacaaagaactccttgatgcaggatagggatgctgcatctgctcgggcctggcctaaaatgcacacagtcaatggttatgtaaacaggtctctgccaggtctgattggatgccacaggaaatcagtctattggcatgtgattggaatgggcaccactcctgaagtgcactcaatattcctcgaaggtcacacatttcttgtgaggaaccatcgccaggctagcttggaaatctcgccaataactttccttactgctcaaacactcttgatggaccttggacagtttctactgttttgtcatatctcttcccaccaacatgatggcatggaagcttatgtcaaagtagacagctgtccagaggaaccccaactacgaatgaaaaataatgaagaagcggaagactatgatgatgatcttactgattctgaaatggatgtggtcaggtttgatgatgacaactctccttcctttatccaaattcgctcagttgccaagaagcatcctaaaacttgggtacattacattgctgctgaagaggaggactgggactatgctcccttagtcggcgcgccaaccagtacggagccgtccgaggggagcgcaccaggaagcccggctgggagcccgacttctaccgaagagggtacatctaccgaaccaagtgaaggttcagcaccaggcacctcaacagaaccctctgagggctcggcgcctggtacaagtgagtccgccaccccagaatccgggcctgggacaagcacagaaccttcggaagggagtgcccctggaacatccgaatcggcaaccccagaatcagggccaggatctgagcccgcgacttcgggctccgagacgcctgggacatccaccgagccctccgaaggatcagccccaggcaccagcacggagccctctgagggaagcgcacctggtaccagcgaaagcgcaactcccgaatcaggtcccggtacgagcgagtcggcgaccccggagagcgggccaggtgcctcgagcctcgcccccgatgacagaagttataaaagtcaatatttgaacaatggccctcagcggattggtaggaagtacaaaaaagtccgatttatggcatacacagatgaaacctttaagactcgtgaagctattcagcatgaatcaggaatcttgggacctttactttatggggaagttggagacacactgttgattatatttaagaatcaagcaagcagaccatataacatctaccctcacggaatcactgatgtccgtcctttgtattcaaggagattaccaaaaggtgtaaaacatttgaaggattttccaattctgccaggagaaatattcaaatataaatggacagtgactgtagaagatgggccaactaaatcagatcctcggtgcctgacccgctattactctagtttcgttaatatggagagagatctagcttcaggactcattggccctctcctcatctgctacaaagaatctgtagatcaaagaggaaaccagataatgtcagacaagaggaatgtcatcctgttttctgtatttgatgagaaccgaagctggtacctcacagagaatatacaacgctttctccccaatccagctggagtgcagcttgaggatccagagttccaagcctccaacatcatgcacagcatcaatggctatgtttttgatagtttgcagttgtcagtttgtttgcatgaggtggcatactggtacattctaagcattggagcacagactgacttcctttctgtcttcttctctggatataccttcaaacacaaaatggtctatgaagacacactcaccctattcccattctcaggagaaactgtcttcatgtcgatggaaaacccaggtctatggattctggggtgccacaactcagactttcggaacagaggcatgaccgccttactgaaggtttctagttgtgacaagaacactggtgattattacgaggacagttatgaagatatttcagcatacttgctgagtaaaaacaatgccattgaaccaagaagcttctctcaaaacccaccagtcttgaaacgccatcaacgggaaataactcgtactactcttcagtcagatcaagaggaaatcgattatgatgataccatatcagttgaaatgaagaaggaagattttgacatttatgatgaggatgaaaatcagagcccccgcagctttcaaaagaaaacacgacactattttattgctgcagtggagaggctctgggattatgggatgagtagctccccacatgttctaagaaacagggctcagagtggcggcgcgccaacgtccgaaagtgctacccctgagtcaggccctggtagtgagcctgccacaagcggaagcgaaactccggggacctcagagtctgccactcccgaatcggggccaggctctgaaccggccacttcagggagcgaaacaccaggaacatcggagagcgctaccccggagagcgggccaggaactagtactgagcctagcgagggaagtgcacctggtacaagcgagtccgccacacccgagtctggccctggctctccagcgggctcacccacgagcactgaagagggctctcccgctggcagcccaacgtcgacagaagaaggatcaccagcaggctcccccacatcaacagaggagggtacatcagaatctgctactcccgagagtggacccggtacctccactgagcccagcgaggggagtgcaccaggtgcctcgagcagtgtccctcagttcaagaaagttgttttccaggaatttactgatggctcctttactcagcccttataccgtggagaactaaatgaacatttgggactcctggggccatatataagagcagaagttgaagataatatcatggtaactttcagaaatcaggcctctcgtccctattccttctattctagccttatttcttatgaggaagatcagaggcaaggagcagaacctagaaaaaactttgtcaagcctaatgaaaccaaaacttacttttggaaagtgcaacatcatatggcacccactaaagatgagtttgactgcaaagcctgggcttatttctctgatgttgacctggaaaaagatgtgcactcaggcctgattggaccccttctggtctgccacactaacacactgaaccctgctcatgggagacaagtgacagtacaggaatttgctctgtttttcaccatctttgatgagaccaaaagctggtacttcactgaaaatatggaaagaaactgcagggctccctgcaatatccagatggaagatcccacttttaaagagaattatcgcttccatgcaatcaatggctacataatggatacactacctggcttagtaatggctcaggatcaaaggattcgatggtatctgctcagcatgggcagcaatgaaaacatccattctattcatttcagtggacatgtgttcactgtacgaaaaaaagaggagtataaaatggcactgtacaatctctatccaggtgtttttgagacagtggaaatgttaccatccaaagctggaatttggcgggtggaatgccttattggcgagcatctacatgctgggatgagcacactttttctggtgtacagcaataagtgtcagactcccctgggaatggcttctggacacattagagattttcagattacagcttcaggacaatatggacagtgggccccaaagctggccagacttcattattccggatcaatcaatgcctggagcaccaaggagcccttttcttggatcaaggtggatctgttggcaccaatgattattcacggcatcaagacccagggtgcccgtcagaagttctccagcctctacatctctcagtttatcatcatgtatagtcttgatgggaagaagtggcagacttatcgaggaaattccactggaaccttaatggtcttctttggcaatgtggattcatctgggataaaacacaatatttttaaccctccaattattgctcgatacatccgtttgcacccaactcattatagcattcgcagcactcttcgcatggagttgatgggctgtgatttaaatagttgcagcatgccattgggaatggagagtaaagcaatatcagatgcacagattactgcttcatcctactttaccaatatgtttgccacctggtctccttcaaaagctcgacttcacctccaagggaggagtaatgcctggagacctcaggtgaataatccaaaagagtggctgcaagtggacttccagaagacaatgaaagtcacaggagtaactactcagggagtaaaatctctgcttaccagcatgtatgtgaaggagttcctcatctccagcagtcaagatggccatcagtggactctcttttttcagaatggcaaagtaaaggtttttcagggaaatcaagactccttcacacctgtggtgaactctctagacccaccgttactgactcgctaccttcgaattcacccccagagttgggtgcaccagattgccctgaggatggaggttctgggctgcgaggcacaggacctctacggcgccggatcacctggggccgaaacggccgaacaaaaactcatctcagaagaggatctgtcacctgcaaccggtcatcatcaccatcaccattga

SEQ ID NO: 1015 - protein, 1769 aa, synthetic construct
  REGION 1..1769: note = Description of Artificial Sequence: Synthetic polypeptide
ATRRYYLGAVELSWDYMQSDLGELPVDARFPPRVPKSFPFNTSVVYKKTLFVEFTDHLFNIAKPRPPWMGLLGPTIQAEVYDTVVITLKNMASHPVSLHAVGVSYWKASEGAEYDDQTSQREKEDDKVFPGGSHTYVWQVLKENGPMASDPLCLTYSYLSHVDLVKDLNSGLIGALLVCREGSLAKEKTQTLHKFILLFAVFDEGKSWHSETKNSLMQDRDAASARAWPKMHTVNGYVNRSLPGLIGCHRKSVYWHVIGMGTTPEVHSIFLEGHTFLVRNHRQASLEISPITFLTAQTLLMDLGQFLLFCHISSHQHDGMEAYVKVDSCPEEPQLRMKNNEEAEDYDDDLTDSEMDVVRFDDDNSPSFIQIRSVAKKHPKTWVHYIAAEEEDWDYAPLVLAPDGAPTSTEPSEGSAPGSPAGSPTSTEEGTSTEPSEGSAPGTSTEPSEGSAPGTSESATPESGPGTSTEPSEGSAPGTSESATPESGPGSEPATSGSETPGTSTEPSEGSAPGTSTEPSEGSAPGTSESATPESGPGTSESATPESGPGASSDRSYKSQYLNNGPQRIGRKYKKVRFMAYTDETFKTREAIQHESGILGPLLYGEVGDTLLIIFKNQASRPYNIYPHGITDVRPLYSRRLPKGVKHLKDFPILPGEIFKYKWTVTVEDGPTKSDPRCLTRYYSSFVNMERDLASGLIGPLLICYKESVDQRGNQIMSDKRNVILFSVFDENRSWYLTENIQRFLPNPAGVQLEDPEFQASNIMHSINGYVFDSLQLSVCLHEVAYWYILSIGAQTDFLSVFFSGYTFKHKMVYEDTLTLFPFSGETVFMSMENPGLWILGCHNSDFRNRGMTALLKVSSCDKNTGDYYEDSYEDISAYLLSKNNAIEPRSFSQNPPVLKRHQREITRTTLQSDQEEIDYDDTISVEMKKEDFDIYDEDENQSPRSFQKKTRHYFIAAVERLWDYGMGAPTSESATPESGPGSEPATSGSETPGTSESATPESGPGSEPATSGSETPGTSESATPESGPGTSTEPSEGSAPGTSESATPESGPGSPAGSPTSTEEGSPAGSPTSTEEGSPAGSPTSTEEGTSESATPESGPGTSTEPSEGSAPGASSSSSPHVLRNRAQSGSVPQFKKVVFQEFTDGSFTQPLYRGELNEHLGLLGPYIRAEVEDNIMVTFRNQASRPYSFYSSLISYEEDQRQGAEPRKNFVKPNETKTYFWKVQHHMAPTKDEFDCKAWAYFSDVDLEKDVHSGLIGPLLVCHTNTLNPAHGRQVTVQEFALFFTIFDETKSWYFTENMERNCRAPCNIQMEDPTFKENYRFHAINGYIMDTLPGLVMAQDQRIRWYLLSMGSNENIHSIHFSGHVFTVRKKEEYKMALYNLYPGVFETVEMLPSKAGIWRVECLIGEHLHAGMSTLFLVYSNKCQTPLGMASGHIRDFQITASGQYGQWAPKLARLHYSGSINAWSTKEPFSWIKVDLLAPMIIHGIKTQGARQKFSSLYISQFIIMYSLDGKKWQTYRGNSTGTLMVFFGNVDSSGIKHNIFNPPIIARYIRLHPTHYSIRSTLRMELMGCDLNSCSMPLGMESKAISDAQITASSYFTNMFATWSPSKARLHLQGRSNAWRPQVNNPKEWLQVDFQKTMKVTGVTTQGVKSLLTSMYVKEFLISSSQDGHQWTLFFQNGKVKVFQGNQDSFTPVVNSLDPPLLTRYLRIHPQSWVHQIALRMEVLGCEAQDLYGAGSPGAETAEQKLISEEDLSPATGHHHHHH

SEQ ID NO: 1016 - DNA, 5310 bp, synthetic construct
  misc_feature 1..5310: note = Description of Artificial Sequence: Synthetic polynucleotide
  source 1..5310: mol_type = other DNA
gccaccagaagatactacctgggtgcagtggaactgtcatgggactatatgcaaagtgatctcggtgagctgcctgtggacgcaagatttcctcctagagtgccaaaatcttttccattcaacacctcagtcgtgtacaaaaagactctgtttgtagaattcacggatcaccttttcaacatcgctaagccaaggccaccctggatgggtctgctaggtcctaccatccaggctgaggtttatgatacagtggtcattacacttaagaacatggcttcccatcctgtcagtcttcatgctgttggtgtatcctactggaaagcttctgagggagctgaatatgatgatcagaccagtcaaagggagaaagaagatgataaagtcttccctggtggaagccatacatatgtctggcaggtcctgaaagagaatggtccaatggcctctgacccactgtgccttacctactcatatctttctcatgtggacctggtaaaagacttgaattcaggcctcattggagccctactagtatgtagagaagggagtctggccaaggaaaagacacagaccttgcacaaatttatactactttttgctgtatttgatgaagggaaaagttggcactcagaaacaaagaactccttgatgcaggatagggatgctgcatctgctcgggcctggcctaaaatgcacacagtcaatggttatgtaaacaggtctctgccaggtctgattggatgccacaggaaatcagtctattggcatgtgattggaatgggcaccactcctgaagtgcactcaatattcctcgaaggtcacacatttcttgtgaggaaccatcgccaggctagcttggaaatctcgccaataactttccttactgctcaaacactcttgatggaccttggacagtttctactgttttgtcatatctcttcccaccaacatgatggcatggaagcttatgtcaaagtagacagctgtccagaggaaccccaactacgaatgaaaaataatgaagaagcggaagactatgatgatgatcttactgattctgaaatggatgtggtcaggtttgatgatgacaactctccttcctttatccaaattcgctcagttgccaagaagcatcctaaaacttgggtacattacattgctgctgaagaggaggactgggactatgctcccttagtcctcgcccccgatggcgcgccaaccagtacggagccgtccgaggggagcgcaccaggaagcccggctgggagcccgacttctaccgaagagggtacatctaccgaaccaagtgaaggttcagcaccaggcacctcaacagaaccctctgagggctcggcgcctggtacaagtgagtccgccaccccagaatccgggcctgggacaagcacagaaccttcggaagggagtgcccctggaacatccgaatcggcaaccccagaatcagggccaggatctgagcccgcgacttcgggctccgagacgcctgggacatccaccgagccctccgaaggatcagccccaggcaccagcacggagccctctgagggaagcgcacctggtaccagcgaaagcgcaactcccgaatcaggtcccggtacgagcgagtcggcgaccccggagagcgggccaggtgcctcgagcgacagaagttataaaagtcaatatttgaacaatggccctcagcggattggtaggaagtacaaaaaagtccgatttatggcatacacagatgaaacctttaagactcgtgaagctattcagcatgaatcaggaatcttgggacctttactttatggggaagttggagacacactgttgattatatttaagaatcaagcaagcagaccatataacatctaccctcacggaatcactgatgtccgtcctttgtattcaaggagattaccaaaaggtgtaaaacatttgaaggattttccaattctgccaggagaaatattcaaatataaatggacagtgactgtagaagatgggccaactaaatcagatcctcggtgcctgacccgctattactctagtttcgttaatatggagagagatctagcttcaggactcattggccctctcctcatctgctacaaagaatctgtagatcaaagaggaaaccagataatgtcagacaagaggaatgtcatcctgttttctgtatttgatgagaaccgaagctggtacctcacagagaatatacaacgctttctccccaatccagctggagtgcagcttgaggatccagagttccaagcctccaacatcatgcacagcatcaatggctatgtttttgatagtttgcagttgtcagtttgtttgcatgaggtggcatactggtacattctaagcattggagcacagactgacttcctttctgtcttcttctctggatataccttcaaacacaaaatggtctatgaagacacactcaccctattcccattctcaggagaaactgtcttcatgtcgatggaaaacccaggtctatggattctggggtgccacaactcagactttcggaacagaggcatgaccgccttactgaaggtttctagttgtgacaagaacactggtgattattacgaggacagttatgaagatatttcagcatacttgctgagtaaaaacaatgccattgaaccaagaagcttctctcaaaacccaccagtcttgaaacgccatcaacgggaaataactcgtactactcttcagtcagatcaagaggaaatcgattatgatgataccatatcagttgaaatgaagaaggaagattttgacatttatgatgaggatgaaaatcagagcccccgcagctttcaaaagaaaacacgacactattttattgctgcagtggagaggctctgggattatgggatgggcgcgccaacgtccgaaagtgctacccctgagtcaggccctggtagtgagcctgccacaagcggaagcgaaactccggggacctcagagtctgccactcccgaatcggggccaggctctgaaccggccacttcagggagcgaaacaccaggaacatcggagagcgctaccccggagagcgggccaggaactagtactgagcctagcgagggaagtgcacctggtacaagcgagtccgccacacccgagtctggccctggctctccagcgggctcacccacgagcactgaagagggctctcccgctggcagcccaacgtcgacagaagaaggatcaccagcaggctcccccacatcaacagaggagggtacatcagaatctgctactcccgagagtggacccggtacctccactgagcccagcgaggggagtgcaccaggtgcctcgagcagtagctccccacatgttctaagaaacagggctcagagtggcagtgtccctcagttcaagaaagttgttttccaggaatttactgatggctcctttactcagcccttataccgtggagaactaaatgaacatttgggactcctggggccatatataagagcagaagttgaagataatatcatggtaactttcagaaatcaggcctctcgtccctattccttctattctagccttatttcttatgaggaagatcagaggcaaggagcagaacctagaaaaaactttgtcaagcctaatgaaaccaaaacttacttttggaaagtgcaacatcatatggcacccactaaagatgagtttgactgcaaagcctgggcttatttctctgatgttgacctggaaaaagatgtgcactcaggcctgattggaccccttctggtctgccacactaacacactgaaccctgctcatgggagacaagtgacagtacaggaatttgctctgtttttcaccatctttgatgagaccaaaagctggtacttcactgaaaatatggaaagaaactgcagggctccctgcaatatccagatggaagatcccacttttaaagagaattatcgcttccatgcaatcaatggctacataatggatacactacctggcttagtaatggctcaggatcaaaggattcgatggtatctgctcagcatgggcagcaatgaaaacatccattctattcatttcagtggacatgtgttcactgtacgaaaaaaagaggagtataaaatggcactgtacaatctctatccaggtgtttttgagacagtggaaatgttaccatccaaagctggaatttggcgggtggaatgccttattggcgagcatctacatgctgggatgagcacactttttctggtgtacagcaataagtgtcagactcccctgggaatggcttctggacacattagagattttcagattacagcttcaggacaatatggacagtgggccccaaagctggccagacttcattattccggatcaatcaatgcctggagcaccaaggagcccttttcttggatcaaggtggatctgttggcaccaatgattattcacggcatcaagacccagggtgcccgtcagaagttctccagcctctacatctctcagtttatcatcatgtatagtcttgatgggaagaagtggcagacttatcgaggaaattccactggaaccttaatggtcttctttggcaatgtggattcatctgggataaaacacaatatttttaaccctccaattattgctcgatacatccgtttgcacccaactcattatagcattcgcagcactcttcgcatggagttgatgggctgtgatttaaatagttgcagcatgccattgggaatggagagtaaagcaatatcagatgcacagattactgcttcatcctactttaccaatatgtttgccacctggtctccttcaaaagctcgacttcacctccaagggaggagtaatgcctggagacctcaggtgaataatccaaaagagtggctgcaagtggacttccagaagacaatgaaagtcacaggagtaactactcagggagtaaaatctctgcttaccagcatgtatgtgaaggagttcctcatctccagcagtcaagatggccatcagtggactctcttttttcagaatggcaaagtaaaggtttttcagggaaatcaagactccttcacacctgtggtgaactctctagacccaccgttactgactcgctaccttcgaattcacccccagagttgggtgcaccagattgccctgaggatggaggttctgggctgcgaggcacaggacctctacggcgccggatcacctggggccgaaacggccgaacaaaaactcatctcagaagaggatctgtcacctgcaaccggtcatcatcaccatcaccattga

SEQ ID NO: 1017 - protein, 1769 aa, synthetic construct
  REGION 1..1769: note = Description of Artificial Sequence: Synthetic polypeptide
ATRRYYLGAVELSWDYMQSDLGELPVDARFPPRVPKSFPFNTSVVYKKTLFVEFTDHLFNIAKPRPPWMGLLGPTIQAEVYDTVVITLKNMASHPVSLHAVGVSYWKASEGAEYDDQTSQREKEDDKVFPGGSHTYVWQVLKENGPMASDPLCLTYSYLSHVDLVKDLNSGLIGALLVCREGSLAKEKTQTLHKFILLFAVFDEGKSWHSETKNSLMQDRDAASARAWPKMHTVNGYVNRSLPGLIGCHRKSVYWHVIGMGTTPEVHSIFLEGHTFLVRNHRQASLEISPITFLTAQTLLMDLGQFLLFCHISSHQHDGMEAYVKVDSCPEEPQLRMKNNEEAEDYDDDLTDSEMDVVRFDDDNSPSFIQIRSVAKKHPKTWVHYIAAEEEDWDYAPLVGAPTSTEPSEGSAPGSPAGSPTSTEEGTSTEPSEGSAPGTSTEPSEGSAPGTSESATPESGPGTSTEPSEGSAPGTSESATPESGPGSEPATSGSETPGTSTEPSEGSAPGTSTEPSEGSAPGTSESATPESGPGTSESATPESGPGASSLAPDDRSYKSQYLNNGPQRIGRKYKKVRFMAYTDETFKTREAIQHESGILGPLLYGEVGDTLLIIFKNQASRPYNIYPHGITDVRPLYSRRLPKGVKHLKDFPILPGEIFKYKWTVTVEDGPTKSDPRCLTRYYSSFVNMERDLASGLIGPLLICYKESVDQRGNQIMSDKRNVILFSVFDENRSWYLTENIQRFLPNPAGVQLEDPEFQASNIMHSINGYVFDSLQLSVCLHEVAYWYILSIGAQTDFLSVFFSGYTFKHKMVYEDTLTLFPFSGETVFMSMENPGLWILGCHNSDFRNRGMTALLKVSSCDKNTGDYYEDSYEDISAYLLSKNNAIEPRSFSQNPPVLKRHQREITRTTLQSDQEEIDYDDTISVEMKKEDFDIYDEDENQSPRSFQKKTRHYFIAAVERLWDYGMSSSPHVLRNRAQSGSVPQFKKVVFQEFTDGSFTQPLYRGELNEHLGLLGPYIRAEVEDNIMVTFRNQASRPYSFYSSLISYEEDQRQGAEPRKNFVKPNETKTYFWKVQHHMAPTKDEFDCKAWAYFSDVDLEKDVHSGLIGPLLVCHTNTLNPAHGRQVTVQEFALFFTIFDETKSWYFTENMERNCRGAPGTPGSGTASSSPGASPGTSSTGSPGASPGTSSTGSPGASPGTSSTGSPGSSPSASTGTGPGTPGSGTASSSPGASPGTSSTGSPGASPGTSSTGSPGASPGTSSTGSPGSSTPSGATGSPGSSTPSGATGSPGASPGTSSTGSPASSAPCNIQMEDPTFKENYRFHAINGYIMDTLPGLVMAQDQRIRWYLLSMGSNENIHSIHFSGHVFTVRKKEEYKMALYNLYPGVFETVEMLPSKAGIWRVECLIGEHLHAGMSTLFLVYSNKCQTPLGMASGHIRDFQITASGQYGQWAPKLARLHYSGSINAWSTKEPFSWIKVDLLAPMIIHGIKTQGARQKFSSLYISQFIIMYSLDGKKWQTYRGNSTGTLMVFFGNVDSSGIKHNIFNPPIIARYIRLHPTHYSIRSTLRMELMGCDLNSCSMPLGMESKAISDAQITASSYFTNMFATWSPSKARLHLQGRSNAWRPQVNNPKEWLQVDFQKTMKVTGVTTQGVKSLLTSMYVKEFLISSSQDGHQWTLFFQNGKVKVFQGNQDSFTPVVNSLDPPLLTRYLRIHPQSWVHQIALRMEVLGCEAQDLYGAGSPGAETAEQKLISEEDLSPATGHHHHHH

SEQ ID NO: 1018 - DNA, 5310 bp, synthetic construct
  misc_feature 1..5310: note = Description of Artificial Sequence: Synthetic polynucleotide
  source 1..5310: mol_type = other DNA
gccaccagaagatactacctgggtgcagtggaactgtcatgggactatatgcaaagtgatctcggtgagctgcctgtggacgcaagatttcctcctagagtgccaaaatcttttccattcaacacctcagtcgtgtacaaaaagactctgtttgtagaattcacggatcaccttttcaacatcgctaagccaaggccaccctggatgggtctgctaggtcctaccatccaggctgaggtttatgatacagtggtcattacacttaagaacatggcttcccatcctgtcagtcttcatgctgttggtgtatcctactggaaagcttctgagggagctgaatatgatgatcagaccagtcaaagggagaaagaagatgataaagtcttccctggtggaagccatacatatgtctggcaggtcctgaaagagaatggtccaatggcctctgacccactgtgccttacctactcatatctttctcatgtggacctggtaaaagacttgaattcaggcctcattggagccctactagtatgtagagaagggagtctggccaaggaaaagacacagaccttgcacaaatttatactactttttgctgtatttgatgaagggaaaagttggcactcagaaacaaagaactccttgatgcaggatagggatgctgcatctgctcgggcctggcctaaaatgcacacagtcaatggttatgtaaacaggtctctgccaggtctgattggatgccacaggaaatcagtctattggcatgtgattggaatgggcaccactcctgaagtgcactcaatattcctcgaaggtcacacatttcttgtgaggaaccatcgccaggctagcttggaaatctcgccaataactttccttactgctcaaacactcttgatggaccttggacagtttctactgttttgtcatatctcttcccaccaacatgatggcatggaagcttatgtcaaagtagacagctgtccagaggaaccccaactacgaatgaaaaataatgaagaagcggaagactatgatgatgatcttactgattctgaaatggatgtggtcaggtttgatgatgacaactctccttcctttatccaaattcgctcagttgccaagaagcatcctaaaacttgggtacattacattgctgctgaagaggaggactgggactatgctcccttagtcggcgcgccaaccagtacggagccgtccgaggggagcgcaccaggaagcccggctgggagcccgacttctaccgaagagggtacatctaccgaaccaagtgaaggttcagcaccaggcacctcaacagaaccctctgagggctcggcgcctggtacaagtgagtccgccaccccagaatccgggcctgggacaagcacagaaccttcggaagggagtgcccctggaacatccgaatcggcaaccccagaatcagggccaggatctgagcccgcgacttcgggctccgagacgcctgggacatccaccgagccctccgaaggatcagccccaggcaccagcacggagccctctgagggaagcgcacctggtaccagcgaaagcgcaactcccgaatcaggtcccggtacgagcgagtcggcgaccccggagagcgggccaggtgcctcgagcctcgcccccgatgacagaagttataaaagtcaatatttgaacaatggccctcagcggattggtaggaagtacaaaaaagtccgatttatggcatacacagatgaaacctttaagactcgtgaagctattcagcatgaatcaggaatcttgggacctttactttatggggaagttggagacacactgttgattatatttaagaatcaagcaagcagaccatataacatctaccctcacggaatcactgatgtccgtcctttgtattcaaggagattaccaaaaggtgtaaaacatttgaaggattttccaattctgccaggagaaatattcaaatataaatggacagtgactgtagaagatgggccaactaaatcagatcctcggtgcctgacccgctattactctagtttcgttaatatggagagagatctagcttcaggactcattggccctctcctcatctgctacaaagaatctgtagatcaaagaggaaaccagataatgtcagacaagaggaatgtcatcctgttttctgtatttgatgagaaccgaagctggtacctcacagagaatatacaacgctttctccccaatccagctggagtgcagcttgaggatccagagttccaagcctccaacatcatgcacagcatcaatggctatgtttttgatagtttgcagttgtcagtttgtttgcatgaggtggcatactggtacattctaagcattggagcacagactgacttcctttctgtcttcttctctggatataccttcaaacacaaaatggtctatgaagacacactcaccctattcccattctcaggagaaactgtcttcatgtcgatggaaaacccaggtctatggattctggggtgccacaactcagactttcggaacagaggcatgaccgccttactgaaggtttctagttgtgacaagaacactggtgattattacgaggacagttatgaagatatttcagcatacttgctgagtaaaaacaatgccattgaaccaagaagcttctctcaaaacccaccagtcttgaaacgccatcaacgggaaataactcgtactactcttcagtcagatcaagaggaaatcgattatgatgataccatatcagttgaaatgaagaaggaagattttgacatttatgatgaggatgaaaatcagagcccccgcagctttcaaaagaaaacacgacactattttattgctgcagtggagaggctctgggattatgggatgagtagctccccacatgttctaagaaacagggctcagagtggcagtgtccctcagttcaagaaagttgttttccaggaatttactgatggctcctttactcagcccttataccgtggagaactaaatgaacatttgggactcctggggccatatataagagcagaagttgaagataatatcatggtaactttcagaaatcaggcctctcgtccctattccttctattctagccttatttcttatgaggaagatcagaggcaaggagcagaacctagaaaaaactttgtcaagcctaatgaaaccaaaacttacttttggaaagtgcaacatcatatggcacccactaaagatgagtttgactgcaaagcctgggcttatttctctgatgttgacctggaaaaagatgtgcactcaggcctgattggaccccttctggtctgccacactaacacactgaaccctgctcatgggagacaagtgacagtacaggaatttgctctgtttttcaccatctttgatgagaccaaaagctggtacttcactgaaaatatggaaagaaactgcaggggcgcgccaggtacacccggatcgggtacagcgtcatcgagccccggtgcgtcacctggtacgtcgagcacggggtcgccaggggcgtcccctgggacgtcctcaacaggctcgcccggtgcgtcacccggcacgtcgtccacgggttcacctggtagctccccttccgcgtccactggcaccgggcctggaactccggggagcggcacagcgagctcgtcgccgggagcatcgcctgggacatcgagcaccgggtcgccaggagcatcgcccggaacatccagcacaggaagccccggcgcgtcgcccgggacatcaagcacaggttccccgggatcgagcacgccgtccggagccactggatcaccagggagctcgacaccttccggcgcaacgggatcgcccggagccagcccgggtacgtcaagcactggctcccctgcctcgagcgctccctgcaatatccagatggaagatcccacttttaaagagaattatcgcttccatgcaatcaatggctacataatggatacactacctggcttagtaatggctcaggatcaaaggattcgatggtatctgctcagcatgggcagcaatgaaaacatccattctattcatttcagtggacatgtgttcactgtacgaaaaaaagaggagtataaaatggcactgtacaatctctatccaggtgtttttgagacagtggaaatgttaccatccaaagctggaatttggcgggtggaatgccttattggcgagcatctacatgctgggatgagcacactttttctggtgtacagcaataagtgtcagactcccctgggaatggcttctggacacattagagattttcagattacagcttcaggacaatatggacagtgggccccaaagctggccagacttcattattccggatcaatcaatgcctggagcaccaaggagcccttttcttggatcaaggtggatctgttggcaccaatgattattcacggcatcaagacccagggtgcccgtcagaagttctccagcctctacatctctcagtttatcatcatgtatagtcttgatgggaagaagtggcagacttatcgaggaaattccactggaaccttaatggtcttctttggcaatgtggattcatctgggataaaacacaatatttttaaccctccaattattgctcgatacatccgtttgcacccaactcattatagcattcgcagcactcttcgcatggagttgatgggctgtgatttaaatagttgcagcatgccattgggaatggagagtaaagcaatatcagatgcacagattactgcttcatcctactttaccaatatgtttgccacctggtctccttcaaaagctcgacttcacctccaagggaggagtaatgcctggagacctcaggtgaataatccaaaagagtggctgcaagtggacttccagaagacaatgaaagtcacaggagtaactactcagggagtaaaatctctgcttaccagcatgtatgtgaaggagttcctcatctccagcagtcaagatggccatcagtggactctcttttttcagaatggcaaagtaaaggtttttcagggaaatcaagactccttcacacctgtggtgaactctctagacccaccgttactgactcgctaccttcgaattcacccccagagttgggtgcaccagattgccctgaggatggaggttctgggctgcgaggcacaggacctctacggcgccggatcacctggggccgaaacggccgaacaaaaactcatctcagaagaggatctgtcacctgcaaccggtcatcatcaccatcaccattga

SEQ ID NO: 1019 - protein, 1769 aa, synthetic construct
  REGION 1..1769: note = Description of Artificial Sequence: Synthetic polypeptide
ATRRYYLGAVELSWDYMQSDLGELPVDARFPPRVPKSFPFNTSVVYKKTLFVEFTDHLFNIAKPRPPWMGLLGPTIQAEVYDTVVITLKNMASHPVSLHAVGVSYWKASEGAEYDDQTSQREKEDDKVFPGGSHTYVWQVLKENGPMASDPLCLTYSYLSHVDLVKDLNSGLIGALLVCREGSLAKEKTQTLHKFILLFAVFDEGKSWHSETKNSLMQDRDAASARAWPKMHTVNGYVNRSLPGLIGCHRKSVYWHVIGMGTTPEVHSIFLEGHTFLVRNHRQASLEISPITFLTAQTLLMDLGQFLLFCHISSHQHDGMEAYVKVDSCPEEPQLRMKNNEEAEDYDDDLTDSEMDVVRFDDDNSPSFIQIRSVAKKHPKTWVHYIAAEEEDWDYAPLVLAPDGAPGASPGTSSTGSPGSSPSASTGTGPGSSPSASTGTGPGTPGSGTASSSPGSSTPSGATGSPGSSPSASTGTGPGASPGTSSTGSPGTPGSGTASSSPGSSTPSGATGSPGTPGSGTASSSPGASPGTSSTGSPGASPGTSSTGSPASSDRSYKSQYLNNGPQRIGRKYKKVRFMAYTDETFKTREAIQHESGILGPLLYGEVGDTLLIIFKNQASRPYNIYPHGITDVRPLYSRRLPKGVKHLKDFPILPGEIFKYKWTVTVEDGPTKSDPRCLTRYYSSFVNMERDLASGLIGPLLICYKESVDQRGNQIMSDKRNVILFSVFDENRSWYLTENIQRFLPNPAGVQLEDPEFQASNIMHSINGYVFDSLQLSVCLHEVAYWYILSIGAQTDFLSVFFSGYTFKHKMVYEDTLTLFPFSGETVFMSMENPGLWILGCHNSDFRNRGMTALLKVSSCDKNTGDYYEDSYEDISAYLLSKNNAIEPRSFSQNPPVLKRHQREITRTTLQSDQEEIDYDDTISVEMKKEDFDIYDEDENQSPRSFQKKTRHYFIAAVERLWDYGMSSSPHVLRNRAQSGSVPQFKKVVFQEFTDGSFTQPLYRGELNEHLGLLGPYIRAEVEDNIMVTFRNQASRPYSFYSSLISYEEDQRQGAEPRKNFVKPNETKTYFWKVQHHMAPTKDEFDCKAWAYFSDVDLEKDVHSGLIGPLLVCHTNTLNPAHGRQVTVQEFALFFTIFDETKSWYFTENMERNCRGAPGTPGSGTASSSPGASPGTSSTGSPGASPGTSSTGSPGASPGTSSTGSPGSSPSASTGTGPGTPGSGTASSSPGASPGTSSTGSPGASPGTSSTGSPGASPGTSSTGSPGSSTPSGATGSPGSSTPSGATGSPGASPGTSSTGSPASSAPCNIQMEDPTFKENYRFHAINGYIMDTLPGLVMAQDQRIRWYLLSMGSNENIHSIHFSGHVFTVRKKEEYKMALYNLYPGVFETVEMLPSKAGIWRVECLIGEHLHAGMSTLFLVYSNKCQTPLGMASGHIRDFQITASGQYGQWAPKLARLHYSGSINAWSTKEPFSWIKVDLLAPMIIHGIKTQGARQKFSSLYISQFIIMYSLDGKKWQTYRGNSTGTLMVFFGNVDSSGIKHNIFNPPIIARYIRLHPTHYSIRSTLRMELMGCDLNSCSMPLGMESKAISDAQITASSYFTNMFATWSPSKARLHLQGRSNAWRPQVNNPKEWLQVDFQKTMKVTGVTTQGVKSLLTSMYVKEFLISSSQDGHQWTLFFQNGKVKVFQGNQDSFTPVVNSLDPPLLTRYLRIHPQSWVHQIALRMEVLGCEAQDLYGAGSPGAETAEQKLISEEDLSPATGHHHHHH

SEQ ID NO: 1020 - DNA, 5310 bp, synthetic construct
  misc_feature 1..5310: note = Description of Artificial Sequence: Synthetic polynucleotide
  source 1..5310: mol_type = other DNA
gccaccagaagatactacctgggtgcagtggaactgtcatgggactatatgcaaagtgatctcggtgagctgcctgtggacgcaagatttcctcctagagtgccaaaatcttttccattcaacacctcagtcgtgtacaaaaagactctgtttgtagaattcacggatcaccttttcaacatcgctaagccaaggccaccctggatgggtctgctaggtcctaccatccaggctgaggtttatgatacagtggtcattacacttaagaacatggcttcccatcctgtcagtcttcatgctgttggtgtatcctactggaaagcttctgagggagctgaatatgatgatcagaccagtcaaagggagaaagaagatgataaagtcttccctggtggaagccatacatatgtctggcaggtcctgaaagagaatggtccaatggcctctgacccactgtgccttacctactcatatctttctcatgtggacctggtaaaagacttgaattcaggcctcattggagccctactagtatgtagagaagggagtctggccaaggaaaagacacagaccttgcacaaatttatactactttttgctgtatttgatgaagggaaaagttggcactcagaaacaaagaactccttgatgcaggatagggatgctgcatctgctcgggcctggcctaaaatgcacacagtcaatggttatgtaaacaggtctctgccaggtctgattggatgccacaggaaatcagtctattggcatgtgattggaatgggcaccactcctgaagtgcactcaatattcctcgaaggtcacacatttcttgtgaggaaccatcgccaggctagcttggaaatctcgccaataactttccttactgctcaaacactcttgatggaccttggacagtttctactgttttgtcatatctcttcccaccaacatgatggcatggaagcttatgtcaaagtagacagctgtccagaggaaccccaactacgaatgaaaaataatgaagaagcggaagactatgatgatgatcttactgattctgaaatggatgtggtcaggtttgatgatgacaactctccttcctttatccaaattcgctcagttgccaagaagcatcctaaaacttgggtacattacattgctgctgaagaggaggactgggactatgctcccttagtcctcgcccccgatggcgcgccaggtgcctcgccgggaacatcatcaactggttcacccgggtcatccccctcggcctcaaccgggacgggtcccggctcatcccccagcgccagcactggaacaggtcctggcactcctggttccggtacggcatcgtcatccccgggaagctcaacaccgtccggagcgacaggatcacctggctcgtcaccttcggcgtcaactggaacggggccaggggcctcacccggaacgtcctcgactgggtcgcctggtacgccgggatcaggaacggcctcatcctcgcctgggtcctcaacgccctcgggtgcgactggttcgccgggaactcctggctcggggacggcctcgtcgtcgcctggggcatcaccggggacgagctccacggggtcccctggagcgtcaccggggacctcctcgacaggtagcccggcctcgagcgacagaagttataaaagtcaatatttgaacaatggccctcagcggattggtaggaagtacaaaaaagtccgatttatggcatacacagatgaaacctttaagactcgtgaagctattcagcatgaatcaggaatcttgggacctttactttatggggaagttggagacacactgttgattatatttaagaatcaagcaagcagaccatataacatctaccctcacggaatcactgatgtccgtcctttgtattcaaggagattaccaaaaggtgtaaaacatttgaaggattttccaattctgccaggagaaatattcaaatataaatggacagtgactgtagaagatgggccaactaaatcagatcctcggtgcctgacccgctattactctagtttcgttaatatggagagagatctagcttcaggactcattggccctctcctcatctgctacaaagaatctgtagatcaaagaggaaaccagataatgtcagacaagaggaatgtcatcctgttttctgtatttgatgagaaccgaagctggtacctcacagagaatatacaacgctttctccccaatccagctggagtgcagcttgaggatccagagttccaagcctccaacatcatgcacagcatcaatggctatgtttttgatagtttgcagttgtcagtttgtttgcatgaggtggcatactggtacattctaagcattggagcacagactgacttcctttctgtcttcttctctggatataccttcaaacacaaaatggtctatgaagacacactcaccctattcccattctcaggagaaactgtcttcatgtcgatggaaaacccaggtctatggattctggggtgccacaactcagactttcggaacagaggcatgaccgccttactgaaggtttctagttgtgacaagaacactggtgattattacgaggacagttatgaagatatttcagcatacttgctgagtaaaaacaatgccattgaaccaagaagcttctctcaaaacccaccagtcttgaaacgccatcaacgggaaataactcgtactactcttcagtcagatcaagaggaaatcgattatgatgataccatatcagttgaaatgaagaaggaagattttgacatttatgatgaggatgaaaatcagagcccccgcagctttcaaaagaaaacacgacactattttattgctgcagtggagaggctctgggattatgggatgagtagctccccacatgttctaagaaacagggctcagagtggcagtgtccctcagttcaagaaagttgttttccaggaatttactgatggctcctttactcagcccttataccgtggagaactaaatgaacatttgggactcctggggccatatataagagcagaagttgaagataatatcatggtaactttcagaaatcaggcctctcgtccctattccttctattctagccttatttcttatgaggaagatcagaggcaaggagcagaacctagaaaaaactttgtcaagcctaatgaaaccaaaacttacttttggaaagtgcaacatcatatggcacccactaaagatgagtttgactgcaaagcctgggcttatttctctgatgttgacctggaaaaagatgtgcactcaggcctgattggaccccttctggtctgccacactaacacactgaaccctgctcatgggagacaagtgacagtacaggaatttgctctgtttttcaccatctttgatgagaccaaaagctggtacttcactgaaaatatggaaagaaactgcaggggcgcgccaggtacacccggatcgggtacagcgtcatcgagccccggtgcgtcacctggtacgtcgagcacggggtcgccaggggcgtcccctgggacgtcctcaacaggctcgcccggtgcgtcacccggcacgtcgtccacgggttcacctggtagctccccttccgcgtccactggcaccgggcctggaactccggggagcggcacagcgagctcgtcgccgggagcatcgcctgggacatcgagcaccgggtcgccaggagcatcgcccggaacatccagcacaggaagccccggcgcgtcgcccgggacatcaagcacaggttccccgggatcgagcacgccgtccggagccactggatcaccagggagctcgacaccttccggcgcaacgggatcgcccggagccagcccgggtacgtcaagcactggctcccctgcctcgagcgctccctgcaatatccagatggaagatcccacttttaaagagaattatcgcttccatgcaatcaatggctacataatggatacactacctggcttagtaatggctcaggatcaaaggattcgatggtatctgctcagcatgggcagcaatgaaaacatccattctattcatttcagtggacatgtgttcactgtacgaaaaaaagaggagtataaaatggcactgtacaatctctatccaggtgtttttgagacagtggaaatgttaccatccaaagctggaatttggcgggtggaatgccttattggcgagcatctacatgctgggatgagcacactttttctggtgtacagcaataagtgtcagactcccctgggaatggcttctggacacattagagattttcagattacagcttcaggacaatatggacagtgggccccaaagctggccagacttcattattccggatcaatcaatgcctggagcaccaaggagcccttttcttggatcaaggtggatctgttggcaccaatgattattcacggcatcaagacccagggtgcccgtcagaagttctccagcctctacatctctcagtttatcatcatgtatagtcttgatgggaagaagtggcagacttatcgaggaaattccactggaaccttaatggtcttctttggcaatgtggattcatctgggataaaacacaatatttttaaccctccaattattgctcgatacatccgtttgcacccaactcattatagcattcgcagcactcttcgcatggagttgatgggctgtgatttaaatagttgcagcatgccattgggaatggagagtaaagcaatatcagatgcacagattactgcttcatcctactttaccaatatgtttgccacctggtctccttcaaaagctcgacttcacctccaagggaggagtaatgcctggagacctcaggtgaataatccaaaagagtggctgcaagtggacttccagaagacaatgaaagtcacaggagtaactactcagggagtaaaatctctgcttaccagcatgtatgtgaaggagttcctcatctccagcagtcaagatggccatcagtggactctcttttttcagaatggcaaagtaaaggtttttcagggaaatcaagactccttcacacctgtggtgaactctctagacccaccgttactgactcgctaccttcgaattcacccccagagttgggtgcaccagattgccctgaggatggaggttctgggctgcgaggcacaggacctctacggcgccggatcacctggggccgaaacggccgaacaaaaactcatctcagaagaggatctgtcacctgcaaccggtcatcatcaccatcaccattga

SEQ ID NO: 1021 - protein, 1769 aa, synthetic construct
  REGION 1..1769: note = Description of Artificial Sequence: Synthetic polypeptide
ATRRYYLGAVELSWDYMQSDLGELPVDARFPPRVPKSFPFNTSVVYKKTLFVEFTDHLFNIAKPRPPWMGLLGPTIQAEVYDTVVITLKNMASHPVSLHAVGVSYWKASEGAEYDDQTSQREKEDDKVFPGGSHTYVWQVLKENGPMASDPLCLTYSYLSHVDLVKDLNSGLIGALLVCREGSLAKEKTQTLHKFILLFAVFDEGKSWHSETKNSLMQDRDAASARAWPKMHTVNGYVNRSLPGLIGCHRKSVYWHVIGMGTTPEVHSIFLEGHTFLVRNHRQASLEISPITFLTAQTLLMDLGQFLLFCHISSHQHDGMEAYVKVDSCPEEPQLRMKNNEEAEDYDDDLTDSEMDVVRFDDDNSPSFIQIRSVAKKHPKTWVHYIAAEEEDWDYAPLVLAPDGAPGASPGTSSTGSPGSSPSASTGTGPGSSPSASTGTGPGTPGSGTASSSPGSSTPSGATGSPGSSPSASTGTGPGASPGTSSTGSPGTPGSGTASSSPGSSTPSGATGSPGTPGSGTASSSPGASPGTSSTGSPGASPGTSSTGSPASSDRSYKSQYLNNGPQRIGRKYKKVRFMAYTDETFKTREAIQHESGILGPLLYGEVGDTLLIIFKNQASRPYNIYPHGITDVRPLYSRRLPKGVKHLKDFPILPGEIFKYKWTVTVEDGPTKSDPRCLTRYYSSFVNMERDLASGLIGPLLICYKESVDQRGNQIMSDKRNVILFSVFDENRSWYLTENIQRFLPNPAGVQLEDPEFQASNIMHSINGYVFDSLQLSVCLHEVAYWYILSIGAQTDFLSVFFSGYTFKHKMVYEDTLTLFPFSGETVFMSMENPGLWILGCHNSDFRNRGMTALLKVSSCDKNTGDYYEDSYEDISAYLLSKNNAIEPRSFSQNPPVLKRHQREITRTTLQSDQEEIDYDDTISVEMKKEDFDIYDEDENQSPRSFQKKTRHYFIAAVERLWDYGMSSSPHVLRNRAQSGSVPQFKKVVFQEFTDGSFTQPLYRGELNEHLGLLGPYIRAEVEDNIMVTFRNQASRPYSFYSSLISYEEDQRQGAEPRKNFVKPNETKTYFWKVQHHMAPTKDEFDCKAWAYFSDVDLEKDVHSGLIGPLLVCHTNTLNPAHGRQVTVQEFALFFTIFDETKSWYFTENMERNCRAPCNIGAPGTPGSGTASSSPGASPGTSSTGSPGASPGTSSTGSPGASPGTSSTGSPGSSPSASTGTGPGTPGSGTASSSPGASPGTSSTGSPGASPGTSSTGSPGASPGTSSTGSPGSSTPSGATGSPGSSTPSGATGSPGASPGTSSTGSPASSQMEDPTFKENYRFHAINGYIMDTLPGLVMAQDQRIRWYLLSMGSNENIHSIHFSGHVFTVRKKEEYKMALYNLYPGVFETVEMLPSKAGIWRVECLIGEHLHAGMSTLFLVYSNKCQTPLGMASGHIRDFQITASGQYGQWAPKLARLHYSGSINAWSTKEPFSWIKVDLLAPMIIHGIKTQGARQKFSSLYISQFIIMYSLDGKKWQTYRGNSTGTLMVFFGNVDSSGIKHNIFNPPIIARYIRLHPTHYSIRSTLRMELMGCDLNSCSMPLGMESKAISDAQITASSYFTNMFATWSPSKARLHLQGRSNAWRPQVNNPKEWLQVDFQKTMKVTGVTTQGVKSLLTSMYVKEFLISSSQDGHQWTLFFQNGKVKVFQGNQDSFTPVVNSLDPPLLTRYLRIHPQSWVHQIALRMEVLGCEAQDLYGAGSPGAETAEQKLISEEDLSPATGHHHHHH

SEQ ID NO: 1022 - DNA, 5310 bp, synthetic construct
  misc_feature 1..5310: note = Description of Artificial Sequence: Synthetic polynucleotide
  source 1..5310: mol_type = other DNA
gccaccagaagatactacctgggtgcagtggaactgtcatgggactatatgcaaagtgatctcggtgagctgcctgtggacgcaagatttcctcctagagtgccaaaatcttttccattcaacacctcagtcgtgtacaaaaagactctgtttgtagaattcacggatcaccttttcaacatcgctaagccaaggccaccctggatgggtctgctaggtcctaccatccaggctgaggtttatgatacagtggtcattacacttaagaacatggcttcccatcctgtcagtcttcatgctgttggtgtatcctactggaaagcttctgagggagctgaatatgatgatcagaccagtcaaagggagaaagaagatgataaagtcttccctggtggaagccatacatatgtctggcaggtcctgaaagagaatggtccaatggcctctgacccactgtgccttacctactcatatctttctcatgtggacctggtaaaagacttgaattcaggcctcattggagccctactagtatgtagagaagggagtctggccaaggaaaagacacagaccttgcacaaatttatactactttttgctgtatttgatgaagggaaaagttggcactcagaaacaaagaactccttgatgcaggatagggatgctgcatctgctcgggcctggcctaaaatgcacacagtcaatggttatgtaaacaggtctctgccaggtctgattggatgccacaggaaatcagtctattggcatgtgattggaatgggcaccactcctgaagtgcactcaatattcctcgaaggtcacacatttcttgtgaggaaccatcgccaggctagcttggaaatctcgccaataactttccttactgctcaaacactcttgatggaccttggacagtttctactgttttgtcatatctcttcccaccaacatgatggcatggaagcttatgtcaaagtagacagctgtccagaggaaccccaactacgaatgaaaaataatgaagaagcggaagactatgatgatgatcttactgattctgaaatggatgtggtcaggtttgatgatgacaactctccttcctttatccaaattcgctcagttgccaagaagcatcctaaaacttgggtacattacattgctgctgaagaggaggactgggactatgctcccttagtcctcgcccccgatggcgcgccaggtgcctcgccgggaacatcatcaactggttcacccgggtcatccccctcggcctcaaccgggacgggtcccggctcatcccccagcgccagcactggaacaggtcctggcactcctggttccggtacggcatcgtcatccccgggaagctcaacaccgtccggagcgacaggatcacctggctcgtcaccttcggcgtcaactggaacggggccaggggcctcacccggaacgtcctcgactgggtcgcctggtacgccgggatcaggaacggcctcatcctcgcctgggtcctcaacgccctcgggtgcgactggttcgccgggaactcctggctcggggacggcctcgtcgtcgcctggggcatcaccggggacgagctccacggggtcccctggagcgtcaccggggacctcctcgacaggtagcccggcctcgagcgacagaagttataaaagtcaatatttgaacaatggccctcagcggattggtaggaagtacaaaaaagtccgatttatggcatacacagatgaaacctttaagactcgtgaagctattcagcatgaatcaggaatcttgggacctttactttatggggaagttggagacacactgttgattatatttaagaatcaagcaagcagaccatataacatctaccctcacggaatcactgatgtccgtcctttgtattcaaggagattaccaaaaggtgtaaaacatttgaaggattttccaattctgccaggagaaatattcaaatataaatggacagtgactgtagaagatgggccaactaaatcagatcctcggtgcctgacccgctattactctagtttcgttaatatggagagagatctagcttcaggactcattggccctctcctcatctgctacaaagaatctgtagatcaaagaggaaaccagataatgtcagacaagaggaatgtcatcctgttttctgtatttgatgagaaccgaagctggtacctcacagagaatatacaacgctttctccccaatccagctggagtgcagcttgaggatccagagttccaagcctccaacatcatgcacagcatcaatggctatgtttttgatagtttgcagttgtcagtttgtttgcatgaggtggcatactggtacattctaagcattggagcacagactgacttcctttctgtcttcttctctggatataccttcaaacacaaaatggtctatgaagacacactcaccctattcccattctcaggagaaactgtcttcatgtcgatggaaaacccaggtctatggattctggggtgccacaactcagactttcggaacagaggcatgaccgccttactgaaggtttctagttgtgacaagaacactggtgattattacgaggacagttatgaagatatttcagcatacttgctgagtaaaaacaatgccattgaaccaagaagcttctctcaaaacccaccagtcttgaaacgccatcaacgggaaataactcgtactactcttcagtcagatcaagaggaaatcgattatgatgataccatatcagttgaaatgaagaaggaagattttgacatttatgatgaggatgaaaatcagagcccccgcagctttcaaaagaaaacacgacactattttattgctgcagtggagaggctctgggattatgggatgagtagctccccacatgttctaagaaacagggctcagagtggcagtgtccctcagttcaagaaagttgttttccaggaatttactgatggctcctttactcagcccttataccgtggagaactaaatgaacatttgggactcctggggccatatataagagcagaagttgaagataatatcatggtaactttcagaaatcaggcctctcgtccctattccttctattctagccttatttcttatgaggaagatcagaggcaaggagcagaacctagaaaaaactttgtcaagcctaatgaaaccaaaacttacttttggaaagtgcaacatcatatggcacccactaaagatgagtttgactgcaaagcctgggcttatttctctgatgttgacctggaaaaagatgtgcactcaggcctgattggaccccttctggtctgccacactaacacactgaaccctgctcatgggagacaagtgacagtacaggaatttgctctgtttttcaccatctttgatgagaccaaaagctggtacttcactgaaaatatggaaagaaactgcagggctccctgcaatatcggcgcgccaggtacacccggatcgggtacagcgtcatcgagccccggtgcgtcacctggtacgtcgagcacggggtcgccaggggcgtcccctgggacgtcctcaacaggctcgcccggtgcgtcacccggcacgtcgtccacgggttcacctggtagctccccttccgcgtccactggcaccgggcctggaactccggggagcggcacagcgagctcgtcgccgggagcatcgcctgggacatcgagcaccgggtcgccaggagcatcgcccggaacatccagcacaggaagccccggcgcgtcgcccgggacatcaagcacaggttccccgggatcgagcacgccgtccggagccactggatcaccagggagctcgacaccttccggcgcaacgggatcgcccggagccagcccgggtacgtcaagcactggctcccctgcctcgagccagatggaagatcccacttttaaagagaattatcgcttccatgcaatcaatggctacataatggatacactacctggcttagtaatggctcaggatcaaaggattcgatggtatctgctcagcatgggcagcaatgaaaacatccattctattcatttcagtggacatgtgttcactgtacgaaaaaaagaggagtataaaatggcactgtacaatctctatccaggtgtttttgagacagtggaaatgttaccatccaaagctggaatttggcgggtggaatgccttattggcgagcatctacatgctgggatgagcacactttttctggtgtacagcaataagtgtcagactcccctgggaatggcttctggacacattagagattttcagattacagcttcaggacaatatggacagtgggccccaaagctggccagacttcattattccggatcaatcaatgcctggagcaccaaggagcccttttcttggatcaaggtggatctgttggcaccaatgattattcacggcatcaagacccagggtgcccgtcagaagttctccagcctctacatctctcagtttatcatcatgtatagtcttgatgggaagaagtggcagacttatcgaggaaattccactggaaccttaatggtcttctttggcaatgtggattcatctgggataaaacacaatatttttaaccctccaattattgctcgatacatccgtttgcacccaactcattatagcattcgcagcactcttcgcatggagttgatgggctgtgatttaaatagttgcagcatgccattgggaatggagagtaaagcaatatcagatgcacagattactgcttcatcctactttaccaatatgtttgccacctggtctccttcaaaagctcgacttcacctccaagggaggagtaatgcctggagacctcaggtgaataatccaaaagagtggctgcaagtggacttccagaagacaatgaaagtcacaggagtaactactcagggagtaaaatctctgcttaccagcatgtatgtgaaggagttcctcatctccagcagtcaagatggccatcagtggactctcttttttcagaatggcaaagtaaaggtttttcagggaaatcaagactccttcacacctgtggtgaactctctagacccaccgttactgactcgctaccttcgaattcacccccagagttgggtgcaccagattgccctgaggatggaggttctgggctgcgaggcacaggacctctacggcgccggatcacctggggccgaaacggccgaacaaaaactcatctcagaagaggatctgtcacctgcaaccggtcatcatcaccatcaccattga

SEQ ID NO: 1023 - protein, 1769 aa, synthetic construct
  REGION 1..1769: note = Description of Artificial Sequence: Synthetic polypeptide
ATRRYYLGAVELSWDYMQSDLGELPVDARFPPRVPKSFPFNTSVVYKKTLFVEFTDHLFNIAKPRPPWMGLLGPTIQAEVYDTVVITLKNMASHPVSLHAVGVSYWKASEGAEYDDQTSQREKEDDKVFPGGSHTYVWQVLKENGPMASDPLCLTYSYLSHVDLVKDLNSGLIGALLVCREGSLAKEKTQTLHKFILLFAVFDEGKSWHSETKNSLMQDRDAASARAWPKMHTVNGYVNRSLPGLIGCHRKSVYWHVIGMGTTPEVHSIFLEGHTFLVRNHRQASLEISPITFLTAQTLLMDLGQFLLFCHISSHQHDGMEAYVKVDSCPEEPQLRMKNNEEAEDYDDDLTDSEMDVVRFDDDNSPSFIQIRSVAKKHPKTWVHYIAAEEEDWDYAPLVGAPTSTEPSEGSAPGSPAGSPTSTEEGTSTEPSEGSAPGTSTEPSEGSAPGTSESATPESGPGTSTEPSEGSAPGTSESATPESGPGSEPATSGSETPGTSTEPSEGSAPGTSTEPSEGSAPGTSESATPESGPGTSESATPESGPGASSLAPDDRSYKSQYLNNGPQRIGRKYKKVRFMAYTDETFKTREAIQHESGILGPLLYGEVGDTLLIIFKNQASRPYNIYPHGITDVRPLYSRRLPKGVKHLKDFPILPGEIFKYKWTVTVEDGPTKSDPRCLTRYYSSFVNMERDLASGLIGPLLICYKESVDQRGNQIMSDKRNVILFSVFDENRSWYLTENIQRFLPNPAGVQLEDPEFQASNIMHSINGYVFDSLQLSVCLHEVAYWYILSIGAQTDFLSVFFSGYTFKHKMVYEDTLTLFPFSGETVFMSMENPGLWILGCHNSDFRNRGMTALLKVSSCDKNTGDYYEDSYEDISAYLLSKNNAIEPRSFSQNPPVLKRHQREITRTTLQSDQEEIDYDDTISVEMKKEDFDIYDEDENQSPRSFQKKTRHYFIAAVERLWDYGMSSSPHVLRNRAQSGSVPQFKKVVFQEFTDGSFTQPLYRGELNEHLGLLGPYIRAEVEDNIMVTFRNQASRPYSFYSSLISYEEDQRQGAEPRKNFVKPNETKTYFWKVQHHMAPTKDEFDCKAWAYFSDVDLEKDVHSGLIGPLLVCHTNTLNPAHGRQVTVQEFALFFTIFDETKSWYFTENMERNCRGAPTSESATPESGPGSEPATSGSETPGTSESATPESGPGSEPATSGSETPGTSESATPESGPGTSTEPSEGSAPGTSESATPESGPGSPAGSPTSTEEGSPAGSPTSTEEGSPAGSPTSTEEGTSESATPESGPGTSTEPSEGSAPGASSAPCNIQMEDPTFKENYRFHAINGYIMDTLPGLVMAQDQRIRWYLLSMGSNENIHSIHFSGHVFTVRKKEEYKMALYNLYPGVFETVEMLPSKAGIWRVECLIGEHLHAGMSTLFLVYSNKCQTPLGMASGHIRDFQITASGQYGQWAPKLARLHYSGSINAWSTKEPFSWIKVDLLAPMIIHGIKTQGARQKFSSLYISQFIIMYSLDGKKWQTYRGNSTGTLMVFFGNVDSSGIKHNIFNPPIIARYIRLHPTHYSIRSTLRMELMGCDLNSCSMPLGMESKAISDAQITASSYFTNMFATWSPSKARLHLQGRSNAWRPQVNNPKEWLQVDFQKTMKVTGVTTQGVKSLLTSMYVKEFLISSSQDGHQWTLFFQNGKVKVFQGNQDSFTPVVNSLDPPLLTRYLRIHPQSWVHQIALRMEVLGCEAQDLYGAGSPGAETAEQKLISEEDLSPATGHHHHHH

SEQ ID NO: 1024 - DNA, 5310 bp, synthetic construct
  misc_feature 1..5310: note = Description of Artificial Sequence: Synthetic polynucleotide
  source 1..5310: mol_type = other DNA
gccaccagaagatactacctgggtgcagtggaactgtcatgggactatatgcaaagtgatctcggtgagctgcctgtggacgcaagatttcctcctagagtgccaaaatcttttccattcaacacctcagtcgtgtacaaaaagactctgtttgtagaattcacggatcaccttttcaacatcgctaagccaaggccaccctggatgggtctgctaggtcctaccatccaggctgaggtttatgatacagtggtcattacacttaagaacatggcttcccatcctgtcagtcttcatgctgttggtgtatcctactggaaagcttctgagggagctgaatatgatgatcagaccagtcaaagggagaaagaagatgataaagtcttccctggtggaagccatacatatgtctggcaggtcctgaaagagaatggtccaatggcctctgacccactgtgccttacctactcatatctttctcatgtggacctggtaaaagacttgaattcaggcctcattggagccctactagtatgtagagaagggagtctggccaaggaaaagacacagaccttgcacaaatttatactactttttgctgtatttgatgaagggaaaagttggcactcagaaacaaagaactccttgatgcaggatagggatgctgcatctgctcgggcctggcctaaaatgcacacagtcaatggttatgtaaacaggtctctgccaggtctgattggatgccacaggaaatcagtctattggcatgtgattggaatgggcaccactcctgaagtgcactcaatattcctcgaaggtcacacatttcttgtgaggaaccatcgccaggctagcttggaaatctcgccaataactttccttactgctcaaacactcttgatggaccttggacagtttctactgttttgtcatatctcttcccaccaacatgatggcatggaagcttatgtcaaagtagacagctgtccagaggaaccccaactacgaatgaaaaataatgaagaagcggaagactatgatgatgatcttactgattctgaaatggatgtggtcaggtttgatgatgacaactctccttcctttatccaaattcgctcagttgccaagaagcatcctaaaacttgggtacattacattgctgctgaagaggaggactgggactatgctcccttagtcggcgcgccaaccagtacggagccgtccgaggggagcgcaccaggaagcccggctgggagcccgacttctaccgaagagggtacatctaccgaaccaagtgaaggttcagcaccaggcacctcaacagaaccctctgagggctcggcgcctggtacaagtgagtccgccaccccagaatccgggcctgggacaagcacagaaccttcggaagggagtgcccctggaacatccgaatcggcaaccccagaatcagggccaggatctgagcccgcgacttcgggctccgagacgcctgggacatccaccgagccctccgaaggatcagccccaggcaccagcacggagccctctgagggaagcgcacctggtaccagcgaaagcgcaactcccgaatcaggtcccggtacgagcgagtcggcgaccccggagagcgggccaggtgcctcgagcctcgcccccgatgacagaagttataaaagtcaatatttgaacaatggccctcagcggattggtaggaagtacaaaaaagtccgatttatggcatacacagatgaaacctttaagactcgtgaagctattcagcatgaatcaggaatcttgggacctttactttatggggaagttggagacacactgttgattatatttaagaatcaagcaagcagaccatataacatctaccctcacggaatcactgatgtccgtcctttgtattcaaggagattaccaaaaggtgtaaaacatttgaaggattttccaattctgccaggagaaatattcaaatataaatggacagtgactgtagaagatgggccaactaaatcagatcctcggtgcctgacccgctattactctagtttcgttaatatggagagagatctagcttcaggactcattggccctctcctcatctgctacaaagaatctgtagatcaaagaggaaaccagataatgtcagacaagaggaatgtcatcctgttttctgtatttgatgagaaccgaagctggtacctcacagagaatatacaacgctttctccccaatccagctggagtgcagcttgaggatccagagttccaagcctccaacatcatgcacagcatcaatggctatgtttttgatagtttgcagttgtcagtttgtttgcatgaggtggcatactggtacattctaagcattggagcacagactgacttcctttctgtcttcttctctggatataccttcaaacacaaaatggtctatgaagacacactcaccctattcccattctcaggagaaactgtcttcatgtcgatggaaaacccaggtctatggattctggggtgccacaactcagactttcggaacagaggcatgaccgccttactgaaggtttctagttgtgacaagaacactggtgattattacgaggacagttatgaagatatttcagcatacttgctgagtaaaaacaatgccattgaaccaagaagcttctctcaaaacccaccagtcttgaaacgccatcaacgggaaataactcgtactactcttcagtcagatcaagaggaaatcgattatgatgataccatatcagttgaaatgaagaaggaagattttgacatttatgatgaggatgaaaatcagagcccccgcagctttcaaaagaaaacacgacactattttattgctgcagtggagaggctctgggattatgggatgagtagctccccacatgttctaagaaacagggctcagagtggcagtgtccctcagttcaagaaagttgttttccaggaatttactgatggctcctttactcagcccttataccgtggagaactaaatgaacatttgggactcctggggccatatataagagcagaagttgaagataatatcatggtaactttcagaaatcaggcctctcgtccctattccttctattctagccttatttcttatgaggaagatcagaggcaaggagcagaacctagaaaaaactttgtcaagcctaatgaaaccaaaacttacttttggaaagtgcaacatcatatggcacccactaaagatgagtttgactgcaaagcctgggcttatttctctgatgttgacctggaaaaagatgtgcactcaggcctgattggaccccttctggtctgccacactaacacactgaaccctgctcatgggagacaagtgacagtacaggaatttgctctgtttttcaccatctttgatgagaccaaaagctggtacttcactgaaaatatggaaagaaactgcaggggcgcgccaacgtccgaaagtgctacccctgagtcaggccctggtagtgagcctgccacaagcggaagcgaaactccggggacctcagagtctgccactcccgaatcggggccaggctctgaaccggccacttcagggagcgaaacaccaggaacatcggagagcgctaccccggagagcgggccaggaactagtactgagcctagcgagggaagtgcacctggtacaagcgagtccgccacacccgagtctggccctggctctccagcgggctcacccacgagcactgaagagggctctcccgctggcagcccaacgtcgacagaagaaggatcaccagcaggctcccccacatcaacagaggagggtacatcagaatctgctactcccgagagtggacccggtacctccactgagcccagcgaggggagtgcaccaggtgcctcgagcgctccctgcaatatccagatggaagatcccacttttaaagagaattatcgcttccatgcaatcaatggctacataatggatacactacctggcttagtaatggctcaggatcaaaggattcgatggtatctgctcagcatgggcagcaatgaaaacatccattctattcatttcagtggacatgtgttcactgtacgaaaaaaagaggagtataaaatggcactgtacaatctctatccaggtgtttttgagacagtggaaatgttaccatccaaagctggaatttggcgggtggaatgccttattggcgagcatctacatgctgggatgagcacactttttctggtgtacagcaataagtgtcagactcccctgggaatggcttctggacacattagagattttcagattacagcttcaggacaatatggacagtgggccccaaagctggccagacttcattattccggatcaatcaatgcctggagcaccaaggagcccttttcttggatcaaggtggatctgttggcaccaatgattattcacggcatcaagacccagggtgcccgtcagaagttctccagcctctacatctctcagtttatcatcatgtatagtcttgatgggaagaagtggcagacttatcgaggaaattccactggaaccttaatggtcttctttggcaatgtggattcatctgggataaaacacaatatttttaaccctccaattattgctcgatacatccgtttgcacccaactcattatagcattcgcagcactcttcgcatggagttgatgggctgtgatttaaatagttgcagcatgccattgggaatggagagtaaagcaatatcagatgcacagattactgcttcatcctactttaccaatatgtttgccacctggtctccttcaaaagctcgacttcacctccaagggaggagtaatgcctggagacctcaggtgaataatccaaaagagtggctgcaagtggacttccagaagacaatgaaagtcacaggagtaactactcagggagtaaaatctctgcttaccagcatgtatgtgaaggagttcctcatctccagcagtcaagatggccatcagtggactctcttttttcagaatggcaaagtaaaggtttttcagggaaatcaagactccttcacacctgtggtgaactctctagacccaccgttactgactcgctaccttcgaattcacccccagagttgggtgcaccagattgccctgaggatggaggttctgggctgcgaggcacaggacctctacggcgccggatcacctggggccgaaacggccgaacaaaaactcatctcagaagaggatctgtcacctgcaaccggtcatcatcaccatcaccattga

SEQ ID NO: 1025 - protein, 1769 aa, synthetic construct
  REGION 1..1769: note = Description of Artificial Sequence: Synthetic polypeptide
ATRRYYLGAVELSWDYMQSDLGELPVDARFPPRVPKSFPFNTSVVYKKTLFVEFTDHLFNIAKPRPPWMGLLGPTIQAEVYDTVVITLKNMASHPVSLHAVGVSYWKASEGAEYDDQTSQREKEDDKVFPGGSHTYVWQVLKENGPMASDPLCLTYSYLSHVDLVKDLNSGLIGALLVCREGSLAKEKTQTLHKFILLFAVFDEGKSWHSETKNSLMQDRDAASARAWPKMHTVNGYVNRSLPGLIGCHRKSVYWHVIGMGTTPEVHSIFLEGHTFLVRNHRQASLEISPITFLTAQTLLMDLGQFLLFCHISSHQHDGMEAYVKVDSCPEEPQLRMKNNEEAEDYDDDLTDSEMDVVRFDDDNSPSFIQIRSVAKKHPKTWVHYIAAEEEDWDYAPLVLAPDGAPGASPGTSSTGSPGSSPSASTGTGPGSSPSASTGTGPGTPGSGTASSSPGSSTPSGATGSPGSSPSASTGTGPGASPGTSSTGSPGTPGSGTASSSPGSSTPSGATGSPGTPGSGTASSSPGASPGTSSTGSPGASPGTSSTGSPASSDRSYKSQYLNNGPQRIGRKYKKVRFMAYTDETFKTREAIQHESGILGPLLYGEVGDTLLIIFKNQASRPYNIYPHGITDVRPLYSRRLPKGVKHLKDFPILPGEIFKYKWTVTVEDGPTKSDPRCLTRYYSSFVNMERDLASGLIGPLLICYKESVDQRGNQIMSDKRNVILFSVFDENRSWYLTENIQRFLPNPAGVQLEDPEFQASNIMHSINGYVFDSLQLSVCLHEVAYWYILSIGAQTDFLSVFFSGYTFKHKMVYEDTLTLFPFSGETVFMSMENPGLWILGCHNSDFRNRGMTALLKVSSCDKNTGDYYEDSYEDISAYLLSKNNAIEPRSFSQNPPVLKRHQREITRTTLQSDQEEIDYDDTISVEMKKEDFDIYDEDENQSPRSFQKKTRHYFIAAVERLWDYGMSSSPHVLRNRAQSGSVPQFKKVVFQEFTDGSFTQPLYRGELNEHLGLLGPYIRAEVEDNIMVTFRNQASRPYSFYSSLISYEEDQRQGAEPRKNFVKPNETKTYFWKVQHHMAPTKDEFDCKAWAYFSDVDLEKDVHSGLIGPLLVCHTNTLNPAHGRQVTVQEFALFFTIFDETKSWYFTENMERNCRGAPTSESATPESGPGSEPATSGSETPGTSESATPESGPGSEPATSGSETPGTSESATPESGPGTSTEPSEGSAPGTSESATPESGPGSPAGSPTSTEEGSPAGSPTSTEEGSPAGSPTSTEEGTSESATPESGPGTSTEPSEGSAPGASSAPCNIQMEDPTFKENYRFHAINGYIMDTLPGLVMAQDQRIRWYLLSMGSNENIHSIHFSGHVFTVRKKEEYKMALYNLYPGVFETVEMLPSKAGIWRVECLIGEHLHAGMSTLFLVYSNKCQTPLGMASGHIRDFQITASGQYGQWAPKLARLHYSGSINAWSTKEPFSWIKVDLLAPMIIHGIKTQGARQKFSSLYISQFIIMYSLDGKKWQTYRGNSTGTLMVFFGNVDSSGIKHNIFNPPIIARYIRLHPTHYSIRSTLRMELMGCDLNSCSMPLGMESKAISDAQITASSYFTNMFATWSPSKARLHLQGRSNAWRPQVNNPKEWLQVDFQKTMKVTGVTTQGVKSLLTSMYVKEFLISSSQDGHQWTLFFQNGKVKVFQGNQDSFTPVVNSLDPPLLTRYLRIHPQSWVHQIALRMEVLGCEAQDLYGAGSPGAETAEQKLISEEDLSPATGHHHHHH

SEQ ID NO: 1026 - DNA, 5310 bp, synthetic construct
  misc_feature 1..5310: note = Description of Artificial Sequence: Synthetic polynucleotide
  source 1..5310: mol_type = other DNA
gccaccagaagatactacctgggtgcagtggaactgtcatgggactatatgcaaagtgatctcggtgagctgcctgtggacgcaagatttcctcctagagtgccaaaatcttttccattcaacacctcagtcgtgtacaaaaagactctgtttgtagaattcacggatcaccttttcaacatcgctaagccaaggccaccctggatgggtctgctaggtcctaccatccaggctgaggtttatgatacagtggtcattacacttaagaacatggcttcccatcctgtcagtcttcatgctgttggtgtatcctactggaaagcttctgagggagctgaatatgatgatcagaccagtcaaagggagaaagaagatgataaagtcttccctggtggaagccatacatatgtctggcaggtcctgaaagagaatggtccaatggcctctgacccactgtgccttacctactcatatctttctcatgtggacctggtaaaagacttgaattcaggcctcattggagccctactagtatgtagagaagggagtctggccaaggaaaagacacagaccttgcacaaatttatactactttttgctgtatttgatgaagggaaaagttggcactcagaaacaaagaactccttgatgcaggatagggatgctgcatctgctcgggcctggcctaaaatgcacacagtcaatggttatgtaaacaggtctctgccaggtctgattggatgccacaggaaatcagtctattggcatgtgattggaatgggcaccactcctgaagtgcactcaatattcctcgaaggtcacacatttcttgtgaggaaccatcgccaggctagcttggaaatctcgccaataactttccttactgctcaaacactcttgatggaccttggacagtttctactgttttgtcatatctcttcccaccaacatgatggcatggaagcttatgtcaaagtagacagctgtccagaggaaccccaactacgaatgaaaaataatgaagaagcggaagactatgatgatgatcttactgattctgaaatggatgtggtcaggtttgatgatgacaactctccttcctttatccaaattcgctcagttgccaagaagcatcctaaaacttgggtacattacattgctgctgaagaggaggactgggactatgctcccttagtcctcgcccccgatggcgcgccaggtgcctcgccgggaacatcatcaactggttcacccgggtcatccccctcggcctcaaccgggacgggtcccggctcatcccccagcgccagcactggaacaggtcctggcactcctggttccggtacggcatcgtcatccccgggaagctcaacaccgtccggagcgacaggatcacctggctcgtcaccttcggcgtcaactggaacggggccaggggcctcacccggaacgtcctcgactgggtcgcctggtacgccgggatcaggaacggcctcatcctcgcctgggtcctcaacgccctcgggtgcgactggttcgccgggaactcctggctcggggacggcctcgtcgtcgcctggggcatcaccggggacgagctccacggggtcccctggagcgtcaccggggacctcctcgacaggtagcccggcctcgagcgacagaagttataaaagtcaatatttgaacaatggccctcagcggattggtaggaagtacaaaaaagtccgatttatggcatacacagatgaaacctttaagactcgtgaagctattcagcatgaatcaggaatcttgggacctttactttatggggaagttggagacacactgttgattatatttaagaatcaagcaagcagaccatataacatctaccctcacggaatcactgatgtccgtcctttgtattcaaggagattaccaaaaggtgtaaaacatttgaaggattttccaattctgccaggagaaatattcaaatataaatggacagtgactgtagaagatgggccaactaaatcagatcctcggtgcctgacccgctattactctagtttcgttaatatggagagagatctagcttcaggactcattggccctctcctcatctgctacaaagaatctgtagatcaaagaggaaaccagataatgtcagacaagaggaatgtcatcctgttttctgtatttgatgagaaccgaagctggtacctcacagagaatatacaacgctttctccccaatccagctggagtgcagcttgaggatccagagttccaagcctccaacatcatgcacagcatcaatggctatgtttttgatagtttgcagttgtcagtttgtttgcatgaggtggcatactggtacattctaagcattggagcacagactgacttcctttctgtcttcttctctggatataccttcaaacacaaaatggtctatgaagacacactcaccctattcccattctcaggagaaactgtcttcatgtcgatggaaaacccaggtctatggattctggggtgccacaactcagactttcggaacagaggcatgaccgccttactgaaggtttctagttgtgacaagaacactggtgattattacgaggacagttatgaagatatttcagcatacttgctgagtaaaaacaatgccattgaaccaagaagcttctctcaaaacccaccagtcttgaaacgccatcaacgggaaataactcgtactactcttcagtcagatcaagaggaaatcgattatgatgataccatatcagttgaaatgaagaaggaagattttgacatttatgatgaggatgaaaatcagagcccccgcagctttcaaaagaaaacacgacactattttattgctgcagtggagaggctctgggattatgggatgagtagctccccacatgttctaagaaacagggctcagagtggcagtgtccctcagttcaagaaagttgttttccaggaatttactgatggctcctttactcagcccttataccgtggagaactaaatgaacatttgggactcctggggccatatataagagcagaagttgaagataatatcatggtaactttcagaaatcaggcctctcgtccctattccttctattctagccttatttcttatgaggaagatcagaggcaaggagcagaacctagaaaaaactttgtcaagcctaatgaaaccaaaacttacttttggaaagtgcaacatcatatggcacccactaaagatgagtttgactgcaaagcctgggcttatttctctgatgttgacctggaaaaagatgtgcactcaggcctgattggaccccttctggtctgccacactaacacactgaaccctgctcatgggagacaagtgacagtacaggaatttgctctgtttttcaccatctttgatgagaccaaaagctggtacttcactgaaaatatggaaagaaactgcaggggcgcgccaacgtccgaaagtgctacccctgagtcaggccctggtagtgagcctgccacaagcggaagcgaaactccggggacctcagagtctgccactcccgaatcggggccaggctctgaaccggccacttcagggagcgaaacaccaggaacatcggagagcgctaccccggagagcgggccaggaactagtactgagcctagcgagggaagtgcacctggtacaagcgagtccgccacacccgagtctggccctggctctccagcgggctcacccacgagcactgaagagggctctcccgctggcagcccaacgtcgacagaagaaggatcaccagcaggctcccccacatcaacagaggagggtacatcagaatctgctactcccgagagtggacccggtacctccactgagcccagcgaggggagtgcaccaggtgcctcgagcgctccctgcaatatccagatggaagatcccacttttaaagagaattatcgcttccatgcaatcaatggctacataatggatacactacctggcttagtaatggctcaggatcaaaggattcgatggtatctgctcagcatgggcagcaatgaaaacatccattctattcatttcagtggacatgtgttcactgtacgaaaaaaagaggagtataaaatggcactgtacaatctctatccaggtgtttttgagacagtggaaatgttaccatccaaagctggaatttggcgggtggaatgccttattggcgagcatctacatgctgggatgagcacactttttctggtgtacagcaataagtgtcagactcccctgggaatggcttctggacacattagagattttcagattacagcttcaggacaatatggacagtgggccccaaagctggccagacttcattattccggatcaatcaatgcctggagcaccaaggagcccttttcttggatcaaggtggatctgttggcaccaatgattattcacggcatcaagacccagggtgcccgtcagaagttctccagcctctacatctctcagtttatcatcatgtatagtcttgatgggaagaagtggcagacttatcgaggaaattccactggaaccttaatggtcttctttggcaatgtggattcatctgggataaaacacaatatttttaaccctccaattattgctcgatacatccgtttgcacccaactcattatagcattcgcagcactcttcgcatggagttgatgggctgtgatttaaatagttgcagcatgccattgggaatggagagtaaagcaatatcagatgcacagattactgcttcatcctactttaccaatatgtttgccacctggtctccttcaaaagctcgacttcacctccaagggaggagtaatgcctggagacctcaggtgaataatccaaaagagtggctgcaagtggacttccagaagacaatgaaagtcacaggagtaactactcagggagtaaaatctctgcttaccagcatgtatgtgaaggagttcctcatctccagcagtcaagatggccatcagtggactctcttttttcagaatggcaaagtaaaggtttttcagggaaatcaagactccttcacacctgtggtgaactctctagacccaccgttactgactcgctaccttcgaattcacccccagagttgggtgcaccagattgccctgaggatggaggttctgggctgcgaggcacaggacctctacggcgccggatcacctggggccgaaacggccgaacaaaaactcatctcagaagaggatctgtcacctgcaaccggtcatcatcaccatcaccattga

SEQ ID NO: 1027 - protein, 1769 aa, synthetic construct
  REGION 1..1769: note = Description of Artificial Sequence: Synthetic polypeptide
ATRRYYLGAVELSWDYMQSDLGELPVDARFPPRVPKSFPFNTSVVYKKTLFVEFTDHLFNIAKPRPPWMGLLGPTIQAEVYDTVVITLKNMASHPVSLHAVGVSYWKASEGAEYDDQTSQREKEDDKVFPGGSHTYVWQVLKENGPMASDPLCLTYSYLSHVDLVKDLNSGLIGALLVCREGSLAKEKTQTLHKFILLFAVFDEGKSWHSETKNSLMQDRDAASARAWPKMHTVNGYVNRSLPGLIGCHRKSVYWHVIGMGTTPEVHSIFLEGHTFLVRNHRQASLEISPITFLTAQTLLMDLGQFLLFCHISSHQHDGMEAYVKVDSCPEEPQLRMKNNEEAEDYDDDLTDSEMDVVRFDDDNSPSFIQIRSVAKKHPKTWVHYIAAEEEDWDYAPLVLAPDGAPTSTEPSEGSAPGSPAGSPTSTEEGTSTEPSEGSAPGTSTEPSEGSAPGTSESATPESGPGTSTEPSEGSAPGTSESATPESGPGSEPATSGSETPGTSTEPSEGSAPGTSTEPSEGSAPGTSESATPESGPGTSESATPESGPGASSDRSYKSQYLNNGPQRIGRKYKKVRFMAYTDETFKTREAIQHESGILGPLLYGEVGDTLLIIFKNQASRPYNIYPHGITDVRPLYSRRLPKGVKHLKDFPILPGEIFKYKWTVTVEDGPTKSDPRCLTRYYSSFVNMERDLASGLIGPLLICYKESVDQRGNQIMSDKRNVILFSVFDENRSWYLTENIQRFLPNPAGVQLEDPEFQASNIMHSINGYVFDSLQLSVCLHEVAYWYILSIGAQTDFLSVFFSGYTFKHKMVYEDTLTLFPFSGETVFMSMENPGLWILGCHNSDFRNRGMTALLKVSSCDKNTGDYYEDSYEDISAYLLSKNNAIEPRSFSQNPPVLKRHQREITRTTLQSDQEEIDYDDTISVEMKKEDFDIYDEDENQSPRSFQKKTRHYFIAAVERLWDYGMSSSPHVLRNRAQSGSVPQFKKVVFQEFTDGSFTQPLYRGELNEHLGLLGPYIRAEVEDNIMVTFRNQASRPYSFYSSLISYEEDQRQGAEPRKNFVKPNETKTYFWKVQHHMAPTKDEFDCKAWAYFSDVDLEKDVHSGLIGPLLVCHTNTLNPAHGRQVTVQEFALFFTIFDETKSWYFTENMERNCRGAPTSESATPESGPGSEPATSGSETPGTSESATPESGPGSEPATSGSETPGTSESATPESGPGTSTEPSEGSAPGTSESATPESGPGSPAGSPTSTEEGSPAGSPTSTEEGSPAGSPTSTEEGTSESATPESGPGTSTEPSEGSAPGASSAPCNIQMEDPTFKENYRFHAINGYIMDTLPGLVMAQDQRIRWYLLSMGSNENIHSIHFSGHVFTVRKKEEYKMALYNLYPGVFETVEMLPSKAGIWRVECLIGEHLHAGMSTLFLVYSNKCQTPLGMASGHIRDFQITASGQYGQWAPKLARLHYSGSINAWSTKEPFSWIKVDLLAPMIIHGIKTQGARQKFSSLYISQFIIMYSLDGKKWQTYRGNSTGTLMVFFGNVDSSGIKHNIFNPPIIARYIRLHPTHYSIRSTLRMELMGCDLNSCSMPLGMESKAISDAQITASSYFTNMFATWSPSKARLHLQGRSNAWRPQVNNPKEWLQVDFQKTMKVTGVTTQGVKSLLTSMYVKEFLISSSQDGHQWTLFFQNGKVKVFQGNQDSFTPVVNSLDPPLLTRYLRIHPQSWVHQIALRMEVLGCEAQDLYGAGSPGAETAEQKLISEEDLSPATGHHHHHH

SEQ ID NO: 1028 - DNA, 5310 bp, synthetic construct
  misc_feature 1..5310: note = Description of Artificial Sequence: Synthetic polynucleotide
  source 1..5310: mol_type = other DNA
gccaccagaagatactacctgggtgcagtggaactgtcatgggactatatgcaaagtgatctcggtgagctgcctgtggacgcaagatttcctcctagagtgccaaaatcttttccattcaacacctcagtcgtgtacaaaaagactctgtttgtagaattcacggatcaccttttcaacatcgctaagccaaggccaccctggatgggtctgctaggtcctaccatccaggctgaggtttatgatacagtggtcattacacttaagaacatggcttcccatcctgtcagtcttcatgctgttggtgtatcctactggaaagcttctgagggagctgaatatgatgatcagaccagtcaaagggagaaagaagatgataaagtcttccctggtggaagccatacatatgtctggcaggtcctgaaagagaatggtccaatggcctctgacccactgtgccttacctactcatatctttctcatgtggacctggtaaaagacttgaattcaggcctcattggagccctactagtatgtagagaagggagtctggccaaggaaaagacacagaccttgcacaaatttatactactttttgctgtatttgatgaagggaaaagttggcactcagaaacaaagaactccttgatgcaggatagggatgctgcatctgctcgggcctggcctaaaatgcacacagtcaatggttatgtaaacaggtctctgccaggtctgattggatgccacaggaaatcagtctattggcatgtgattggaatgggcaccactcctgaagtgcactcaatattcctcgaaggtcacacatttcttgtgaggaaccatcgccaggctagcttggaaatctcgccaataactttccttactgctcaaacactcttgatggaccttggacagtttctactgttttgtcatatctcttcccaccaacatgatggcatggaagcttatgtcaaagtagacagctgtccagaggaaccccaactacgaatgaaaaataatgaagaagcggaagactatgatgatgatcttactgattctgaaatggatgtggtcaggtttgatgatgacaactctccttcctttatccaaattcgctcagttgccaagaagcatcctaaaacttgggtacattacattgctgctgaagaggaggactgggactatgctcccttagtcctcgcccccgatggcgcgccaaccagtacggagccgtccgaggggagcgcaccaggaagcccggctgggagcccgacttctaccgaagagggtacatctaccgaaccaagtgaaggttcagcaccaggcacctcaacagaaccctctgagggctcggcgcctggtacaagtgagtccgccaccccagaatccgggcctgggacaagcacagaaccttcggaagggagtgcccctggaacatccgaatcggcaaccccagaatcagggccaggatctgagcccgcgacttcgggctccgagacgcctgggacatccaccgagccctccgaaggatcagccccaggcaccagcacggagccctctgagggaagcgcacctggtaccagcgaaagcgcaactcccgaatcaggtcccggtacgagcgagtcggcgaccccggagagcgggccaggtgcctcgagcgacagaagttataaaagtcaatatttgaacaatggccctcagcggattggtaggaagtacaaaaaagtccgatttatggcatacacagatgaaacctttaagactcgtgaagctattcagcatgaatcaggaatcttgggacctttactttatggggaagttggagacacactgttgattatatttaagaatcaagcaagcagaccatataacatctaccctcacggaatcactgatgtccgtcctttgtattcaaggagattaccaaaaggtgtaaaacatttgaaggattttccaattctgccaggagaaatattcaaatataaatggacagtgactgtagaagatgggccaactaaatcagatcctcggtgcctgacccgctattactctagtttcgttaatatggagagagatctagcttcaggactcattggccctctcctcatctgctacaaagaatctgtagatcaaagaggaaaccagataatgtcagacaagaggaatgtcatcctgttttctgtatttgatgagaaccgaagctggtacctcacagagaatatacaacgctttctccccaatccagctggagtgcagcttgaggatccagagttccaagcctccaacatcatgcacagcatcaatggctatgtttttgatagtttgcagttgtcagtttgtttgcatgaggtggcatactggtacattctaagcattggagcacagactgacttcctttctgtcttcttctctggatataccttcaaacacaaaatggtctatgaagacacactcaccctattcccattctcaggagaaactgtcttcatgtcgatggaaaacccaggtctatggattctggggtgccacaactcagactttcggaacagaggcatgaccgccttactgaaggtttctagttgtgacaagaacactggtgattattacgaggacagttatgaagatatttcagcatacttgctgagtaaaaacaatgccattgaaccaagaagcttctctcaaaacccaccagtcttgaaacgccatcaacgggaaataactcgtactactcttcagtcagatcaagaggaaatcgattatgatgataccatatcagttgaaatgaagaaggaagattttgacatttatgatgaggatgaaaatcagagcccccgcagctttcaaaagaaaacacgacactattttattgctgcagtggagaggctctgggattatgggatgagtagctccccacatgttctaagaaacagggctcagagtggcagtgtccctcagttcaagaaagttgttttccaggaatttactgatggctcctttactcagcccttataccgtggagaactaaatgaacatttgggactcctggggccatatataagagcagaagttgaagataatatcatggtaactttcagaaatcaggcctctcgtccctattccttctattctagccttatttcttatgaggaagatcagaggcaaggagcagaacctagaaaaaactttgtcaagcctaatgaaaccaaaacttacttttggaaagtgcaacatcatatggcacccactaaagatgagtttgactgcaaagcctgggcttatttctctgatgttgacctggaaaaagatgtgcactcaggcctgattggaccccttctggtctgccacactaacacactgaaccctgctcatgggagacaagtgacagtacaggaatttgctctgtttttcaccatctttgatgagaccaaaagctggtacttcactgaaaatatggaaagaaactgcaggggcgcgccaacgtccgaaagtgctacccctgagtcaggccctggtagtgagcctgccacaagcggaagcgaaactccggggacctcagagtctgccactcccgaatcggggccaggctctgaaccggccacttcagggagcgaaacaccaggaacatcggagagcgctaccccggagagcgggccaggaactagtactgagcctagcgagggaagtgcacctggtacaagcgagtccgccacacccgagtctggccctggctctccagcgggctcacccacgagcactgaagagggctctcccgctggcagcccaacgtcgacagaagaaggatcaccagcaggctcccccacatcaacagaggagggtacatcagaatctgctactcccgagagtggacccggtacctccactgagcccagcgaggggagtgcaccaggtgcctcgagcgctccctgcaatatccagatggaagatcccacttttaaagagaattatcgcttccatgcaatcaatggctacataatggatacactacctggcttagtaatggctcaggatcaaaggattcgatggtatctgctcagcatgggcagcaatgaaaacatccattctattcatttcagtggacatgtgttcactgtacgaaaaaaagaggagtataaaatggcactgtacaatctctatccaggtgtttttgagacagtggaaatgttaccatccaaagctggaatttggcgggtggaatgccttattggcgagcatctacatgctgggatgagcacactttttctggtgtacagcaataagtgtcagactcccctgggaatggcttctggacacattagagattttcagattacagcttcaggacaatatggacagtgggccccaaagctggccagacttcattattccggatcaatcaatgcctggagcaccaaggagcccttttcttggatcaaggtggatctgttggcaccaatgattattcacggcatcaagacccagggtgcccgtcagaagttctccagcctctacatctctcagtttatcatcatgtatagtcttgatgggaagaagtggcagacttatcgaggaaattccactggaaccttaatggtcttctttggcaatgtggattcatctgggataaaacacaatatttttaaccctccaattattgctcgatacatccgtttgcacccaactcattatagcattcgcagcactcttcgcatggagttgatgggctgtgatttaaatagttgcagcatgccattgggaatggagagtaaagcaatatcagatgcacagattactgcttcatcctactttaccaatatgtttgccacctggtctccttcaaaagctcgacttcacctccaagggaggagtaatgcctggagacctcaggtgaataatccaaaagagtggctgcaagtggacttccagaagacaatgaaagtcacaggagtaactactcagggagtaaaatctctgcttaccagcatgtatgtgaaggagttcctcatctccagcagtcaagatggccatcagtggactctcttttttcagaatggcaaagtaaaggtttttcagggaaatcaagactccttcacacctgtggtgaactctctagacccaccgttactgactcgctaccttcgaattcacccccagagttgggtgcaccagattgccctgaggatggaggttctgggctgcgaggcacaggacctctacggcgccggatcacctggggccgaaacggccgaacaaaaactcatctcagaagaggatctgtcacctgcaaccggtcatcatcaccatcaccattga

SEQ ID NO: 1029 - protein, 1769 aa, synthetic construct
  REGION 1..1769: note = Description of Artificial Sequence: Synthetic polypeptide
ATRRYYLGAVELSWDYMQSDLGELPVDARFPPRVPKSFPFNTSVVYKKTLFVEFTDHLFNIAKPRPPWMGLLGPTIQAEVYDTVVITLKNMASHPVSLHAVGVSYWKASEGAEYDDQTSQREKEDDKVFPGGSHTYVWQVLKENGPMASDPLCLTYSYLSHVDLVKDLNSGLIGALLVCREGSLAKEKTQTLHKFILLFAVFDEGKSWHSETKNSLMQDRDAASARAWPKMHTVNGYVNRSLPGLIGCHRKSVYWHVIGMGTTPEVHSIFLEGHTFLVRNHRQASLEISPITFLTAQTLLMDLGQFLLFCHISSHQHDGMEAYVKVDSCPEEPQLRMKNNEEAEDYDDDLTDSEMDVVRFDDDNSPSFIQIRSVAKKHPKTWVHYIAAEEEDWDYAPLVGAPTSTEPSEGSAPGSPAGSPTSTEEGTSTEPSEGSAPGTSTEPSEGSAPGTSESATPESGPGTSTEPSEGSAPGTSESATPESGPGSEPATSGSETPGTSTEPSEGSAPGTSTEPSEGSAPGTSESATPESGPGTSESATPESGPGASSLAPDDRSYKSQYLNNGPQRIGRKYKKVRFMAYTDETFKTREAIQHESGILGPLLYGEVGDTLLIIFKNQASRPYNIYPHGITDVRPLYSRRLPKGVKHLKDFPILPGEIFKYKWTVTVEDGPTKSDPRCLTRYYSSFVNMERDLASGLIGPLLICYKESVDQRGNQIMSDKRNVILFSVFDENRSWYLTENIQRFLPNPAGVQLEDPEFQASNIMHSINGYVFDSLQLSVCLHEVAYWYILSIGAQTDFLSVFFSGYTFKHKMVYEDTLTLFPFSGETVFMSMENPGLWILGCHNSDFRNRGMTALLKVSSCDKNTGDYYEDSYEDISAYLLSKNNAIEPRSFSQNPPVLKRHQREITRTTLQSDQEEIDYDDTISVEMKKEDFDIYDEDENQSPRSFQKKTRHYFIAAVERLWDYGMSSSPHVLRNRAQSGSVPQFKKVVFQEFTDGSFTQPLYRGELNEHLGLLGPYIRAEVEDNIMVTFRNQASRPYSFYSSLISYEEDQRQGAEPRKNFVKPNETKTYFWKVQHHMAPTKDEFDCKAWAYFSDVDLEKDVHSGLIGPLLVCHTNTLNPAHGRQVTVQEFALFFTIFDETKSWYFTENMERNCRAPCNIGAPGTPGSGTASSSPGASPGTSSTGSPGASPGTSSTGSPGASPGTSSTGSPGSSPSASTGTGPGTPGSGTASSSPGASPGTSSTGSPGASPGTSSTGSPGASPGTSSTGSPGSSTPSGATGSPGSSTPSGATGSPGASPGTSSTGSPASSQMEDPTFKENYRFHAINGYIMDTLPGLVMAQDQRIRWYLLSMGSNENIHSIHFSGHVFTVRKKEEYKMALYNLYPGVFETVEMLPSKAGIWRVECLIGEHLHAGMSTLFLVYSNKCQTPLGMASGHIRDFQITASGQYGQWAPKLARLHYSGSINAWSTKEPFSWIKVDLLAPMIIHGIKTQGARQKFSSLYISQFIIMYSLDGKKWQTYRGNSTGTLMVFFGNVDSSGIKHNIFNPPIIARYIRLHPTHYSIRSTLRMELMGCDLNSCSMPLGMESKAISDAQITASSYFTNMFATWSPSKARLHLQGRSNAWRPQVNNPKEWLQVDFQKTMKVTGVTTQGVKSLLTSMYVKEFLISSSQDGHQWTLFFQNGKVKVFQGNQDSFTPVVNSLDPPLLTRYLRIHPQSWVHQIALRMEVLGCEAQDLYGAGSPGAETAEQKLISEEDLSPATGHHHHHH

SEQ ID NO: 1030 - DNA, 5310 bp, synthetic construct
  misc_feature 1..5310: note = Description of Artificial Sequence: Synthetic polynucleotide
  source 1..5310: mol_type = other DNA
gccaccagaagatactacctgggtgcagtggaactgtcatgggactatatgcaaagtgatctcggtgagctgcctgtggacgcaagatttcctcctagagtgccaaaatcttttccattcaacacctcagtcgtgtacaaaaagactctgtttgtagaattcacggatcaccttttcaacatcgctaagccaaggccaccctggatgggtctgctaggtcctaccatccaggctgaggtttatgatacagtggtcattacacttaagaacatggcttcccatcctgtcagtcttcatgctgttggtgtatcctactggaaagcttctgagggagctgaatatgatgatcagaccagtcaaagggagaaagaagatgataaagtcttccctggtggaagccatacatatgtctggcaggtcctgaaagagaatggtccaatggcctctgacccactgtgccttacctactcatatctttctcatgtggacctggtaaaagacttgaattcaggcctcattggagccctactagtatgtagagaagggagtctggccaaggaaaagacacagaccttgcacaaatttatactactttttgctgtatttgatgaagggaaaagttggcactcagaaacaaagaactccttgatgcaggatagggatgctgcatctgctcgggcctggcctaaaatgcacacagtcaatggttatgtaaacaggtctctgccaggtctgattggatgccacaggaaatcagtctattggcatgtgattggaatgggcaccactcctgaagtgcactcaatattcctcgaaggtcacacatttcttgtgaggaaccatcgccaggctagcttggaaatctcgccaataactttccttactgctcaaacactcttgatggaccttggacagtttctactgttttgtcatatctcttcccaccaacatgatggcatggaagcttatgtcaaagtagacagctgtccagaggaaccccaactacgaatgaaaaataatgaagaagcggaagactatgatgatgatcttactgattctgaaatggatgtggtcaggtttgatgatgacaactctccttcctttatccaaattcgctcagttgccaagaagcatcctaaaacttgggtacattacattgctgctgaagaggaggactgggactatgctcccttagtcggcgcgccaaccagtacggagccgtccgaggggagcgcaccaggaagcccggctgggagcccgacttctaccgaagagggtacatctaccgaaccaagtgaaggttcagcaccaggcacctcaacagaaccctctgagggctcggcgcctggtacaagtgagtccgccaccccagaatccgggcctgggacaagcacagaaccttcggaagggagtgcccctggaacatccgaatcggcaaccccagaatcagggccaggatctgagcccgcgacttcgggctccgagacgcctgggacatccaccgagccctccgaaggatcagccccaggcaccagcacggagccctctgagggaagcgcacctggtaccagcgaaagcgcaactcccgaatcaggtcccggtacgagcgagtcggcgaccccggagagcgggccaggtgcctcgagcctcgcccccgatgacagaagttataaaagtcaatatttgaacaatggccctcagcggattggtaggaagtacaaaaaagtccgatttatggcatacacagatgaaacctttaagactcgtgaagctattcagcatgaatcaggaatcttgggacctttactttatggggaagttggagacacactgttgattatatttaagaatcaagcaagcagaccatataacatctaccctcacggaatcactgatgtccgtcctttgtattcaaggagattaccaaaaggtgtaaaacatttgaaggattttccaattctgccaggagaaatattcaaatataaatggacagtgactgtagaagatgggccaactaaatcagatcctcggtgcctgacccgctattactctagtttcgttaatatggagagagatctagcttcaggactcattggccctctcctcatctgctacaaagaatctgtagatcaaagaggaaaccagataatgtcagacaagaggaatgtcatcctgttttctgtatttgatgagaaccgaagctggtacctcacagagaatatacaacgctttctccccaatccagctggagtgcagcttgaggatccagagttccaagcctccaacatcatgcacagcatcaatggctatgtttttgatagtttgcagttgtcagtttgtttgcatgaggtggcatactggtacattctaagcattggagcacagactgacttcctttctgtcttcttctctggatataccttcaaacacaaaatggtctatgaagacacactcaccctattcccattctcaggagaaactgtcttcatgtcgatggaaaacccaggtctatggattctggggtgccacaactcagactttcggaacagaggcatgaccgccttactgaaggtttctagttgtgacaagaacactggtgattattacgaggacagttatgaagatatttcagcatacttgctgagtaaaaacaatgccattgaaccaagaagcttctctcaaaacccaccagtcttgaaacgccatcaacgggaaataactcgtactactcttcagtcagatcaagaggaaatcgattatgatgataccatatcagttgaaatgaagaaggaagattttgacatttatgatgaggatgaaaatcagagcccccgcagctttcaaaagaaaacacgacactattttattgctgcagtggagaggctctgggattatgggatgagtagctccccacatgttctaagaaacagggctcagagtggcagtgtccctcagttcaagaaagttgttttccaggaatttactgatggctcctttactcagcccttataccgtggagaactaaatgaacatttgggactcctggggccatatataagagcagaagttgaagataatatcatggtaactttcagaaatcaggcctctcgtccctattccttctattctagccttatttcttatgaggaagatcagaggcaaggagcagaacctagaaaaaactttgtcaagcctaatgaaaccaaaacttacttttggaaagtgcaacatcatatggcacccactaaagatgagtttgactgcaaagcctgggcttatttctctgatgttgacctggaaaaagatgtgcactcaggcctgattggaccccttctggtctgccacactaacacactgaaccctgctcatgggagacaagtgacagtacaggaatttgctctgtttttcaccatctttgatgagaccaaaagctggtacttcactgaaaatatggaaagaaactgcagggctccctgcaatatcggcgcgccaggtacacccggatcgggtacagcgtcatcgagccccggtgcgtcacctggtacgtcgagcacggggtcgccaggggcgtcccctgggacgtcctcaacaggctcgcccggtgcgtcacccggcacgtcgtccacgggttcacctggtagctccccttccgcgtccactggcaccgggcctggaactccggggagcggcacagcgagctcgtcgccgggagcatcgcctgggacatcgagcaccgggtcgccaggagcatcgcccggaacatccagcacaggaagccccggcgcgtcgcccgggacatcaagcacaggttccccgggatcgagcacgccgtccggagccactggatcaccagggagctcgacaccttccggcgcaacgggatcgcccggagccagcccgggtacgtcaagcactggctcccctgcctcgagccagatggaagatcccacttttaaagagaattatcgcttccatgcaatcaatggctacataatggatacactacctggcttagtaatggctcaggatcaaaggattcgatggtatctgctcagcatgggcagcaatgaaaacatccattctattcatttcagtggacatgtgttcactgtacgaaaaaaagaggagtataaaatggcactgtacaatctctatccaggtgtttttgagacagtggaaatgttaccatccaaagctggaatttggcgggtggaatgccttattggcgagcatctacatgctgggatgagcacactttttctggtgtacagcaataagtgtcagactcccctgggaatggcttctggacacattagagattttcagattacagcttcaggacaatatggacagtgggccccaaagctggccagacttcattattccggatcaatcaatgcctggagcaccaaggagcccttttcttggatcaaggtggatctgttggcaccaatgattattcacggcatcaagacccagggtgcccgtcagaagttctccagcctctacatctctcagtttatcatcatgtatagtcttgatgggaagaagtggcagacttatcgaggaaattccactggaaccttaatggtcttctttggcaatgtggattcatctgggataaaacacaatatttttaaccctccaattattgctcgatacatccgtttgcacccaactcattatagcattcgcagcactcttcgcatggagttgatgggctgtgatttaaatagttgcagcatgccattgggaatggagagtaaagcaatatcagatgcacagattactgcttcatcctactttaccaatatgtttgccacctggtctccttcaaaagctcgacttcacctccaagggaggagtaatgcctggagacctcaggtgaataatccaaaagagtggctgcaagtggacttccagaagacaatgaaagtcacaggagtaactactcagggagtaaaatctctgcttaccagcatgtatgtgaaggagttcctcatctccagcagtcaagatggccatcagtggactctcttttttcagaatggcaaagtaaaggtttttcagggaaatcaagactccttcacacctgtggtgaactctctagacccaccgttactgactcgctaccttcgaattcacccccagagttgggtgcaccagattgccctgaggatggaggttctgggctgcgaggcacaggacctctacggcgccggatcacctggggccgaaacggccgaacaaaaactcatctcagaagaggatctgtcacctgcaaccggtcatcatcaccatcaccattga

SEQ ID NO: 1031 - protein, 1769 aa, synthetic construct
  REGION 1..1769: note = Description of Artificial Sequence: Synthetic polypeptide
ATRRYYLGAVELSWDYMQSDLGELPVDARFPPRVPKSFPFNTSVVYKKTLFVEFTDHLFNIAKPRPPWMGLLGPTIQAEVYDTVVITLKNMASHPVSLHAVGVSYWKASEGAEYDDQTSQREKEDDKVFPGGSHTYVWQVLKENGPMASDPLCLTYSYLSHVDLVKDLNSGLIGALLVCREGSLAKEKTQTLHKFILLFAVFDEGKSWHSETKNSLMQDRDAASARAWPKMHTVNGYVNRSLPGLIGCHRKSVYWHVIGMGTTPEVHSIFLEGHTFLVRNHRQASLEISPITFLTAQTLLMDLGQFLLFCHISSHQHDGMEAYVKVDSCPEEPQLRMKNNEEAEDYDDDLTDSEMDVVRFDDDNSPSFIQIRSVAKKHPKTWVHYIAAEEEDWDYAPLVLAPDGAPTSTEPSEGSAPGSPAGSPTSTEEGTSTEPSEGSAPGTSTEPSEGSAPGTSESATPESGPGTSTEPSEGSAPGTSESATPESGPGSEPATSGSETPGTSTEPSEGSAPGTSTEPSEGSAPGTSESATPESGPGTSESATPESGPGASSDRSYKSQYLNNGPQRIGRKYKKVRFMAYTDETFKTREAIQHESGILGPLLYGEVGDTLLIIFKNQASRPYNIYPHGITDVRPLYSRRLPKGVKHLKDFPILPGEIFKYKWTVTVEDGPTKSDPRCLTRYYSSFVNMERDLASGLIGPLLICYKESVDQRGNQIMSDKRNVILFSVFDENRSWYLTENIQRFLPNPAGVQLEDPEFQASNIMHSINGYVFDSLQLSVCLHEVAYWYILSIGAQTDFLSVFFSGYTFKHKMVYEDTLTLFPFSGETVFMSMENPGLWILGCHNSDFRNRGMTALLKVSSCDKNTGDYYEDSYEDISAYLLSKNNAIEPRSFSQNPPVLKRHQREITRTTLQSDQEEIDYDDTISVEMKKEDFDIYDEDENQSPRSFQKKTRHYFIAAVERLWDYGMSSSPHVLRNRAQSGSVPQFKKVVFQEFTDGSFTQPLYRGELNEHLGLLGPYIRAEVEDNIMVTFRNQASRPYSFYSSLISYEEDQRQGAEPRKNFVKPNETKTYFWKVQHHMAPTKDEFDCKAWAYFSDVDLEKDVHSGLIGPLLVCHTNTLNPAHGRQVTVQEFALFFTIFDETKSWYFTENMERNCRAPCNIGAPGTPGSGTASSSPGASPGTSSTGSPGASPGTSSTGSPGASPGTSSTGSPGSSPSASTGTGPGTPGSGTASSSPGASPGTSSTGSPGASPGTSSTGSPGASPGTSSTGSPGSSTPSGATGSPGSSTPSGATGSPGASPGTSSTGSPASSQMEDPTFKENYRFHAINGYIMDTLPGLVMAQDQRIRWYLLSMGSNENIHSIHFSGHVFTVRKKEEYKMALYNLYPGVFETVEMLPSKAGIWRVECLIGEHLHAGMSTLFLVYSNKCQTPLGMASGHIRDFQITASGQYGQWAPKLARLHYSGSINAWSTKEPFSWIKVDLLAPMIIHGIKTQGARQKFSSLYISQFIIMYSLDGKKWQTYRGNSTGTLMVFFGNVDSSGIKHNIFNPPIIARYIRLHPTHYSIRSTLRMELMGCDLNSCSMPLGMESKAISDAQITASSYFTNMFATWSPSKARLHLQGRSNAWRPQVNNPKEWLQVDFQKTMKVTGVTTQGVKSLLTSMYVKEFLISSSQDGHQWTLFFQNGKVKVFQGNQDSFTPVVNSLDPPLLTRYLRIHPQSWVHQIALRMEVLGCEAQDLYGAGSPGAETAEQKLISEEDLSPATGHHHHHH

SEQ ID NO: 1032 - DNA, 5310 bp, synthetic construct
  misc_feature 1..5310: note = Description of Artificial Sequence: Synthetic polynucleotide
  source 1..5310: mol_type = other DNA
gccaccagaagatactacctgggtgcagtggaactgtcatgggactatatgcaaagtgatctcggtgagctgcctgtggacgcaagatttcctcctagagtgccaaaatcttttccattcaacacctcagtcgtgtacaaaaagactctgtttgtagaattcacggatcaccttttcaacatcgctaagccaaggccaccctggatgggtctgctaggtcctaccatccaggctgaggtttatgatacagtggtcattacacttaagaacatggcttcccatcctgtcagtcttcatgctgttggtgtatcctactggaaagcttctgagggagctgaatatgatgatcagaccagtcaaagggagaaagaagatgataaagtcttccctggtggaagccatacatatgtctggcaggtcctgaaagagaatggtccaatggcctctgacccactgtgccttacctactcatatctttctcatgtggacctggtaaaagacttgaattcaggcctcattggagccctactagtatgtagagaagggagtctggccaaggaaaagacacagaccttgcacaaatttatactactttttgctgtatttgatgaagggaaaagttggcactcagaaacaaagaactccttgatgcaggatagggatgctgcatctgctcgggcctggcctaaaatgcacacagtcaatggttatgtaaacaggtctctgccaggtctgattggatgccacaggaaatcagtctattggcatgtgattggaatgggcaccactcctgaagtgcactcaatattcctcgaaggtcacacatttcttgtgaggaaccatcgccaggctagcttggaaatctcgccaataactttccttactgctcaaacactcttgatggaccttggacagtttctactgttttgtcatatctcttcccaccaacatgatggcatggaagcttatgtcaaagtagacagctgtccagaggaaccccaactacgaatgaaaaataatgaagaagcggaagactatgatgatgatcttactgattctgaaatggatgtggtcaggtttgatgatgacaactctccttcctttatccaaattcgctcagttgccaagaagcatcctaaaacttgggtacattacattgctgctgaagaggaggactgggactatgctcccttagtcctcgcccccgatggcgcgccaaccagtacggagccgtccgaggggagcgcaccaggaagcccggctgggagcccgacttctaccgaagagggtacatctaccgaaccaagtgaaggttcagcaccaggcacctcaacagaaccctctgagggctcggcgcctggtacaagtgagtccgccaccccagaatccgggcctgggacaagcacagaaccttcggaagggagtgcccctggaacatccgaatcggcaaccccagaatcagggccaggatctgagcccgcgacttcgggctccgagacgcctgggacatccaccgagccctccgaaggatcagccccaggcaccagcacggagccctctgagggaagcgcacctggtaccagcgaaagcgcaactcccgaatcaggtcccggtacgagcgagtcggcgaccccggagagcgggccaggtgcctcgagcgacagaagttataaaagtcaatatttgaacaatggccctcagcggattggtaggaagtacaaaaaagtccgatttatggcatacacagatgaaacctttaagactcgtgaagctattcagcatgaatcaggaatcttgggacctttactttatggggaagttggagacacactgttgattatatttaagaatcaagcaagcagaccatataacatctaccctcacggaatcactgatgtccgtcctttgtattcaaggagattaccaaaaggtgtaaaacatttgaaggattttccaattctgccaggagaaatattcaaatataaatggacagtgactgtagaagatgggccaactaaatcagatcctcggtgcctgacccgctattactctagtttcgttaatatggagagagatctagcttcaggactcattggccctctcctcatctgctacaaagaatctgtagatcaaagaggaaaccagataatgtcagacaagaggaatgtcatcctgttttctgtatttgatgagaaccgaagctggtacctcacagagaatatacaacgctttctccccaatccagctggagtgcagcttgaggatccagagttccaagcctccaacatcatgcacagcatcaatggctatgtttttgatagtttgcagttgtcagtttgtttgcatgaggtggcatactggtacattctaagcattggagcacagactgacttcctttctgtcttcttctctggatataccttcaaacacaaaatggtctatgaagacacactcaccctattcccattctcaggagaaactgtcttcatgtcgatggaaaacccaggtctatggattctggggtgccacaactcagactttcggaacagaggcatgaccgccttactgaaggtttctagttgtgacaagaacactggtgattattacgaggacagttatgaagatatttcagcatacttgctgagtaaaaacaatgccattgaaccaagaagcttctctcaaaacccaccagtcttgaaacgccatcaacgggaaataactcgtactactcttcagtcagatcaagaggaaatcgattatgatgataccatatcagttgaaatgaagaaggaagattttgacatttatgatgaggatgaaaatcagagcccccgcagctttcaaaagaaaacacgacactattttattgctgcagtggagaggctctgggattatgggatgagtagctccccacatgttctaagaaacagggctcagagtggcagtgtccctcagttcaagaaagttgttttccaggaatttactgatggctcctttactcagcccttataccgtggagaactaaatgaacatttgggactcctggggccatatataagagcagaagttgaagataatatcatggtaactttcagaaatcaggcctctcgtccctattccttctattctagccttatttcttatgaggaagatcagaggcaaggagcagaacctagaaaaaactttgtcaagcctaatgaaaccaaaacttacttttggaaagtgcaacatcatatggcacccactaaagatgagtttgactgcaaagcctgggcttatttctctgatgttgacctggaaaaagatgtgcactcaggcctgattggaccccttctggtctgccacactaacacactgaaccctgctcatgggagacaagtgacagtacaggaatttgctctgtttttcaccatctttgatgagaccaaaagctggtacttcactgaaaatatggaaagaaactgcagggctccctgcaatatcggcgcgccaggtacacccggatcgggtacagcgtcatcgagccccggtgcgtcacctggtacgtcgagcacggggtcgccaggggcgtcccctgggacgtcctcaacaggctcgcccggtgcgtcacccggcacgtcgtccacgggttcacctggtagctccccttccgcgtccactggcaccgggcctggaactccggggagcggcacagcgagctcgtcgccgggagcatcgcctgggacatcgagcaccgggtcgccaggagcatcgcccggaacatccagcacaggaagccccggcgcgtcgcccgggacatcaagcacaggttccccgggatcgagcacgccgtccggagccactggatcaccagggagctcgacaccttccggcgcaacgggatcgcccggagccagcccgggtacgtcaagcactggctcccctgcctcgagccagatggaagatcccacttttaaagagaattatcgcttccatgcaatcaatggctacataatggatacactacctggcttagtaatggctcaggatcaaaggattcgatggtatctgctcagcatgggcagcaatgaaaacatccattctattcatttcagtggacatgtgttcactgtacgaaaaaaagaggagtataaaatggcactgtacaatctctatccaggtgtttttgagacagtggaaatgttaccatccaaagctggaatttggcgggtggaatgccttattggcgagcatctacatgctgggatgagcacactttttctggtgtacagcaataagtgtcagactcccctgggaatggcttctggacacattagagattttcagattacagcttcaggacaatatggacagtgggccccaaagctggccagacttcattattccggatcaatcaatgcctggagcaccaaggagcccttttcttggatcaaggtggatctgttggcaccaatgattattcacggcatcaagacccagggtgcccgtcagaagttctccagcctctacatctctcagtttatcatcatgtatagtcttgatgggaagaagtggcagacttatcgaggaaattccactggaaccttaatggtcttctttggcaatgtggattcatctgggataaaacacaatatttttaaccctccaattattgctcgatacatccgtttgcacccaactcattatagcattcgcagcactcttcgcatggagttgatgggctgtgatttaaatagttgcagcatgccattgggaatggagagtaaagcaatatcagatgcacagattactgcttcatcctactttaccaatatgtttgccacctggtctccttcaaaagctcgacttcacctccaagggaggagtaatgcctggagacctcaggtgaataatccaaaagagtggctgcaagtggacttccagaagacaatgaaagtcacaggagtaactactcagggagtaaaatctctgcttaccagcatgtatgtgaaggagttcctcatctccagcagtcaagatggccatcagtggactctcttttttcagaatggcaaagtaaaggtttttcagggaaatcaagactccttcacacctgtggtgaactctctagacccaccgttactgactcgctaccttcgaattcacccccagagttgggtgcaccagattgccctgaggatggaggttctgggctgcgaggcacaggacctctacggcgccggatcacctggggccgaaacggccgaacaaaaactcatctcagaagaggatctgtcacctgcaaccggtcatcatcaccatcaccattga

SEQ ID NO: 1033 - protein, 1769 aa, synthetic construct
  REGION 1..1769: note = Description of Artificial Sequence: Synthetic polypeptide
ATRRYYLGAVELSWDYMQSDLGELPVDARFPPRVPKSFPFNTSVVYKKTLFVEFTDHLFNIAKPRPPWMGLLGPTIQAEVYDTVVITLKNMASHPVSLHAVGVSYWKASEGAEYDDQTSQREKEDDKVFPGGSHTYVWQVLKENGPMASDPLCLTYSYLSHVDLVKDLNSGLIGALLVCREGSLAKEKTQTLHKFILLFAVFDEGKSWHSETKNSLMQDRDAASARAWPKMHTVNGYVNRSLPGLIGCHRKSVYWHVIGMGTTPEVHSIFLEGHTFLVRNHRQASLEISPITFLTAQTLLMDLGQFLLFCHISSHQHDGMEAYVKVDSCPEEPQLRMKNNEEAEDYDDDLTDSEMDVVRFDDDNSPSFIQIRSVAKKHPKTWVHYIAAEEEDWDYAPLVLAPDGAPGASPGTSSTGSPGSSPSASTGTGPGSSPSASTGTGPGTPGSGTASSSPGSSTPSGATGSPGSSPSASTGTGPGASPGTSSTGSPGTPGSGTASSSPGSSTPSGATGSPGTPGSGTASSSPGASPGTSSTGSPGASPGTSSTGSPASSDRSYKSQYLNNGPQRIGRKYKKVRFMAYTDETFKTREAIQHESGILGPLLYGEVGDTLLIIFKNQASRPYNIYPHGITDVRPLYSRRLPKGVKHLKDFPILPGEIFKYKWTVTVEDGPTKSDPRCLTRYYSSFVNMERDLASGLIGPLLICYKESVDQRGNQIMSDKRNVILFSVFDENRSWYLTENIQRFLPNPAGVQLEDPEFQASNIMHSINGYVFDSLQLSVCLHEVAYWYILSIGAQTDFLSVFFSGYTFKHKMVYEDTLTLFPFSGETVFMSMENPGLWILGCHNSDFRNRGMTALLKVSSCDKNTGDYYEDSYEDISAYLLSKNNAIEPRSFSQNPPVLKRHQREITRTTLQSDQEEIDYDDTISVEMKKEDFDIYDEDENQSPRSFQKKTRHYFIAAVERLWDYGMSSSPHVLRNRAQSGSVPQFKKVVFQEFTDGSFTQPLYRGELNEHLGLLGPYIRAEVEDNIMVTFRNQASRPYSFYSSLISYEEDQRQGAEPRKNFVKPNETKTYFWKVQHHMAPTKDEFDCKAWAYFSDVDLEKDVHSGLIGPLLVCHTNTLNPAHGRQVTVQEFALFFTIFDETKSWYFTENMERNCRAPCNIQMEDPGAPGTPGSGTASSSPGASPGTSSTGSPGASPGTSSTGSPGASPGTSSTGSPGSSPSASTGTGPGTPGSGTASSSPGASPGTSSTGSPGASPGTSSTGSPGASPGTSSTGSPGSSTPSGATGSPGSSTPSGATGSPGASPGTSSTGSPASSTFKENYRFHAINGYIMDTLPGLVMAQDQRIRWYLLSMGSNENIHSIHFSGHVFTVRKKEEYKMALYNLYPGVFETVEMLPSKAGIWRVECLIGEHLHAGMSTLFLVYSNKCQTPLGMASGHIRDFQITASGQYGQWAPKLARLHYSGSINAWSTKEPFSWIKVDLLAPMIIHGIKTQGARQKFSSLYISQFIIMYSLDGKKWQTYRGNSTGTLMVFFGNVDSSGIKHNIFNPPIIARYIRLHPTHYSIRSTLRMELMGCDLNSCSMPLGMESKAISDAQITASSYFTNMFATWSPSKARLHLQGRSNAWRPQVNNPKEWLQVDFQKTMKVTGVTTQGVKSLLTSMYVKEFLISSSQDGHQWTLFFQNGKVKVFQGNQDSFTPVVNSLDPPLLTRYLRIHPQSWVHQIALRMEVLGCEAQDLYGAGSPGAETAEQKLISEEDLSPATGHHHHHH

SEQ ID NO: 1034 - DNA, 5310 bp, synthetic construct
  misc_feature 1..5310: note = Description of Artificial Sequence: Synthetic polynucleotide
  source 1..5310: mol_type = other DNA
gccaccagaagatactacctgggtgcagtggaactgtcatgggactatatgcaaagtgatctcggtgagctgcctgtggacgcaagatttcctcctagagtgccaaaatcttttccattcaacacctcagtcgtgtacaaaaagactctgtttgtagaattcacggatcaccttttcaacatcgctaagccaaggccaccctggatgggtctgctaggtcctaccatccaggctgaggtttatgatacagtggtcattacacttaagaacatggcttcccatcctgtcagtcttcatgctgttggtgtatcctactggaaagcttctgagggagctgaatatgatgatcagaccagtcaaagggagaaagaagatgataaagtcttccctggtggaagccatacatatgtctggcaggtcctgaaagagaatggtccaatggcctctgacccactgtgccttacctactcatatctttctcatgtggacctggtaaaagacttgaattcaggcctcattggagccctactagtatgtagagaagggagtctggccaaggaaaagacacagaccttgcacaaatttatactactttttgctgtatttgatgaagggaaaagttggcactcagaaacaaagaactccttgatgcaggatagggatgctgcatctgctcgggcctggcctaaaatgcacacagtcaatggttatgtaaacaggtctctgccaggtctgattggatgccacaggaaatcagtctattggcatgtgattggaatgggcaccactcctgaagtgcactcaatattcctcgaaggtcacacatttcttgtgaggaaccatcgccaggctagcttggaaatctcgccaataactttccttactgctcaaacactcttgatggaccttggacagtttctactgttttgtcatatctcttcccaccaacatgatggcatggaagcttatgtcaaagtagacagctgtccagaggaaccccaactacgaatgaaaaataatgaagaagcggaagactatgatgatgatcttactgattctgaaatggatgtggtcaggtttgatgatgacaactctccttcctttatccaaattcgctcagttgccaagaagcatcctaaaacttgggtacattacattgctgctgaagaggaggactgggactatgctcccttagtcctcgcccccgatggcgcgccaggtgcctcgccgggaacatcatcaactggttcacccgggtcatccccctcggcctcaaccgggacgggtcccggctcatcccccagcgccagcactggaacaggtcctggcactcctggttccggtacggcatcgtcatccccgggaagctcaacaccgtccggagcgacaggatcacctggctcgtcaccttcggcgtcaactggaacggggccaggggcctcacccggaacgtcctcgactgggtcgcctggtacgccgggatcaggaacggcctcatcctcgcctgggtcctcaacgccctcgggtgcgactggttcgccgggaactcctggctcggggacggcctcgtcgtcgcctggggcatcaccggggacgagctccacggggtcccctggagcgtcaccggggacctcctcgacaggtagcccggcctcgagcgacagaagttataaaagtcaatatttgaacaatggccctcagcggattggtaggaagtacaaaaaagtccgatttatggcatacacagatgaaacctttaagactcgtgaagctattcagcatgaatcaggaatcttgggacctttactttatggggaagttggagacacactgttgattatatttaagaatcaagcaagcagaccatataacatctaccctcacggaatcactgatgtccgtcctttgtattcaaggagattaccaaaaggtgtaaaacatttgaaggattttccaattctgccaggagaaatattcaaatataaatggacagtgactgtagaagatgggccaactaaatcagatcctcggtgcctgacccgctattactctagtttcgttaatatggagagagatctagcttcaggactcattggccctctcctcatctgctacaaagaatctgtagatcaaagaggaaaccagataatgtcagacaagaggaatgtcatcctgttttctgtatttgatgagaaccgaagctggtacctcacagagaatatacaacgctttctccccaatccagctggagtgcagcttgaggatccagagttccaagcctccaacatcatgcacagcatcaatggctatgtttttgatagtttgcagttgtcagtttgtttgcatgaggtggcatactggtacattctaagcattggagcacagactgacttcctttctgtcttcttctctggatataccttcaaacacaaaatggtctatgaagacacactcaccctattcccattctcaggagaaactgtcttcatgtcgatggaaaacccaggtctatggattctggggtgccacaactcagactttcggaacagaggcatgaccgccttactgaaggtttctagttgtgacaagaacactggtgattattacgaggacagttatgaagatatttcagcatacttgctgagtaaaaacaatgccattgaaccaagaagcttctctcaaaacccaccagtcttgaaacgccatcaacgggaaataactcgtactactcttcagtcagatcaagaggaaatcgattatgatgataccatatcagttgaaatgaagaaggaagattttgacatttatgatgaggatgaaaatcagagcccccgcagctttcaaaagaaaacacgacactattttattgctgcagtggagaggctctgggattatgggatgagtagctccccacatgttctaagaaacagggctcagagtggcagtgtccctcagttcaagaaagttgttttccaggaatttactgatggctcctttactcagcccttataccgtggagaactaaatgaacatttgggactcctggggccatatataagagcagaagttgaagataatatcatggtaactttcagaaatcaggcctctcgtccctattccttctattctagccttatttcttatgaggaagatcagaggcaaggagcagaacctagaaaaaactttgtcaagcctaatgaaaccaaaacttacttttggaaagtgcaacatcatatggcacccactaaagatgagtttgactgcaaagcctgggcttatttctctgatgttgacctggaaaaagatgtgcactcaggcctgattggaccccttctggtctgccacactaacacactgaaccctgctcatgggagacaagtgacagtacaggaatttgctctgtttttcaccatctttgatgagaccaaaagctggtacttcactgaaaatatggaaagaaactgcagggctccctgcaatatccagatggaagatcccggcgcgccaggtacacccggatcgggtacagcgtcatcgagccccggtgcgtcacctggtacgtcgagcacggggtcgccaggggcgtcccctgggacgtcctcaacaggctcgcccggtgcgtcacccggcacgtcgtccacgggttcacctggtagctccccttccgcgtccactggcaccgggcctggaactccggggagcggcacagcgagctcgtcgccgggagcatcgcctgggacatcgagcaccgggtcgccaggagcatcgcccggaacatccagcacaggaagccccggcgcgtcgcccgggacatcaagcacaggttccccgggatcgagcacgccgtccggagccactggatcaccagggagctcgacaccttccggcgcaacgggatcgcccggagccagcccgggtacgtcaagcactggctcccctgcctcgagcacttttaaagagaattatcgcttccatgcaatcaatggctacataatggatacactacctggcttagtaatggctcaggatcaaaggattcgatggtatctgctcagcatgggcagcaatgaaaacatccattctattcatttcagtggacatgtgttcactgtacgaaaaaaagaggagtataaaatggcactgtacaatctctatccaggtgtttttgagacagtggaaatgttaccatccaaagctggaatttggcgggtggaatgccttattggcgagcatctacatgctgggatgagcacactttttctggtgtacagcaataagtgtcagactcccctgggaatggcttctggacacattagagattttcagattacagcttcaggacaatatggacagtgggccccaaagctggccagacttcattattccggatcaatcaatgcctggagcaccaaggagcccttttcttggatcaaggtggatctgttggcaccaatgattattcacggcatcaagacccagggtgcccgtcagaagttctccagcctctacatctctcagtttatcatcatgtatagtcttgatgggaagaagtggcagacttatcgaggaaattccactggaaccttaatggtcttctttggcaatgtggattcatctgggataaaacacaatatttttaaccctccaattattgctcgatacatccgtttgcacccaactcattatagcattcgcagcactcttcgcatggagttgatgggctgtgatttaaatagttgcagcatgccattgggaatggagagtaaagcaatatcagatgcacagattactgcttcatcctactttaccaatatgtttgccacctggtctccttcaaaagctcgacttcacctccaagggaggagtaatgcctggagacctcaggtgaataatccaaaagagtggctgcaagtggacttccagaagacaatgaaagtcacaggagtaactactcagggagtaaaatctctgcttaccagcatgtatgtgaaggagttcctcatctccagcagtcaagatggccatcagtggactctcttttttcagaatggcaaagtaaaggtttttcagggaaatcaagactccttcacacctgtggtgaactctctagacccaccgttactgactcgctaccttcgaattcacccccagagttgggtgcaccagattgccctgaggatggaggttctgggctgcgaggcacaggacctctacggcgccggatcacctggggccgaaacggccgaacaaaaactcatctcagaagaggatctgtcacctgcaaccggtcatcatcaccatcaccattga

SEQ ID NO: 1035 - protein, 1919 aa, synthetic construct
  REGION 1..1919: note = Description of Artificial Sequence: Synthetic polypeptide
ATRRYYLGAVELSWDYMQSDLGELPVGAPGSSPSASTGTGPGSSPSASTGTGPGASPGTSSTGSPGASPGTSSTGSPGSSTPSGATGSPGSSPSASTGTGPGASPGTSSTGSPGSSPSASTGTGPGTPGSGTASSSPGSSTPSGATGSPGSSTPSGATGSPGASPGTSSTGSPASSDARFPPRVPKSFPFNTSVVYKKTLFVEFTDHLFNIAKPRPPWMGLLGPTIQAEVYDTVVITLKNMASHPVSLHAVGVSYWKASEGAEYDDQTSQREKEDDKVFPGGSHTYVWQVLKENGPMASDPLCLTYSYLSHVDLVKDLNSGLIGALLVCREGSLAKEKTQTLHKFILLFAVFDEGKSWHSETKNSLMQDRDAASARAWPKMHTVNGYVNRSLPGLIGCHRKSVYWHVIGMGTTPEVHSIFLEGHTFLVRNHRQASLEISPITFLTAQTLLMDLGQFLLFCHISSHQHDGMEAYVKVDSCPEEPQLRMKNNEEAEDYDDDLTDSEMDVVRFDDDNSPSFIQIRSVAKKHPKTWVHYIAAEEEDWDYAPLVLAPDGAPTSTEPSEGSAPGSPAGSPTSTEEGTSTEPSEGSAPGTSTEPSEGSAPGTSESATPESGPGTSTEPSEGSAPGTSESATPESGPGSEPATSGSETPGTSTEPSEGSAPGTSTEPSEGSAPGTSESATPESGPGTSESATPESGPGASSDRSYKSQYLNNGPQRIGRKYKKVRFMAYTDETFKTREAIQHESGILGPLLYGEVGDTLLIIFKNQASRPYNIYPHGITDVRPLYSRRLPKGVKHLKDFPILPGEIFKYKWTVTVEDGPTKSDPRCLTRYYSSFVNMERDLASGLIGPLLICYKESVDQRGNQIMSDKRNVILFSVFDENRSWYLTENIQRFLPNPAGVQLEDPEFQASNIMHSINGYVFDSLQLSVCLHEVAYWYILSIGAQTDFLSVFFSGYTFKHKMVYEDTLTLFPFSGETVFMSMENPGLWILGCHNSDFRNRGMTALLKVSSCDKNTGDYYEDSYEDISAYLLSKNNAIEPRSFSQNPPVLKRHQREITRTTLQGAPGTPGSGTASSSPGASPGTSSTGSPGASPGTSSTGSPGASPGTSSTGSPGSSPSASTGTGPGTPGSGTASSSPGASPGTSSTGSPGASPGTSSTGSPGASPGTSSTGSPGSSTPSGATGSPGSSTPSGATGSPGASPGTSSTGSPASSSDQEEIDYDDTISVEMKKEDFDIYDEDENQSPRSFQKKTRHYFIAAVERLWDYGMSSSPHVLRNRAQSGSVPQFKKVVFQEFTDGSFTQPLYRGELNEHLGLLGPYIRAEVEDNIMVTFRNQASRPYSFYSSLISYEEDQRQGAEPRKNFVKPNETKTYFWKVQHHMAPTKDEFDCKAWAYFSDVDLEKDVHSGLIGPLLVCHTNTLNPAHGRQVTVQEFALFFTIFDETKSWYFTENMERNCRAPCNIQMEDPTFKENYRFHAINGYIMDTLPGLVMAQDQRIRWYLLSMGSNENIHSIHFSGHVFTVRKKEEYKMALYNLYPGVFETVEMLPSKAGIWRVECLIGEHLHAGMSTLFLVYSNKCQTPLGMASGHIRDFQITASGQYGQWAPKLARLHYSGSINAWSTKEPFSWIKVDLLAPMIIHGIKTQGARQKFSSLYISQFIIMYSLDGKKWQTYRGNSTGTLMVFFGNVDSSGIKHNIFNPPIIARYIRLHPTHYSIRSTLRMELMGCDLNSCSMPLGMESKAISDAQITASSYFTNMFATWSPSKARLHLQGRSNAWRPQVNNPKEWLQVDFQKTMKVTGVTTQGVKSLLTSMYVKEFLISSSQDGHQWTLFFQNGKVKVFQGNQDSFTPVVNSLDPPLLTRYLRIHPQSWVHQIALRMEVLGCEAQDLYGAGSPGAETAEQKLISEEDLSPATGHHHHHH

SEQ ID NO: 1036 - DNA, 5760 bp, synthetic construct
  misc_feature 1..5760: note = Description of Artificial Sequence: Synthetic polynucleotide
  source 1..5760: mol_type = other DNA
gccaccagaagatactacctgggtgcagtggaactgtcatgggactatatgcaaagtgatctcggtgagctgcctgtgggcgcgccaggctccagcccctccgcgagcacgggaaccggaccaggttcgtcaccctcagcatcaacggggacgggaccgggggcgtcaccaggaacgtcctccaccggctcgccgggtgcatcacccggaacgtcatcgaccggatcgccagggagctcgacgccatcaggcgcaacaggatcacctggctcaagccctagcgcgtcaaccggcacgggtccgggtgcctcccctggcacgtccagcaccggatcacccggatcgagcccatccgcctcaaccggaaccggacccggtacaccagggtcgggaacagcctcctcgtcaccaggctcctcaaccccctcgggagccacgggttcgcccggttcgtcaacgccttccggagcaactggtagccccggagcatcgccaggaacttcgagcacggggtcgcccgcctcgagcgacgcaagatttcctcctagagtgccaaaatcttttccattcaacacctcagtcgtgtacaaaaagactctgtttgtagaattcacggatcaccttttcaacatcgctaagccaaggccaccctggatgggtctgctaggtcctaccatccaggctgaggtttatgatacagtggtcattacacttaagaacatggcttcccatcctgtcagtcttcatgctgttggtgtatcctactggaaagcttctgagggagctgaatatgatgatcagaccagtcaaagggagaaagaagatgataaagtcttccctggtggaagccatacatatgtctggcaggtcctgaaagagaatggtccaatggcctctgacccactgtgccttacctactcatatctttctcatgtggacctggtaaaagacttgaattcaggcctcattggagccctactagtatgtagagaagggagtctggccaaggaaaagacacagaccttgcacaaatttatactactttttgctgtatttgatgaagggaaaagttggcactcagaaacaaagaactccttgatgcaggatagggatgctgcatctgctcgggcctggcctaaaatgcacacagtcaatggttatgtaaacaggtctctgccaggtctgattggatgccacaggaaatcagtctattggcatgtgattggaatgggcaccactcctgaagtgcactcaatattcctcgaaggtcacacatttcttgtgaggaaccatcgccaggctagcttggaaatctcgccaataactttccttactgctcaaacactcttgatggaccttggacagtttctactgttttgtcatatctcttcccaccaacatgatggcatggaagcttatgtcaaagtagacagctgtccagaggaaccccaactacgaatgaaaaataatgaagaagcggaagactatgatgatgatcttactgattctgaaatggatgtggtcaggtttgatgatgacaactctccttcctttatccaaattcgctcagttgccaagaagcatcctaaaacttgggtacattacattgctgctgaagaggaggactgggactatgctcccttagtcctcgcccccgatggcgcgccaaccagtacggagccgtccgaggggagcgcaccaggaagcccggctgggagcccgacttctaccgaagagggtacatctaccgaaccaagtgaaggttcagcaccaggcacctcaacagaaccctctgagggctcggcgcctggtacaagtgagtccgccaccccagaatccgggcctgggacaagcacagaaccttcggaagggagtgcccctggaacatccgaatcggcaaccccagaatcagggccaggatctgagcccgcgacttcgggctccgagacgcctgggacatccaccgagccctccgaaggatcagccccaggcaccagcacggagccctctgagggaagcgcacctggtaccagcgaaagcgcaactcccgaatcaggtcccggtacgagcgagtcggcgaccccggagagcgggccaggtgcctcgagcgacagaagttataaaagtcaatatttgaacaatggccctcagcggattggtaggaagtacaaaaaagtccgatttatggcatacacagatgaaacctttaagactcgtgaagctattcagcatgaatcaggaatcttgggacctttactttatggggaagttggagacacactgttgattatatttaagaatcaagcaagcagaccatataacatctaccctcacggaatcactgatgtccgtcctttgtattcaaggagattaccaaaaggtgtaaaacatttgaaggattttccaattctgccaggagaaatattcaaatataaatggacagtgactgtagaagatgggccaactaaatcagatcctcggtgcctgacccgctattactctagtttcgttaatatggagagagatctagcttcaggactcattggccctctcctcatctgctacaaagaatctgtagatcaaagaggaaaccagataatgtcagacaagaggaatgtcatcctgttttctgtatttgatgagaaccgaagctggtacctcacagagaatatacaacgctttctccccaatccagctggagtgcagcttgaggatccagagttccaagcctccaacatcatgcacagcatcaatggctatgtttttgatagtttgcagttgtcagtttgtttgcatgaggtggcatactggtacattctaagcattggagcacagactgacttcctttctgtcttcttctctggatataccttcaaacacaaaatggtctatgaagacacactcaccctattcccattctcaggagaaactgtcttcatgtcgatggaaaacccaggtctatggattctggggtgccacaactcagactttcggaacagaggcatgaccgccttactgaaggtttctagttgtgacaagaacactggtgattattacgaggacagttatgaagatatttcagcatacttgctgagtaaaaacaatgccattgaaccaagaagcttctctcaaaacccaccagtcttgaaacgccatcaacgggaaataactcgtactactcttcagggcgcgccaggtacacccggatcgggtacagcgtcatcgagccccggtgcgtcacctggtacgtcgagcacggggtcgccaggggcgtcccctgggacgtcctcaacaggctcgcccggtgcgtcacccggcacgtcgtccacgggttcacctggtagctccccttccgcgtccactggcaccgggcctggaactccggggagcggcacagcgagctcgtcgccgggagcatcgcctgggacatcgagcaccgggtcgccaggagcatcgcccggaacatccagcacaggaagccccggcgcgtcgcccgggacatcaagcacaggttccccgggatcgagcacgccgtccggagccactggatcaccagggagctcgacaccttccggcgcaacgggatcgcccggagccagcccgggtacgtcaagcactggctcccctgcctcgagctcagatcaagaggaaatcgattatgatgataccatatcagttgaaatgaagaaggaagattttgacatttatgatgaggatgaaaatcagagcccccgcagctttcaaaagaaaacacgacactattttattgctgcagtggagaggctctgggattatgggatgagtagctccccacatgttctaagaaacagggctcagagtggcagtgtccctcagttcaagaaagttgttttccaggaatttactgatggctcctttactcagcccttataccgtggagaactaaatgaacatttgggactcctggggccatatataagagcagaagttgaagataatatcatggtaactttcagaaatcaggcctctcgtccctattccttctattctagccttatttcttatgaggaagatcagaggcaaggagcagaacctagaaaaaactttgtcaagcctaatgaaaccaaaacttacttttggaaagtgcaacatcatatggcacccactaaagatgagtttgactgcaaagcctgggcttatttctctgatgttgacctggaaaaagatgtgcactcaggcctgattggaccccttctggtctgccacactaacacactgaaccctgctcatgggagacaagtgacagtacaggaatttgctctgtttttcaccatctttgatgagaccaaaagctggtacttcactgaaaatatggaaagaaactgcagggctccctgcaatatccagatggaagatcccacttttaaagagaattatcgcttccatgcaatcaatggctacataatggatacactacctggcttagtaatggctcaggatcaaaggattcgatggtatctgctcagcatgggcagcaatgaaaacatccattctattcatttcagtggacatgtgttcactgtacgaaaaaaagaggagtataaaatggcactgtacaatctctatccaggtgtttttgagacagtggaaatgttaccatccaaagctggaatttggcgggtggaatgccttattggcgagcatctacatgctgggatgagcacactttttctggtgtacagcaataagtgtcagactcccctgggaatggcttctggacacattagagattttcagattacagcttcaggacaatatggacagtgggccccaaagctggccagacttcattattccggatcaatcaatgcctggagcaccaaggagcccttttcttggatcaaggtggatctgttggcaccaatgattattcacggcatcaagacccagggtgcccgtcagaagttctccagcctctacatctctcagtttatcatcatgtatagtcttgatgggaagaagtggcagacttatcgaggaaattccactggaaccttaatggtcttctttggcaatgtggattcatctgggataaaacacaatatttttaaccctccaattattgctcgatacatccgtttgcacccaactcattatagcattcgcagcactcttcgcatggagttgatgggctgtgatttaaatagttgcagcatgccattgggaatggagagtaaagcaatatcagatgcacagattactgcttcatcctactttaccaatatgtttgccacctggtctccttcaaaagctcgacttcacctccaagggaggagtaatgcctggagacctcaggtgaataatccaaaagagtggctgcaagtggacttccagaagacaatgaaagtcacaggagtaactactcagggagtaaaatctctgcttaccagcatgtatgtgaaggagttcctcatctccagcagtcaagatggccatcagtggactctcttttttcagaatggcaaagtaaaggtttttcagggaaatcaagactccttcacacctgtggtgaactctctagacccaccgttactgactcgctaccttcgaattcacccccagagttgggtgcaccagattgccctgaggatggaggttctgggctgcgaggcacaggacctctacggcgccggatcacctggggccgaaacggccgaacaaaaactcatctcagaagaggatctgtcacctgcaaccggtcatcatcaccatcaccattga

SEQ ID NO: 1037 - protein, 1922 aa, synthetic construct
  REGION 1..1922: note = Description of Artificial Sequence: Synthetic polypeptide
ATRRYYLGAVELSWDYMQSDLGELPVGAPGSSPSASTGTGPGSSPSASTGTGPGASPGTSSTGSPGASPGTSSTGSPGSSTPSGATGSPGSSPSASTGTGPGASPGTSSTGSPGSSPSASTGTGPGTPGSGTASSSPGSSTPSGATGSPGSSTPSGATGSPGASPGTSSTGSPASSDARFPPRVPKSFPFNTSVVYKKTLFVEFTDHLFNIAKPRPPWMGLLGPTIQAEVYDTVVITLKNMASHPVSLHAVGVSYWKASEGAEYDDQTSQREKEDDKVFPGGSHTYVWQVLKENGPMASDPLCLTYSYLSHVDLVKDLNSGLIGALLVCREGSLAKEKTQTLHKFILLFAVFDEGKSWHSETKNSLMQDRDAASARAWPKMHTVNGYVNRSLPGLIGCHRKSVYWHVIGMGTTPEVHSIFLEGHTFLVRNHRQASLEISPITFLTAQTLLMDLGQFLLFCHISSHQHDGMEAYVKVDSCPEEPQLRMKNNEEAEDYDDDLTDSEMDVVRFDDDNSPSFIQIRSVAKKHPKTWVHYIAAEEEDWDYAPLVLAPDGAPTSTEPSEGSAPGSPAGSPTSTEEGTSTEPSEGSAPGTSTEPSEGSAPGTSESATPESGPGTSTEPSEGSAPGTSESATPESGPGSEPATSGSETPGTSTEPSEGSAPGTSTEPSEGSAPGTSESATPESGPGTSESATPESGPGASSDRSYKSQYLNNGPQRIGRKYKKVRFMAYTDETFKTREAIQHESGILGPLLYGEVGDTLLIIFKNQASRPYNIYPHGITDVRPLYSRRLPKGVKHLKDFPILPGEIFKYKWTVTVEDGPTKSDPRCLTRYYSSFVNMERDLASGLIGPLLICYKESVDQRGNQIMSDKRNVILFSVFDENRSWYLTENIQRFLPNPAGVQLEDPEFQASNIMHSINGYVFDSLQLSVCLHEVAYWYILSIGAQTDFLSVFFSGYTFKHKMVYEDTLTLFPFSGETVFMSMENPGLWILGCHNSDFRNRGMTALLKVSSCDKNTGDYYEDSYEDISAYLLSKNNAIEPRSFSQNPPVLKRHQREITRTTLQSDQEEIDYDDTISVEMKKEDFDIYDEDENQSPRSFQKKTRHYFIAAVERLWDYGMSSSPHVLRNRAQGAPGTPGSGTASSSPGASPGTSSTGSPGASPGTSSTGSPGASPGTSSTGSPGSSPSASTGTGPGTPGSGTASSSPGASPGTSSTGSPGASPGTSSTGSPGASPGTSSTGSPGSSTPSGATGSPGSSTPSGATGSPGASPGTSSTGSPASSRAQSGSVPQFKKVVFQEFTDGSFTQPLYRGELNEHLGLLGPYIRAEVEDNIMVTFRNQASRPYSFYSSLISYEEDQRQGAEPRKNFVKPNETKTYFWKVQHHMAPTKDEFDCKAWAYFSDVDLEKDVHSGLIGPLLVCHTNTLNPAHGRQVTVQEFALFFTIFDETKSWYFTENMERNCRAPCNIQMEDPTFKENYRFHAINGYIMDTLPGLVMAQDQRIRWYLLSMGSNENIHSIHFSGHVFTVRKKEEYKMALYNLYPGVFETVEMLPSKAGIWRVECLIGEHLHAGMSTLFLVYSNKCQTPLGMASGHIRDFQITASGQYGQWAPKLARLHYSGSINAWSTKEPFSWIKVDLLAPMIIHGIKTQGARQKFSSLYISQFIIMYSLDGKKWQTYRGNSTGTLMVFFGNVDSSGIKHNIFNPPIIARYIRLHPTHYSIRSTLRMELMGCDLNSCSMPLGMESKAISDAQITASSYFTNMFATWSPSKARLHLQGRSNAWRPQVNNPKEWLQVDFQKTMKVTGVTTQGVKSLLTSMYVKEFLISSSQDGHQWTLFFQNGKVKVFQGNQDSFTPVVNSLDPPLLTRYLRIHPQSWVHQIALRMEVLGCEAQDLYGAGSPGAETAEQKLISEEDLSPATGHHHHHH

SEQ ID NO: 1038 - DNA, 5769 bp, synthetic construct
  misc_feature 1..5769: note = Description of Artificial Sequence: Synthetic polynucleotide
  source 1..5769: mol_type = other DNA
gccaccagaagatactacctgggtgcagtggaactgtcatgggactatatgcaaagtgatctcggtgagctgcctgtgggcgcgccaggctccagcccctccgcgagcacgggaaccggaccaggttcgtcaccctcagcatcaacggggacgggaccgggggcgtcaccaggaacgtcctccaccggctcgccgggtgcatcacccggaacgtcatcgaccggatcgccagggagctcgacgccatcaggcgcaacaggatcacctggctcaagccctagcgcgtcaaccggcacgggtccgggtgcctcccctggcacgtccagcaccggatcacccggatcgagcccatccgcctcaaccggaaccggacccggtacaccagggtcgggaacagcctcctcgtcaccaggctcctcaaccccctcgggagccacgggttcgcccggttcgtcaacgccttccggagcaactggtagccccggagcatcgccaggaacttcgagcacggggtcgcccgcctcgagcgacgcaagatttcctcctagagtgccaaaatcttttccattcaacacctcagtcgtgtacaaaaagactctgtttgtagaattcacggatcaccttttcaacatcgctaagccaaggccaccctggatgggtctgctaggtcctaccatccaggctgaggtttatgatacagtggtcattacacttaagaacatggcttcccatcctgtcagtcttcatgctgttggtgtatcctactggaaagcttctgagggagctgaatatgatgatcagaccagtcaaagggagaaagaagatgataaagtcttccctggtggaagccatacatatgtctggcaggtcctgaaagagaatggtccaatggcctctgacccactgtgccttacctactcatatctttctcatgtggacctggtaaaagacttgaattcaggcctcattggagccctactagtatgtagagaagggagtctggccaaggaaaagacacagaccttgcacaaatttatactactttttgctgtatttgatgaagggaaaagttggcactcagaaacaaagaactccttgatgcaggatagggatgctgcatctgctcgggcctggcctaaaatgcacacagtcaatggttatgtaaacaggtctctgccaggtctgattggatgccacaggaaatcagtctattggcatgtgattggaatgggcaccactcctgaagtgcactcaatattcctcgaaggtcacacatttcttgtgaggaaccatcgccaggctagcttggaaatctcgccaataactttccttactgctcaaacactcttgatggaccttggacagtttctactgttttgtcatatctcttcccaccaacatgatggcatggaagcttatgtcaaagtagacagctgtccagaggaaccccaactacgaatgaaaaataatgaagaagcggaagactatgatgatgatcttactgattctgaaatggatgtggtcaggtttgatgatgacaactctccttcctttatccaaattcgctcagttgccaagaagcatcctaaaacttgggtacattacattgctgctgaagaggaggactgggactatgctcccttagtcctcgcccccgatggcgcgccaaccagtacggagccgtccgaggggagcgcaccaggaagcccggctgggagcccgacttctaccgaagagggtacatctaccgaaccaagtgaaggttcagcaccaggcacctcaacagaaccctctgagggctcggcgcctggtacaagtgagtccgccaccccagaatccgggcctgggacaagcacagaaccttcggaagggagtgcccctggaacatccgaatcggcaaccccagaatcagggccaggatctgagcccgcgacttcgggctccgagacgcctgggacatccaccgagccctccgaaggatcagccccaggcaccagcacggagccctctgagggaagcgcacctggtaccagcgaaagcgcaactcccgaatcaggtcccggtacgagcgagtcggcgaccccggagagcgggccaggtgcctcgagcgacagaagttataaaagtcaatatttgaacaatggccctcagcggattggtaggaagtacaaaaaagtccgatttatggcatacacagatgaaacctttaagactcgtgaagctattcagcatgaatcaggaatcttgggacctttactttatggggaagttggagacacactgttgattatatttaagaatcaagcaagcagaccatataacatctaccctcacggaatcactgatgtccgtcctttgtattcaaggagattaccaaaaggtgtaaaacatttgaaggattttccaattctgccaggagaaatattcaaatataaatggacagtgactgtagaagatgggccaactaaatcagatcctcggtgcctgacccgctattactctagtttcgttaatatggagagagatctagcttcaggactcattggccctctcctcatctgctacaaagaatctgtagatcaaagaggaaaccagataatgtcagacaagaggaatgtcatcctgttttctgtatttgatgagaaccgaagctggtacctcacagagaatatacaacgctttctccccaatccagctggagtgcagcttgaggatccagagttccaagcctccaacatcatgcacagcatcaatggctatgtttttgatagtttgcagttgtcagtttgtttgcatgaggtggcatactggtacattctaagcattggagcacagactgacttcctttctgtcttcttctctggatataccttcaaacacaaaatggtctatgaagacacactcaccctattcccattctcaggagaaactgtcttcatgtcgatggaaaacccaggtctatggattctggggtgccacaactcagactttcggaacagaggcatgaccgccttactgaaggtttctagttgtgacaagaacactggtgattattacgaggacagttatgaagatatttcagcatacttgctgagtaaaaacaatgccattgaaccaagaagcttctctcaaaacccaccagtcttgaaacgccatcaacgggaaataactcgtactactcttcagtcagatcaagaggaaatcgattatgatgataccatatcagttgaaatgaagaaggaagattttgacatttatgatgaggatgaaaatcagagcccccgcagctttcaaaagaaaacacgacactattttattgctgcagtggagaggctctgggattatgggatgagtagctccccacatgttctaagaaacagggctcagggcgcgccaggtacacccggatcgggtacagcgtcatcgagccccggtgcgtcacctggtacgtcgagcacggggtcgccaggggcgtcccctgggacgtcctcaacaggctcgcccggtgcgtcacccggcacgtcgtccacgggttcacctggtagctccccttccgcgtccactggcaccgggcctggaactccggggagcggcacagcgagctcgtcgccgggagcatcgcctgggacatcgagcaccgggtcgccaggagcatcgcccggaacatccagcacaggaagccccggcgcgtcgcccgggacatcaagcacaggttccccgggatcgagcacgccgtccggagccactggatcaccagggagctcgacaccttccggcgcaacgggatcgcccggagccagcccgggtacgtcaagcactggctcccctgcctcgagcagggctcagagtggcagtgtccctcagttcaagaaagttgttttccaggaatttactgatggctcctttactcagcccttataccgtggagaactaaatgaacatttgggactcctggggccatatataagagcagaagttgaagataatatcatggtaactttcagaaatcaggcctctcgtccctattccttctattctagccttatttcttatgaggaagatcagaggcaaggagcagaacctagaaaaaactttgtcaagcctaatgaaaccaaaacttacttttggaaagtgcaacatcatatggcacccactaaagatgagtttgactgcaaagcctgggcttatttctctgatgttgacctggaaaaagatgtgcactcaggcctgattggaccccttctggtctgccacactaacacactgaaccctgctcatgggagacaagtgacagtacaggaatttgctctgtttttcaccatctttgatgagaccaaaagctggtacttcactgaaaatatggaaagaaactgcagggctccctgcaatatccagatggaagatcccacttttaaagagaattatcgcttccatgcaatcaatggctacataatggatacactacctggcttagtaatggctcaggatcaaaggattcgatggtatctgctcagcatgggcagcaatgaaaacatccattctattcatttcagtggacatgtgttcactgtacgaaaaaaagaggagtataaaatggcactgtacaatctctatccaggtgtttttgagacagtggaaatgttaccatccaaagctggaatttggcgggtggaatgccttattggcgagcatctacatgctgggatgagcacactttttctggtgtacagcaataagtgtcagactcccctgggaatggcttctggacacattagagattttcagattacagcttcaggacaatatggacagtgggccccaaagctggccagacttcattattccggatcaatcaatgcctggagcaccaaggagcccttttcttggatcaaggtggatctgttggcaccaatgattattcacggcatcaagacccagggtgcccgtcagaagttctccagcctctacatctctcagtttatcatcatgtatagtcttgatgggaagaagtggcagacttatcgaggaaattccactggaaccttaatggtcttctttggcaatgtggattcatctgggataaaacacaatatttttaaccctccaattattgctcgatacatccgtttgcacccaactcattatagcattcgcagcactcttcgcatggagttgatgggctgtgatttaaatagttgcagcatgccattgggaatggagagtaaagcaatatcagatgcacagattactgcttcatcctactttaccaatatgtttgccacctggtctccttcaaaagctcgacttcacctccaagggaggagtaatgcctggagacctcaggtgaataatccaaaagagtggctgcaagtggacttccagaagacaatgaaagtcacaggagtaactactcagggagtaaaatctctgcttaccagcatgtatgtgaaggagttcctcatctccagcagtcaagatggccatcagtggactctcttttttcagaatggcaaagtaaaggtttttcagggaaatcaagactccttcacacctgtggtgaactctctagacccaccgttactgactcgctaccttcgaattcacccccagagttgggtgcaccagattgccctgaggatggaggttctgggctgcgaggcacaggacctctacggcgccggatcacctggggccgaaacggccgaacaaaaactcatctcagaagaggatctgtcacctgcaaccggtcatcatcaccatcaccattga

SEQ ID NO: 1039 - protein, 1919 aa, synthetic construct
  REGION 1..1919: note = Description of Artificial Sequence: Synthetic polypeptide
ATRRYYLGAVELSWDYMQSDLGELPVGAPGSSPSASTGTGPGSSPSASTGTGPGASPGTSSTGSPGASPGTSSTGSPGSSTPSGATGSPGSSPSASTGTGPGASPGTSSTGSPGSSPSASTGTGPGTPGSGTASSSPGSSTPSGATGSPGSSTPSGATGSPGASPGTSSTGSPASSDARFPPRVPKSFPFNTSVVYKKTLFVEFTDHLFNIAKPRPPWMGLLGPTIQAEVYDTVVITLKNMASHPVSLHAVGVSYWKASEGAEYDDQTSQREKEDDKVFPGGSHTYVWQVLKENGPMASDPLCLTYSYLSHVDLVKDLNSGLIGALLVCREGSLAKEKTQTLHKFILLFAVFDEGKSWHSETKNSLMQDRDAASARAWPKMHTVNGYVNRSLPGLIGCHRKSVYWHVIGMGTTPEVHSIFLEGHTFLVRNHRQASLEISPITFLTAQTLLMDLGQFLLFCHISSHQHDGMEAYVKVDSCPEEPQLRMKNNEEAEDYDDDLTDSEMDVVRFDDDNSPSFIQIRSVAKKHPKTWVHYIAAEEEDWDYAPLVLAPDGAPTSTEPSEGSAPGSPAGSPTSTEEGTSTEPSEGSAPGTSTEPSEGSAPGTSESATPESGPGTSTEPSEGSAPGTSESATPESGPGSEPATSGSETPGTSTEPSEGSAPGTSTEPSEGSAPGTSESATPESGPGTSESATPESGPGASSDRSYKSQYLNNGPQRIGRKYKKVRFMAYTDETFKTREAIQHESGILGPLLYGEVGDTLLIIFKNQASRPYNIYPHGITDVRPLYSRRLPKGVKHLKDFPILPGEIFKYKWTVTVEDGPTKSDPRCLTRYYSSFVNMERDLASGLIGPLLICYKESVDQRGNQIMSDKRNVILFSVFDENRSWYLTENIQRFLPNPAGVQLEDPEFQASNIMHSINGYVFDSLQLSVCLHEVAYWYILSIGAQTDFLSVFFSGYTFKHKMVYEDTLTLFPFSGETVFMSMENPGLWILGCHNSDFRNRGMTALLKVSSCDKNTGDYYEDSYEDISAYLLSKNNAIEPRSFSQNPPVLKRHQREITRTTLQSDQEEIDYDDTISVEMKKEDFDIYDEDENQSPRSFQKKTRHYFIAAVERLWDYGMSSSPHVLRNRAQSGSVPQFKKVVFQEFTDGSFTQPLYRGELNEHLGLLGPYIRAEVEDNIMVTFRNQASRPYSFYSSLISYEEDQRQGAEPRKNFVKPNETKTYFWKVQHHMAPTKDEFDCKAWAYFSDVDLEKDVHSGLIGPLLVCHTNTLNPAHGRQVTVQEFALFFTIFDETKSWYFTENMERNCRGAPTSESATPESGPGSEPATSGSETPGTSESATPESGPGSEPATSGSETPGTSESATPESGPGTSTEPSEGSAPGTSESATPESGPGSPAGSPTSTEEGSPAGSPTSTEEGSPAGSPTSTEEGTSESATPESGPGTSTEPSEGSAPGASSAPCNIQMEDPTFKENYRFHAINGYIMDTLPGLVMAQDQRIRWYLLSMGSNENIHSIHFSGHVFTVRKKEEYKMALYNLYPGVFETVEMLPSKAGIWRVECLIGEHLHAGMSTLFLVYSNKCQTPLGMASGHIRDFQITASGQYGQWAPKLARLHYSGSINAWSTKEPFSWIKVDLLAPMIIHGIKTQGARQKFSSLYISQFIIMYSLDGKKWQTYRGNSTGTLMVFFGNVDSSGIKHNIFNPPIIARYIRLHPTHYSIRSTLRMELMGCDLNSCSMPLGMESKAISDAQITASSYFTNMFATWSPSKARLHLQGRSNAWRPQVNNPKEWLQVDFQKTMKVTGVTTQGVKSLLTSMYVKEFLISSSQDGHQWTLFFQNGKVKVFQGNQDSFTPVVNSLDPPLLTRYLRIHPQSWVHQIALRMEVLGCEAQDLYGAGSPGAETAEQKLISEEDLSPATGHHHHHH

SEQ ID NO: 1040 - DNA, 5760 bp, synthetic construct
  misc_feature 1..5760: note = Description of Artificial Sequence: Synthetic polynucleotide
  source 1..5760: mol_type = other DNA
gccaccagaagatactacctgggtgcagtggaactgtcatgggactatatgcaaagtgatctcggtgagctgcctgtgggcgcgccaggctccagcccctccgcgagcacgggaaccggaccaggttcgtcaccctcagcatcaacggggacgggaccgggggcgtcaccaggaacgtcctccaccggctcgccgggtgcatcacccggaacgtcatcgaccggatcgccagggagctcgacgccatcaggcgcaacaggatcacctggctcaagccctagcgcgtcaaccggcacgggtccgggtgcctcccctggcacgtccagcaccggatcacccggatcgagcccatccgcctcaaccggaaccggacccggtacaccagggtcgggaacagcctcctcgtcaccaggctcctcaaccccctcgggagccacgggttcgcccggttcgtcaacgccttccggagcaactggtagccccggagcatcgccaggaacttcgagcacggggtcgcccgcctcgagcgacgcaagatttcctcctagagtgccaaaatcttttccattcaacacctcagtcgtgtacaaaaagactctgtttgtagaattcacggatcaccttttcaacatcgctaagccaaggccaccctggatgggtctgctaggtcctaccatccaggctgaggtttatgatacagtggtcattacacttaagaacatggcttcccatcctgtcagtcttcatgctgttggtgtatcctactggaaagcttctgagggagctgaatatgatgatcagaccagtcaaagggagaaagaagatgataaagtcttccctggtggaagccatacatatgtctggcaggtcctgaaagagaatggtccaatggcctctgacccactgtgccttacctactcatatctttctcatgtggacctggtaaaagacttgaattcaggcctcattggagccctactagtatgtagagaagggagtctggccaaggaaaagacacagaccttgcacaaatttatactactttttgctgtatttgatgaagggaaaagttggcactcagaaacaaagaactccttgatgcaggatagggatgctgcatctgctcgggcctggcctaaaatgcacacagtcaatggttatgtaaacaggtctctgccaggtctgattggatgccacaggaaatcagtctattggcatgtgattggaatgggcaccactcctgaagtgcactcaatattcctcgaaggtcacacatttcttgtgaggaaccatcgccaggctagcttggaaatctcgccaataactttccttactgctcaaacactcttgatggaccttggacagtttctactgttttgtcatatctcttcccaccaacatgatggcatggaagcttatgtcaaagtagacagctgtccagaggaaccccaactacgaatgaaaaataatgaagaagcggaagactatgatgatgatcttactgattctgaaatggatgtggtcaggtttgatgatgacaactctccttcctttatccaaattcgctcagttgccaagaagcatcctaaaacttgggtacattacattgctgctgaagaggaggactgggactatgctcccttagtcctcgcccccgatggcgcgccaaccagtacggagccgtccgaggggagcgcaccaggaagcccggctgggagcccgacttctaccgaagagggtacatctaccgaaccaagtgaaggttcagcaccaggcacctcaacagaaccctctgagggctcggcgcctggtacaagtgagtccgccaccccagaatccgggcctgggacaagcacagaaccttcggaagggagtgcccctggaacatccgaatcggcaaccccagaatcagggccaggatctgagcccgcgacttcgggctccgagacgcctgggacatccaccgagccctccgaaggatcagccccaggcaccagcacggagccctctgagggaagcgcacctggtaccagcgaaagcgcaactcccgaatcaggtcccggtacgagcgagtcggcgaccccggagagcgggccaggtgcctcgagcgacagaagttataaaagtcaatatttgaacaatggccctcagcggattggtaggaagtacaaaaaagtccgatttatggcatacacagatgaaacctttaagactcgtgaagctattcagcatgaatcaggaatcttgggacctttactttatggggaagttggagacacactgttgattatatttaagaatcaagcaagcagaccatataacatctaccctcacggaatcactgatgtccgtcctttgtattcaaggagattaccaaaaggtgtaaaacatttgaaggattttccaattctgccaggagaaatattcaaatataaatggacagtgactgtagaagatgggccaactaaatcagatcctcggtgcctgacccgctattactctagtttcgttaatatggagagagatctagcttcaggactcattggccctctcctcatctgctacaaagaatctgtagatcaaagaggaaaccagataatgtcagacaagaggaatgtcatcctgttttctgtatttgatgagaaccgaagctggtacctcacagagaatatacaacgctttctccccaatccagctggagtgcagcttgaggatccagagttccaagcctccaacatcatgcacagcatcaatggctatgtttttgatagtttgcagttgtcagtttgtttgcatgaggtggcatactggtacattctaagcattggagcacagactgacttcctttctgtcttcttctctggatataccttcaaacacaaaatggtctatgaagacacactcaccctattcccattctcaggagaaactgtcttcatgtcgatggaaaacccaggtctatggattctggggtgccacaactcagactttcggaacagaggcatgaccgccttactgaaggtttctagttgtgacaagaacactggtgattattacgaggacagttatgaagatatttcagcatacttgctgagtaaaaacaatgccattgaaccaagaagcttctctcaaaacccaccagtcttgaaacgccatcaacgggaaataactcgtactactcttcagtcagatcaagaggaaatcgattatgatgataccatatcagttgaaatgaagaaggaagattttgacatttatgatgaggatgaaaatcagagcccccgcagctttcaaaagaaaacacgacactattttattgctgcagtggagaggctctgggattatgggatgagtagctccccacatgttctaagaaacagggctcagagtggcagtgtccctcagttcaagaaagttgttttccaggaatttactgatggctcctttactcagcccttataccgtggagaactaaatgaacatttgggactcctggggccatatataagagcagaagttgaagataatatcatggtaactttcagaaatcaggcctctcgtccctattccttctattctagccttatttcttatgaggaagatcagaggcaaggagcagaacctagaaaaaactttgtcaagcctaatgaaaccaaaacttacttttggaaagtgcaacatcatatggcacccactaaagatgagtttgactgcaaagcctgggcttatttctctgatgttgacctggaaaaagatgtgcactcaggcctgattggaccccttctggtctgccacactaacacactgaaccctgctcatgggagacaagtgacagtacaggaatttgctctgtttttcaccatctttgatgagaccaaaagctggtacttcactgaaaatatggaaagaaactgcaggggcgcgccaacgtccgaaagtgctacccctgagtcaggccctggtagtgagcctgccacaagcggaagcgaaactccggggacctcagagtctgccactcccgaatcggggccaggctctgaaccggccacttcagggagcgaaacaccaggaacatcggagagcgctaccccggagagcgggccaggaactagtactgagcctagcgagggaagtgcacctggtacaagcgagtccgccacacccgagtctggccctggctctccagcgggctcacccacgagcactgaagagggctctcccgctggcagcccaacgtcgacagaagaaggatcaccagcaggctcccccacatcaacagaggagggtacatcagaatctgctactcccgagagtggacccggtacctccactgagcccagcgaggggagtgcaccaggtgcctcgagcgctccctgcaatatccagatggaagatcccacttttaaagagaattatcgcttccatgcaatcaatggctacataatggatacactacctggcttagtaatggctcaggatcaaaggattcgatggtatctgctcagcatgggcagcaatgaaaacatccattctattcatttcagtggacatgtgttcactgtacgaaaaaaagaggagtataaaatggcactgtacaatctctatccaggtgtttttgagacagtggaaatgttaccatccaaagctggaatttggcgggtggaatgccttattggcgagcatctacatgctgggatgagcacactttttctggtgtacagcaataagtgtcagactcccctgggaatggcttctggacacattagagattttcagattacagcttcaggacaatatggacagtgggccccaaagctggccagacttcattattccggatcaatcaatgcctggagcaccaaggagcccttttcttggatcaaggtggatctgttggcaccaatgattattcacggcatcaagacccagggtgcccgtcagaagttctccagcctctacatctctcagtttatcatcatgtatagtcttgatgggaagaagtggcagacttatcgaggaaattccactggaaccttaatggtcttctttggcaatgtggattcatctgggataaaacacaatatttttaaccctccaattattgctcgatacatccgtttgcacccaactcattatagcattcgcagcactcttcgcatggagttgatgggctgtgatttaaatagttgcagcatgccattgggaatggagagtaaagcaatatcagatgcacagattactgcttcatcctactttaccaatatgtttgccacctggtctccttcaaaagctcgacttcacctccaagggaggagtaatgcctggagacctcaggtgaataatccaaaagagtggctgcaagtggacttccagaagacaatgaaagtcacaggagtaactactcagggagtaaaatctctgcttaccagcatgtatgtgaaggagttcctcatctccagcagtcaagatggccatcagtggactctcttttttcagaatggcaaagtaaaggtttttcagggaaatcaagactccttcacacctgtggtgaactctctagacccaccgttactgactcgctaccttcgaattcacccccagagttgggtgcaccagattgccctgaggatggaggttctgggctgcgaggcacaggacctctacggcgccggatcacctggggccgaaacggccgaacaaaaactcatctcagaagaggatctgtcacctgcaaccggtcatcatcaccatcaccattga

SEQ ID NO: 1041 - protein, 1922 aa, synthetic construct
  REGION 1..1922: note = Description of Artificial Sequence: Synthetic polypeptide
ATRRYYLGAVELSWDYMQSDLGELPVGAPGSSPSASTGTGPGSSPSASTGTGPGASPGTSSTGSPGASPGTSSTGSPGSSTPSGATGSPGSSPSASTGTGPGASPGTSSTGSPGSSPSASTGTGPGTPGSGTASSSPGSSTPSGATGSPGSSTPSGATGSPGASPGTSSTGSPASSDARFPPRVPKSFPFNTSVVYKKTLFVEFTDHLFNIAKPRPPWMGLLGPTIQAEVYDTVVITLKNMASHPVSLHAVGVSYWKASEGAEYDDQTSQREKEDDKVFPGGSHTYVWQVLKENGPMASDPLCLTYSYLSHVDLVKDLNSGLIGALLVCREGSLAKEKTQTLHKFILLFAVFDEGKSWHSETKNSLMQDRDAASARAWPKMHTVNGYVNRSLPGLIGCHRKSVYWHVIGMGTTPEVHSIFLEGHTFLVRNHRQASLEISPITFLTAQTLLMDLGQFLLFCHISSHQHDGMEAYVKVDSCPEEPQLRMKNNEEAEDYDDDLTDSEMDVVRFDDDNSPSFIQIRSVAKKHPKTWVHYIAAEEEDWDYAPLVLAPDDRSYKSQYLNNGPQRIGRKYKKVRFMAYTDETFKTREAIQHESGILGPLLYGEVGDTLLIIFKNQASRPYNIYPHGITDVRPLYSRRLPKGVKHLKDFPILPGEIFKYKWTVTVEDGPTKSDPRCLTRYYSSFVNMERDLASGLIGPLLICYKESVDQRGNQIMSDKRNVILFSVFDENRSWYLTENIQRFLPNPAGVQLEDPEFQASNIMHSINGYVFDSLQLSVCLHEVAYWYILSIGAQTDFLSVFFSGYTFKHKMVYEDTLTLFPFSGETVFMSMENPGLWILGCHNSDFRNRGMTALLKVSSCDKNTGDYYEDSYEDISAYLLSKNNAIEPRSFSQNPPVLKRHQREITRTTLQGAPGTPGSGTASSSPGASPGTSSTGSPGASPGTSSTGSPGASPGTSSTGSPGSSPSASTGTGPGTPGSGTASSSPGASPGTSSTGSPGASPGTSSTGSPGASPGTSSTGSPGSSTPSGATGSPGSSTPSGATGSPGASPGTSSTGSPASSSDQEEIDYDDTISVEMKKEDFDIYDEDENQSPRSFQKKTRHYFIAAVERLWDYGMSSSPHVLRNRAQGAPGTPGSGTASSSPGASPGTSSTGSPGASPGTSSTGSPGASPGTSSTGSPGSSPSASTGTGPGTPGSGTASSSPGASPGTSSTGSPGASPGTSSTGSPGASPGTSSTGSPGSSTPSGATGSPGSSTPSGATGSPGASPGTSSTGSPASSRAQSGSVPQFKKVVFQEFTDGSFTQPLYRGELNEHLGLLGPYIRAEVEDNIMVTFRNQASRPYSFYSSLISYEEDQRQGAEPRKNFVKPNETKTYFWKVQHHMAPTKDEFDCKAWAYFSDVDLEKDVHSGLIGPLLVCHTNTLNPAHGRQVTVQEFALFFTIFDETKSWYFTENMERNCRAPCNIQMEDPTFKENYRFHAINGYIMDTLPGLVMAQDQRIRWYLLSMGSNENIHSIHFSGHVFTVRKKEEYKMALYNLYPGVFETVEMLPSKAGIWRVECLIGEHLHAGMSTLFLVYSNKCQTPLGMASGHIRDFQITASGQYGQWAPKLARLHYSGSINAWSTKEPFSWIKVDLLAPMIIHGIKTQGARQKFSSLYISQFIIMYSLDGKKWQTYRGNSTGTLMVFFGNVDSSGIKHNIFNPPIIARYIRLHPTHYSIRSTLRMELMGCDLNSCSMPLGMESKAISDAQITASSYFTNMFATWSPSKARLHLQGRSNAWRPQVNNPKEWLQVDFQKTMKVTGVTTQGVKSLLTSMYVKEFLISSSQDGHQWTLFFQNGKVKVFQGNQDSFTPVVNSLDPPLLTRYLRIHPQSWVHQIALRMEVLGCEAQDLYGAGSPGAETAEQKLISEEDLSPATGHHHHHH

SEQ ID NO: 1042 - DNA, 5769 bp, synthetic construct
  misc_feature 1..5769: note = Description of Artificial Sequence: Synthetic polynucleotide
  source 1..5769: mol_type = other DNA
gccaccagaagatactacctgggtgcagtggaactgtcatgggactatatgcaaagtgatctcggtgagctgcctgtgggcgcgccaggctccagcccctccgcgagcacgggaaccggaccaggttcgtcaccctcagcatcaacggggacgggaccgggggcgtcaccaggaacgtcctccaccggctcgccgggtgcatcacccggaacgtcatcgaccggatcgccagggagctcgacgccatcaggcgcaacaggatcacctggctcaagccctagcgcgtcaaccggcacgggtccgggtgcctcccctggcacgtccagcaccggatcacccggatcgagcccatccgcctcaaccggaaccggacccggtacaccagggtcgggaacagcctcctcgtcaccaggctcctcaaccccctcgggagccacgggttcgcccggttcgtcaacgccttccggagcaactggtagccccggagcatcgccaggaacttcgagcacggggtcgcccgcctcgagcgacgcaagatttcctcctagagtgccaaaatcttttccattcaacacctcagtcgtgtacaaaaagactctgtttgtagaattcacggatcaccttttcaacatcgctaagccaaggccaccctggatgggtctgctaggtcctaccatccaggctgaggtttatgatacagtggtcattacacttaagaacatggcttcccatcctgtcagtcttcatgctgttggtgtatcctactggaaagcttctgagggagctgaatatgatgatcagaccagtcaaagggagaaagaagatgataaagtcttccctggtggaagccatacatatgtctggcaggtcctgaaagagaatggtccaatggcctctgacccactgtgccttacctactcatatctttctcatgtggacctggtaaaagacttgaattcaggcctcattggagccctactagtatgtagagaagggagtctggccaaggaaaagacacagaccttgcacaaatttatactactttttgctgtatttgatgaagggaaaagttggcactcagaaacaaagaactccttgatgcaggatagggatgctgcatctgctcgggcctggcctaaaatgcacacagtcaatggttatgtaaacaggtctctgccaggtctgattggatgccacaggaaatcagtctattggcatgtgattggaatgggcaccactcctgaagtgcactcaatattcctcgaaggtcacacatttcttgtgaggaaccatcgccaggctagcttggaaatctcgccaataactttccttactgctcaaacactcttgatggaccttggacagtttctactgttttgtcatatctcttcccaccaacatgatggcatggaagcttatgtcaaagtagacagctgtccagaggaaccccaactacgaatgaaaaataatgaagaagcggaagactatgatgatgatcttactgattctgaaatggatgtggtcaggtttgatgatgacaactctccttcctttatccaaattcgctcagttgccaagaagcatcctaaaacttgggtacattacattgctgctgaagaggaggactgggactatgctcccttagtcctcgcccccgatgacagaagttataaaagtcaatatttgaacaatggccctcagcggattggtaggaagtacaaaaaagtccgatttatggcatacacagatgaaacctttaagactcgtgaagctattcagcatgaatcaggaatcttgggacctttactttatggggaagttggagacacactgttgattatatttaagaatcaagcaagcagaccatataacatctaccctcacggaatcactgatgtccgtcctttgtattcaaggagattaccaaaaggtgtaaaacatttgaaggattttccaattctgccaggagaaatattcaaatataaatggacagtgactgtagaagatgggccaactaaatcagatcctcggtgcctgacccgctattactctagtttcgttaatatggagagagatctagcttcaggactcattggccctctcctcatctgctacaaagaatctgtagatcaaagaggaaaccagataatgtcagacaagaggaatgtcatcctgttttctgtatttgatgagaaccgaagctggtacctcacagagaatatacaacgctttctccccaatccagctggagtgcagcttgaggatccagagttccaagcctccaacatcatgcacagcatcaatggctatgtttttgatagtttgcagttgtcagtttgtttgcatgaggtggcatactggtacattctaagcattggagcacagactgacttcctttctgtcttcttctctggatataccttcaaacacaaaatggtctatgaagacacactcaccctattcccattctcaggagaaactgtcttcatgtcgatggaaaacccaggtctatggattctggggtgccacaactcagactttcggaacagaggcatgaccgccttactgaaggtttctagttgtgacaagaacactggtgattattacgaggacagttatgaagatatttcagcatacttgctgagtaaaaacaatgccattgaaccaagaagcttctctcaaaacccaccagtcttgaaacgccatcaacgggaaataactcgtactactcttcagggcgcgccaggtacacccggatcgggtacagcgtcatcgagccccggtgcgtcacctggtacgtcgagcacggggtcgccaggggcgtcccctgggacgtcctcaacaggctcgcccggtgcgtcacccggcacgtcgtccacgggttcacctggtagctccccttccgcgtccactggcaccgggcctggaactccggggagcggcacagcgagctcgtcgccgggagcatcgcctgggacatcgagcaccgggtcgccaggagcatcgcccggaacatccagcacaggaagccccggcgcgtcgcccgggacatcaagcacaggttccccgggatcgagcacgccgtccggagccactggatcaccagggagctcgacaccttccggcgcaacgggatcgcccggagccagcccgggtacgtcaagcactggctcccctgcctcgagctcagatcaagaggaaatcgattatgatgataccatatcagttgaaatgaagaaggaagattttgacatttatgatgaggatgaaaatcagagcccccgcagctttcaaaagaaaacacgacactattttattgctgcagtggagaggctctgggattatgggatgagtagctccccacatgttctaagaaacagggctcagggcgcgccaggtacacccggatcgggtacagcgtcatcgagccccggtgcgtcacctggtacgtcgagcacggggtcgccaggggcgtcccctgggacgtcctcaacaggctcgcccggtgcgtcacccggcacgtcgtccacgggttcacctggtagctccccttccgcgtccactggcaccgggcctggaactccggggagcggcacagcgagctcgtcgccgggagcatcgcctgggacatcgagcaccgggtcgccaggagcatcgcccggaacatccagcacaggaagccccggcgcgtcgcccgggacatcaagcacaggttccccgggatcgagcacgccgtccggagccactggatcaccagggagctcgacaccttccggcgcaacgggatcgcccggagccagcccgggtacgtcaagcactggctcccctgcctcgagcagggctcagagtggcagtgtccctcagttcaagaaagttgttttccaggaatttactgatggctcctttactcagcccttataccgtggagaactaaatgaacatttgggactcctggggccatatataagagcagaagttgaagataatatcatggtaactttcagaaatcaggcctctcgtccctattccttctattctagccttatttcttatgaggaagatcagaggcaaggagcagaacctagaaaaaactttgtcaagcctaatgaaaccaaaacttacttttggaaagtgcaacatcatatggcacccactaaagatgagtttgactgcaaagcctgggcttatttctctgatgttgacctggaaaaagatgtgcactcaggcctgattggaccccttctggtctgccacactaacacactgaaccctgctcatgggagacaagtgacagtacaggaatttgctctgtttttcaccatctttgatgagaccaaaagctggtacttcactgaaaatatggaaagaaactgcagggctccctgcaatatccagatggaagatcccacttttaaagagaattatcgcttccatgcaatcaatggctacataatggatacactacctggcttagtaatggctcaggatcaaaggattcgatggtatctgctcagcatgggcagcaatgaaaacatccattctattcatttcagtggacatgtgttcactgtacgaaaaaaagaggagtataaaatggcactgtacaatctctatccaggtgtttttgagacagtggaaatgttaccatccaaagctggaatttggcgggtggaatgccttattggcgagcatctacatgctgggatgagcacactttttctggtgtacagcaataagtgtcagactcccctgggaatggcttctggacacattagagattttcagattacagcttcaggacaatatggacagtgggccccaaagctggccagacttcattattccggatcaatcaatgcctggagcaccaaggagcccttttcttggatcaaggtggatctgttggcaccaatgattattcacggcatcaagacccagggtgcccgtcagaagttctccagcctctacatctctcagtttatcatcatgtatagtcttgatgggaagaagtggcagacttatcgaggaaattccactggaaccttaatggtcttctttggcaatgtggattcatctgggataaaacacaatatttttaaccctccaattattgctcgatacatccgtttgcacccaactcattatagcattcgcagcactcttcgcatggagttgatgggctgtgatttaaatagttgcagcatgccattgggaatggagagtaaagcaatatcagatgcacagattactgcttcatcctactttaccaatatgtttgccacctggtctccttcaaaagctcgacttcacctccaagggaggagtaatgcctggagacctcaggtgaataatccaaaagagtggctgcaagtggacttccagaagacaatgaaagtcacaggagtaactactcagggagtaaaatctctgcttaccagcatgtatgtgaaggagttcctcatctccagcagtcaagatggccatcagtggactctcttttttcagaatggcaaagtaaaggtttttcagggaaatcaagactccttcacacctgtggtgaactctctagacccaccgttactgactcgctaccttcgaattcacccccagagttgggtgcaccagattgccctgaggatggaggttctgggctgcgaggcacaggacctctacggcgccggatcacctggggccgaaacggccgaacaaaaactcatctcagaagaggatctgtcacctgcaaccggtcatcatcaccatcaccattga

SEQ ID NO: 1043 - protein, 1919 aa, synthetic construct
  REGION 1..1919: note = Description of Artificial Sequence: Synthetic polypeptide
ATRRYYLGAVELSWDYMQSDLGELPVGAPGSSPSASTGTGPGSSPSASTGTGPGASPGTSSTGSPGASPGTSSTGSPGSSTPSGATGSPGSSPSASTGTGPGASPGTSSTGSPGSSPSASTGTGPGTPGSGTASSSPGSSTPSGATGSPGSSTPSGATGSPGASPGTSSTGSPASSDARFPPRVPKSFPFNTSVVYKKTLFVEFTDHLFNIAKPRPPWMGLLGPTIQAEVYDTVVITLKNMASHPVSLHAVGVSYWKASEGAEYDDQTSQREKEDDKVFPGGSHTYVWQVLKENGPMASDPLCLTYSYLSHVDLVKDLNSGLIGALLVCREGSLAKEKTQTLHKFILLFAVFDEGKSWHSETKNSLMQDRDAASARAWPKMHTVNGYVNRSLPGLIGCHRKSVYWHVIGMGTTPEVHSIFLEGHTFLVRNHRQASLEISPITFLTAQTLLMDLGQFLLFCHISSHQHDGMEAYVKVDSCPEEPQLRMKNNEEAEDYDDDLTDSEMDVVRFDDDNSPSFIQIRSVAKKHPKTWVHYIAAEEEDWDYAPLVLAPDDRSYKSQYLNNGPQRIGRKYKKVRFMAYTDETFKTREAIQHESGILGPLLYGEVGDTLLIIFKNQASRPYNIYPHGITDVRPLYSRRLPKGVKHLKDFPILPGEIFKYKWTVTVEDGPTKSDPRCLTRYYSSFVNMERDLASGLIGPLLICYKESVDQRGNQIMSDKRNVILFSVFDENRSWYLTENIQRFLPNPAGVQLEDPEFQASNIMHSINGYVFDSLQLSVCLHEVAYWYILSIGAQTDFLSVFFSGYTFKHKMVYEDTLTLFPFSGETVFMSMENPGLWILGCHNSDFRNRGMTALLKVSSCDKNTGDYYEDSYEDISAYLLSKNNAIEPRSFSQNPPVLKRHQREITRTTLQGAPGTPGSGTASSSPGASPGTSSTGSPGASPGTSSTGSPGASPGTSSTGSPGSSPSASTGTGPGTPGSGTASSSPGASPGTSSTGSPGASPGTSSTGSPGASPGTSSTGSPGSSTPSGATGSPGSSTPSGATGSPGASPGTSSTGSPASSSDQEEIDYDDTISVEMKKEDFDIYDEDENQSPRSFQKKTRHYFIAAVERLWDYGMSSSPHVLRNRAQSGSVPQFKKVVFQEFTDGSFTQPLYRGELNEHLGLLGPYIRAEVEDNIMVTFRNQASRPYSFYSSLISYEEDQRQGAEPRKNFVKPNETKTYFWKVQHHMAPTKDEFDCKAWAYFSDVDLEKDVHSGLIGPLLVCHTNTLNPAHGRQVTVQEFALFFTIFDETKSWYFTENMERNCRGAPTSESATPESGPGSEPATSGSETPGTSESATPESGPGSEPATSGSETPGTSESATPESGPGTSTEPSEGSAPGTSESATPESGPGSPAGSPTSTEEGSPAGSPTSTEEGSPAGSPTSTEEGTSESATPESGPGTSTEPSEGSAPGASSAPCNIQMEDPTFKENYRFHAINGYIMDTLPGLVMAQDQRIRWYLLSMGSNENIHSIHFSGHVFTVRKKEEYKMALYNLYPGVFETVEMLPSKAGIWRVECLIGEHLHAGMSTLFLVYSNKCQTPLGMASGHIRDFQITASGQYGQWAPKLARLHYSGSINAWSTKEPFSWIKVDLLAPMIIHGIKTQGARQKFSSLYISQFIIMYSLDGKKWQTYRGNSTGTLMVFFGNVDSSGIKHNIFNPPIIARYIRLHPTHYSIRSTLRMELMGCDLNSCSMPLGMESKAISDAQITASSYFTNMFATWSPSKARLHLQGRSNAWRPQVNNPKEWLQVDFQKTMKVTGVTTQGVKSLLTSMYVKEFLISSSQDGHQWTLFFQNGKVKVFQGNQDSFTPVVNSLDPPLLTRYLRIHPQSWVHQIALRMEVLGCEAQDLYGAGSPGAETAEQKLISEEDLSPATGHHHHHH

SEQ ID NO: 1044 - DNA, 5760 bp, synthetic construct
  misc_feature 1..5760: note = Description of Artificial Sequence: Synthetic polynucleotide
  source 1..5760: mol_type = other DNA
gccaccagaagatactacctgggtgcagtggaactgtcatgggactatatgcaaagtgatctcggtgagctgcctgtgggcgcgccaggctccagcccctccgcgagcacgggaaccggaccaggttcgtcaccctcagcatcaacggggacgggaccgggggcgtcaccaggaacgtcctccaccggctcgccgggtgcatcacccggaacgtcatcgaccggatcgccagggagctcgacgccatcaggcgcaacaggatcacctggctcaagccctagcgcgtcaaccggcacgggtccgggtgcctcccctggcacgtccagcaccggatcacccggatcgagcccatccgcctcaaccggaaccggacccggtacaccagggtcgggaacagcctcctcgtcaccaggctcctcaaccccctcgggagccacgggttcgcccggttcgtcaacgccttccggagcaactggtagccccggagcatcgccaggaacttcgagcacggggtcgcccgcctcgagcgacgcaagatttcctcctagagtgccaaaatcttttccattcaacacctcagtcgtgtacaaaaagactctgtttgtagaattcacggatcaccttttcaacatcgctaagccaaggccaccctggatgggtctgctaggtcctaccatccaggctgaggtttatgatacagtggtcattacacttaagaacatggcttcccatcctgtcagtcttcatgctgttggtgtatcctactggaaagcttctgagggagctgaatatgatgatcagaccagtcaaagggagaaagaagatgataaagtcttccctggtggaagccatacatatgtctggcaggtcctgaaagagaatggtccaatggcctctgacccactgtgccttacctactcatatctttctcatgtggacctggtaaaagacttgaattcaggcctcattggagccctactagtatgtagagaagggagtctggccaaggaaaagacacagaccttgcacaaatttatactactttttgctgtatttgatgaagggaaaagttggcactcagaaacaaagaactccttgatgcaggatagggatgctgcatctgctcgggcctggcctaaaatgcacacagtcaatggttatgtaaacaggtctctgccaggtctgattggatgccacaggaaatcagtctattggcatgtgattggaatgggcaccactcctgaagtgcactcaatattcctcgaaggtcacacatttcttgtgaggaaccatcgccaggctagcttggaaatctcgccaataactttccttactgctcaaacactcttgatggaccttggacagtttctactgttttgtcatatctcttcccaccaacatgatggcatggaagcttatgtcaaagtagacagctgtccagaggaaccccaactacgaatgaaaaataatgaagaagcggaagactatgatgatgatcttactgattctgaaatggatgtggtcaggtttgatgatgacaactctccttcctttatccaaattcgctcagttgccaagaagcatcctaaaacttgggtacattacattgctgctgaagaggaggactgggactatgctcccttagtcctcgcccccgatgacagaagttataaaagtcaatatttgaacaatggccctcagcggattggtaggaagtacaaaaaagtccgatttatggcatacacagatgaaacctttaagactcgtgaagctattcagcatgaatcaggaatcttgggacctttactttatggggaagttggagacacactgttgattatatttaagaatcaagcaagcagaccatataacatctaccctcacggaatcactgatgtccgtcctttgtattcaaggagattaccaaaaggtgtaaaacatttgaaggattttccaattctgccaggagaaatattcaaatataaatggacagtgactgtagaagatgggccaactaaatcagatcctcggtgcctgacccgctattactctagtttcgttaatatggagagagatctagcttcaggactcattggccctctcctcatctgctacaaagaatctgtagatcaaagaggaaaccagataatgtcagacaagaggaatgtcatcctgttttctgtatttgatgagaaccgaagctggtacctcacagagaatatacaacgctttctccccaatccagctggagtgcagcttgaggatccagagttccaagcctccaacatcatgcacagcatcaatggctatgtttttgatagtttgcagttgtcagtttgtttgcatgaggtggcatactggtacattctaagcattggagcacagactgacttcctttctgtcttcttctctggatataccttcaaacacaaaatggtctatgaagacacactcaccctattcccattctcaggagaaactgtcttcatgtcgatggaaaacccaggtctatggattctggggtgccacaactcagactttcggaacagaggcatgaccgccttactgaaggtttctagttgtgacaagaacactggtgattattacgaggacagttatgaagatatttcagcatacttgctgagtaaaaacaatgccattgaaccaagaagcttctctcaaaacccaccagtcttgaaacgccatcaacgggaaataactcgtactactcttcagggcgcgccaggtacacccggatcgggtacagcgtcatcgagccccggtgcgtcacctggtacgtcgagcacggggtcgccaggggcgtcccctgggacgtcctcaacaggctcgcccggtgcgtcacccggcacgtcgtccacgggttcacctggtagctccccttccgcgtccactggcaccgggcctggaactccggggagcggcacagcgagctcgtcgccgggagcatcgcctgggacatcgagcaccgggtcgccaggagcatcgcccggaacatccagcacaggaagccccggcgcgtcgcccgggacatcaagcacaggttccccgggatcgagcacgccgtccggagccactggatcaccagggagctcgacaccttccggcgcaacgggatcgcccggagccagcccgggtacgtcaagcactggctcccctgcctcgagctcagatcaagaggaaatcgattatgatgataccatatcagttgaaatgaagaaggaagattttgacatttatgatgaggatgaaaatcagagcccccgcagctttcaaaagaaaacacgacactattttattgctgcagtggagaggctctgggattatgggatgagtagctccccacatgttctaagaaacagggctcagagtggcagtgtccctcagttcaagaaagttgttttccaggaatttactgatggctcctttactcagcccttataccgtggagaactaaatgaacatttgggactcctggggccatatataagagcagaagttgaagataatatcatggtaactttcagaaatcaggcctctcgtccctattccttctattctagccttatttcttatgaggaagatcagaggcaaggagcagaacctagaaaaaactttgtcaagcctaatgaaaccaaaacttacttttggaaagtgcaacatcatatggcacccactaaagatgagtttgactgcaaagcctgggcttatttctctgatgttgacctggaaaaagatgtgcactcaggcctgattggaccccttctggtctgccacactaacacactgaaccctgctcatgggagacaagtgacagtacaggaatttgctctgtttttcaccatctttgatgagaccaaaagctggtacttcactgaaaatatggaaagaaactgcaggggcgcgccaacgtccgaaagtgctacccctgagtcaggccctggtagtgagcctgccacaagcggaagcgaaactccggggacctcagagtctgccactcccgaatcggggccaggctctgaaccggccacttcagggagcgaaacaccaggaacatcggagagcgctaccccggagagcgggccaggaactagtactgagcctagcgagggaagtgcacctggtacaagcgagtccgccacacccgagtctggccctggctctccagcgggctcacccacgagcactgaagagggctctcccgctggcagcccaacgtcgacagaagaaggatcaccagcaggctcccccacatcaacagaggagggtacatcagaatctgctactcccgagagtggacccggtacctccactgagcccagcgaggggagtgcaccaggtgcctcgagcgctccctgcaatatccagatggaagatcccacttttaaagagaattatcgcttccatgcaatcaatggctacataatggatacactacctggcttagtaatggctcaggatcaaaggattcgatggtatctgctcagcatgggcagcaatgaaaacatccattctattcatttcagtggacatgtgttcactgtacgaaaaaaagaggagtataaaatggcactgtacaatctctatccaggtgtttttgagacagtggaaatgttaccatccaaagctggaatttggcgggtggaatgccttattggcgagcatctacatgctgggatgagcacactttttctggtgtacagcaataagtgtcagactcccctgggaatggcttctggacacattagagattttcagattacagcttcaggacaatatggacagtgggccccaaagctggccagacttcattattccggatcaatcaatgcctggagcaccaaggagcccttttcttggatcaaggtggatctgttggcaccaatgattattcacggcatcaagacccagggtgcccgtcagaagttctccagcctctacatctctcagtttatcatcatgtatagtcttgatgggaagaagtggcagacttatcgaggaaattccactggaaccttaatggtcttctttggcaatgtggattcatctgggataaaacacaatatttttaaccctccaattattgctcgatacatccgtttgcacccaactcattatagcattcgcagcactcttcgcatggagttgatgggctgtgatttaaatagttgcagcatgccattgggaatggagagtaaagcaatatcagatgcacagattactgcttcatcctactttaccaatatgtttgccacctggtctccttcaaaagctcgacttcacctccaagggaggagtaatgcctggagacctcaggtgaataatccaaaagagtggctgcaagtggacttccagaagacaatgaaagtcacaggagtaactactcagggagtaaaatctctgcttaccagcatgtatgtgaaggagttcctcatctccagcagtcaagatggccatcagtggactctcttttttcagaatggcaaagtaaaggtttttcagggaaatcaagactccttcacacctgtggtgaactctctagacccaccgttactgactcgctaccttcgaattcacccccagagttgggtgcaccagattgccctgaggatggaggttctgggctgcgaggcacaggacctctacggcgccggatcacctggggccgaaacggccgaacaaaaactcatctcagaagaggatctgtcacctgcaaccggtcatcatcaccatcaccattga

SEQ ID NO: 1045 - protein, 1922 aa, synthetic construct
  REGION 1..1922: note = Description of Artificial Sequence: Synthetic polypeptide
ATRRYYLGAVELSWDYMQSDLGELPVGAPGSSPSASTGTGPGSSPSASTGTGPGASPGTSSTGSPGASPGTSSTGSPGSSTPSGATGSPGSSPSASTGTGPGASPGTSSTGSPGSSPSASTGTGPGTPGSGTASSSPGSSTPSGATGSPGSSTPSGATGSPGASPGTSSTGSPASSDARFPPRVPKSFPFNTSVVYKKTLFVEFTDHLFNIAKPRPPWMGLLGPTIQAEVYDTVVITLKNMASHPVSLHAVGVSYWKASEGAEYDDQTSQREKEDDKVFPGGSHTYVWQVLKENGPMASDPLCLTYSYLSHVDLVKDLNSGLIGALLVCREGSLAKEKTQTLHKFILLFAVFDEGKSWHSETKNSLMQDRDAASARAWPKMHTVNGYVNRSLPGLIGCHRKSVYWHVIGMGTTPEVHSIFLEGHTFLVRNHRQASLEISPITFLTAQTLLMDLGQFLLFCHISSHQHDGMEAYVKVDSCPEEPQLRMKNNEEAEDYDDDLTDSEMDVVRFDDDNSPSFIQIRSVAKKHPKTWVHYIAAEEEDWDYAPLVLAPDDRSYKSQYLNNGPQRIGRKYKKVRFMAYTDETFKTREAIQHESGILGPLLYGEVGDTLLIIFKNQASRPYNIYPHGITDVRPLYSRRLPKGVKHLKDFPILPGEIFKYKWTVTVEDGPTKSDPRCLTRYYSSFVNMERDLASGLIGPLLICYKESVDQRGNQIMSDKRNVILFSVFDENRSWYLTENIQRFLPNPAGVQLEDPEFQASNIMHSINGYVFDSLQLSVCLHEVAYWYILSIGAQTDFLSVFFSGYTFKHKMVYEDTLTLFPFSGETVFMSMENPGLWILGCHNSDFRNRGMTALLKVSSCDKNTGDYYEDSYEDISAYLLSKNNAIEPRSFSQNPPVLKRHQREITRTTLQSDQEEIDYDDTISVEMKKEDFDIYDEDENQSPRSFQKKTRHYFIAAVERLWDYGMSSSPHVLRNRAQGAPGTPGSGTASSSPGASPGTSSTGSPGASPGTSSTGSPGASPGTSSTGSPGSSPSASTGTGPGTPGSGTASSSPGASPGTSSTGSPGASPGTSSTGSPGASPGTSSTGSPGSSTPSGATGSPGSSTPSGATGSPGASPGTSSTGSPASSRAQSGSVPQFKKVVFQEFTDGSFTQPLYRGELNEHLGLLGPYIRAEVEDNIMVTFRNQASRPYSFYSSLISYEEDQRQGAEPRKNFVKPNETKTYFWKVQHHMAPTKDEFDCKAWAYFSDVDLEKDVHSGLIGPLLVCHTNTLNPAHGRQVTVQEFALFFTIFDETKSWYFTENMERNCRGAPTSESATPESGPGSEPATSGSETPGTSESATPESGPGSEPATSGSETPGTSESATPESGPGTSTEPSEGSAPGTSESATPESGPGSPAGSPTSTEEGSPAGSPTSTEEGSPAGSPTSTEEGTSESATPESGPGTSTEPSEGSAPGASSAPCNIQMEDPTFKENYRFHAINGYIMDTLPGLVMAQDQRIRWYLLSMGSNENIHSIHFSGHVFTVRKKEEYKMALYNLYPGVFETVEMLPSKAGIWRVECLIGEHLHAGMSTLFLVYSNKCQTPLGMASGHIRDFQITASGQYGQWAPKLARLHYSGSINAWSTKEPFSWIKVDLLAPMIIHGIKTQGARQKFSSLYISQFIIMYSLDGKKWQTYRGNSTGTLMVFFGNVDSSGIKHNIFNPPIIARYIRLHPTHYSIRSTLRMELMGCDLNSCSMPLGMESKAISDAQITASSYFTNMFATWSPSKARLHLQGRSNAWRPQVNNPKEWLQVDFQKTMKVTGVTTQGVKSLLTSMYVKEFLISSSQDGHQWTLFFQNGKVKVFQGNQDSFTPVVNSLDPPLLTRYLRIHPQSWVHQIALRMEVLGCEAQDLYGAGSPGAETAEQKLISEEDLSPATGHHHHHH

SEQ ID NO: 1046 - DNA, 5769 bp, synthetic construct
  misc_feature 1..5769: note = Description of Artificial Sequence: Synthetic polynucleotide
  source 1..5769: mol_type = other DNA
gccaccagaagatactacctgggtgcagtggaactgtcatgggactatatgcaaagtgatctcggtgagctgcctgtgggcgcgccaggctccagcccctccgcgagcacgggaaccggaccaggttcgtcaccctcagcatcaacggggacgggaccgggggcgtcaccaggaacgtcctccaccggctcgccgggtgcatcacccggaacgtcatcgaccggatcgccagggagctcgacgccatcaggcgcaacaggatcacctggctcaagccctagcgcgtcaaccggcacgggtccgggtgcctcccctggcacgtccagcaccggatcacccggatcgagcccatccgcctcaaccggaaccggacccggtacaccagggtcgggaacagcctcctcgtcaccaggctcctcaaccccctcgggagccacgggttcgcccggttcgtcaacgccttccggagcaactggtagccccggagcatcgccaggaacttcgagcacggggtcgcccgcctcgagcgacgcaagatttcctcctagagtgccaaaatcttttccattcaacacctcagtcgtgtacaaaaagactctgtttgtagaattcacggatcaccttttcaacatcgctaagccaaggccaccctggatgggtctgctaggtcctaccatccaggctgaggtttatgatacagtggtcattacacttaagaacatggcttcccatcctgtcagtcttcatgctgttggtgtatcctactggaaagcttctgagggagctgaatatgatgatcagaccagtcaaagggagaaagaagatgataaagtcttccctggtggaagccatacatatgtctggcaggtcctgaaagagaatggtccaatggcctctgacccactgtgccttacctactcatatctttctcatgtggacctggtaaaagacttgaattcaggcctcattggagccctactagtatgtagagaagggagtctggccaaggaaaagacacagaccttgcacaaatttatactactttttgctgtatttgatgaagggaaaagttggcactcagaaacaaagaactccttgatgcaggatagggatgctgcatctgctcgggcctggcctaaaatgcacacagtcaatggttatgtaaacaggtctctgccaggtctgattggatgccacaggaaatcagtctattggcatgtgattggaatgggcaccactcctgaagtgcactcaatattcctcgaaggtcacacatttcttgtgaggaaccatcgccaggctagcttggaaatctcgccaataactttccttactgctcaaacactcttgatggaccttggacagtttctactgttttgtcatatctcttcccaccaacatgatggcatggaagcttatgtcaaagtagacagctgtccagaggaaccccaactacgaatgaaaaataatgaagaagcggaagactatgatgatgatcttactgattctgaaatggatgtggtcaggtttgatgatgacaactctccttcctttatccaaattcgctcagttgccaagaagcatcctaaaacttgggtacattacattgctgctgaagaggaggactgggactatgctcccttagtcctcgcccccgatgacagaagttataaaagtcaatatttgaacaatggccctcagcggattggtaggaagtacaaaaaagtccgatttatggcatacacagatgaaacctttaagactcgtgaagctattcagcatgaatcaggaatcttgggacctttactttatggggaagttggagacacactgttgattatatttaagaatcaagcaagcagaccatataacatctaccctcacggaatcactgatgtccgtcctttgtattcaaggagattaccaaaaggtgtaaaacatttgaaggattttccaattctgccaggagaaatattcaaatataaatggacagtgactgtagaagatgggccaactaaatcagatcctcggtgcctgacccgctattactctagtttcgttaatatggagagagatctagcttcaggactcattggccctctcctcatctgctacaaagaatctgtagatcaaagaggaaaccagataatgtcagacaagaggaatgtcatcctgttttctgtatttgatgagaaccgaagctggtacctcacagagaatatacaacgctttctccccaatccagctggagtgcagcttgaggatccagagttccaagcctccaacatcatgcacagcatcaatggctatgtttttgatagtttgcagttgtcagtttgtttgcatgaggtggcatactggtacattctaagcattggagcacagactgacttcctttctgtcttcttctctggatataccttcaaacacaaaatggtctatgaagacacactcaccctattcccattctcaggagaaactgtcttcatgtcgatggaaaacccaggtctatggattctggggtgccacaactcagactttcggaacagaggcatgaccgccttactgaaggtttctagttgtgacaagaacactggtgattattacgaggacagttatgaagatatttcagcatacttgctgagtaaaaacaatgccattgaaccaagaagcttctctcaaaacccaccagtcttgaaacgccatcaacgggaaataactcgtactactcttcagtcagatcaagaggaaatcgattatgatgataccatatcagttgaaatgaagaaggaagattttgacatttatgatgaggatgaaaatcagagcccccgcagctttcaaaagaaaacacgacactattttattgctgcagtggagaggctctgggattatgggatgagtagctccccacatgttctaagaaacagggctcagggcgcgccaggtacacccggatcgggtacagcgtcatcgagccccggtgcgtcacctggtacgtcgagcacggggtcgccaggggcgtcccctgggacgtcctcaacaggctcgcccggtgcgtcacccggcacgtcgtccacgggttcacctggtagctccccttccgcgtccactggcaccgggcctggaactccggggagcggcacagcgagctcgtcgccgggagcatcgcctgggacatcgagcaccgggtcgccaggagcatcgcccggaacatccagcacaggaagccccggcgcgtcgcccgggacatcaagcacaggttccccgggatcgagcacgccgtccggagccactggatcaccagggagctcgacaccttccggcgcaacgggatcgcccggagccagcccgggtacgtcaagcactggctcccctgcctcgagcagggctcagagtggcagtgtccctcagttcaagaaagttgttttccaggaatttactgatggctcctttactcagcccttataccgtggagaactaaatgaacatttgggactcctggggccatatataagagcagaagttgaagataatatcatggtaactttcagaaatcaggcctctcgtccctattccttctattctagccttatttcttatgaggaagatcagaggcaaggagcagaacctagaaaaaactttgtcaagcctaatgaaaccaaaacttacttttggaaagtgcaacatcatatggcacccactaaagatgagtttgactgcaaagcctgggcttatttctctgatgttgacctggaaaaagatgtgcactcaggcctgattggaccccttctggtctgccacactaacacactgaaccctgctcatgggagacaagtgacagtacaggaatttgctctgtttttcaccatctttgatgagaccaaaagctggtacttcactgaaaatatggaaagaaactgcaggggcgcgccaacgtccgaaagtgctacccctgagtcaggccctggtagtgagcctgccacaagcggaagcgaaactccggggacctcagagtctgccactcccgaatcggggccaggctctgaaccggccacttcagggagcgaaacaccaggaacatcggagagcgctaccccggagagcgggccaggaactagtactgagcctagcgagggaagtgcacctggtacaagcgagtccgccacacccgagtctggccctggctctccagcgggctcacccacgagcactgaagagggctctcccgctggcagcccaacgtcgacagaagaaggatcaccagcaggctcccccacatcaacagaggagggtacatcagaatctgctactcccgagagtggacccggtacctccactgagcccagcgaggggagtgcaccaggtgcctcgagcgctccctgcaatatccagatggaagatcccacttttaaagagaattatcgcttccatgcaatcaatggctacataatggatacactacctggcttagtaatggctcaggatcaaaggattcgatggtatctgctcagcatgggcagcaatgaaaacatccattctattcatttcagtggacatgtgttcactgtacgaaaaaaagaggagtataaaatggcactgtacaatctctatccaggtgtttttgagacagtggaaatgttaccatccaaagctggaatttggcgggtggaatgccttattggcgagcatctacatgctgggatgagcacactttttctggtgtacagcaataagtgtcagactcccctgggaatggcttctggacacattagagattttcagattacagcttcaggacaatatggacagtgggccccaaagctggccagacttcattattccggatcaatcaatgcctggagcaccaaggagcccttttcttggatcaaggtggatctgttggcaccaatgattattcacggcatcaagacccagggtgcccgtcagaagttctccagcctctacatctctcagtttatcatcatgtatagtcttgatgggaagaagtggcagacttatcgaggaaattccactggaaccttaatggtcttctttggcaatgtggattcatctgggataaaacacaatatttttaaccctccaattattgctcgatacatccgtttgcacccaactcattatagcattcgcagcactcttcgcatggagttgatgggctgtgatttaaatagttgcagcatgccattgggaatggagagtaaagcaatatcagatgcacagattactgcttcatcctactttaccaatatgtttgccacctggtctccttcaaaagctcgacttcacctccaagggaggagtaatgcctggagacctcaggtgaataatccaaaagagtggctgcaagtggacttccagaagacaatgaaagtcacaggagtaactactcagggagtaaaatctctgcttaccagcatgtatgtgaaggagttcctcatctccagcagtcaagatggccatcagtggactctcttttttcagaatggcaaagtaaaggtttttcagggaaatcaagactccttcacacctgtggtgaactctctagacccaccgttactgactcgctaccttcgaattcacccccagagttgggtgcaccagattgccctgaggatggaggttctgggctgcgaggcacaggacctctacggcgccggatcacctggggccgaaacggccgaacaaaaactcatctcagaagaggatctgtcacctgcaaccggtcatcatcaccatcaccattga

SEQ ID NO: 1047 - protein, 1922 aa, synthetic construct
  REGION 1..1922: note = Description of Artificial Sequence: Synthetic polypeptide
ATRRYYLGAVELSWDYMQSDLGELPVDARFPPRVPKSFPFNTSVVYKKTLFVEFTDHLFNIAKPRPPWMGLLGPTIQAEVYDTVVITLKNMASHPVSLHAVGVSYWKASEGAEYDDQTSQREKEDDKVFPGGSHTYVWQVLKENGPMASDPLCLTYSYLSHVDLVKDLNSGLIGALLVCREGSLAKEKTQTLHKFILLFAVFDEGKSWHSETKNSLMQDRDAASARAWPKMHTVNGYVNRSLPGLIGCHRKSVYWHVIGMGTTPEVHSIFLEGHTFLVRNHRQASLEISPITFLTAQTLLMDLGQFLLFCHISSHQHDGMEAYVKVDSCPEEPQLRMKNNEEAEDYDDDLTDSEMDVVRFDDDNSPSFIQIRSVAKKHPKTWVHYIAAEEEDWDYAPLVLAPDGAPTSTEPSEGSAPGSPAGSPTSTEEGTSTEPSEGSAPGTSTEPSEGSAPGTSESATPESGPGTSTEPSEGSAPGTSESATPESGPGSEPATSGSETPGTSTEPSEGSAPGTSTEPSEGSAPGTSESATPESGPGTSESATPESGPGASSDRSYKSQYLNNGPQRIGRKYKKVRFMAYTDETFKTREAIQHESGILGPLLYGEVGDTLLIIFKNQASRPYNIYPHGITDVRPLYSRRLPKGVKHLKDFPILPGEIFKYKWTVTVEDGPTKSDPRCLTRYYSSFVNMERDLASGLIGPLLICYKESVDQRGNQIMSDKRNVILFSVFDENRSWYLTENIQRFLPNPAGVQLEDPEFQASNIMHSINGYVFDSLQLSVCLHEVAYWYILSIGAQTDFLSVFFSGYTFKHKMVYEDTLTLFPFSGETVFMSMENPGLWILGCHNSDFRNRGMTALLKVSSCDKNTGDYYEDSYEDISAYLLSKNNAIEPRSFSQNPPVLKRHQREITRTTLQGAPGTPGSGTASSSPGASPGTSSTGSPGASPGTSSTGSPGASPGTSSTGSPGSSPSASTGTGPGTPGSGTASSSPGASPGTSSTGSPGASPGTSSTGSPGASPGTSSTGSPGSSTPSGATGSPGSSTPSGATGSPGASPGTSSTGSPASSSDQEEIDYDDTISVEMKKEDFDIYDEDENQSPRSFQKKTRHYFIAAVERLWDYGMSSSPHVLRNRAQGAPGTPGSGTASSSPGASPGTSSTGSPGASPGTSSTGSPGASPGTSSTGSPGSSPSASTGTGPGTPGSGTASSSPGASPGTSSTGSPGASPGTSSTGSPGASPGTSSTGSPGSSTPSGATGSPGSSTPSGATGSPGASPGTSSTGSPASSRAQSGSVPQFKKVVFQEFTDGSFTQPLYRGELNEHLGLLGPYIRAEVEDNIMVTFRNQASRPYSFYSSLISYEEDQRQGAEPRKNFVKPNETKTYFWKVQHHMAPTKDEFDCKAWAYFSDVDLEKDVHSGLIGPLLVCHTNTLNPAHGRQVTVQEFALFFTIFDETKSWYFTENMERNCRAPCNIQMEDPTFKENYRFHAINGYIMDTLPGLVMAQDQRIRWYLLSMGSNENIHSIHFSGHVFTVRKKEEYKMALYNLYPGVFETVEMLPSKAGIWRVECLIGEHLHAGMSTLFLVYSNKCQTPLGMASGHIRDFQITASGQYGQWAPKLARLHYSGSINAWSTKEPFSWIKVDLLAPMIIHGIKTQGARQKFSSLYISQFIIMYSLDGKKWQTYRGNSTGTLMVFFGNVDSSGIKHNIFNPPIIARYIRLHPTHYSIRSTLRMELMGCDLNSCSMPLGMESKAISDAQITASSYFTNMFATWSPSKARLHLQGRSNAWRPQVNNPKEWLQVDFQKTMKVTGVTTQGVKSLLTSMYVKEFLISSSQDGHQWTLFFQNGKVKVFQGNQDSFTPVVNSLDPPLLTRYLRIHPQSWVHQIALRMEVLGCEAQDLYGAGSPGAETAEQKLISEEDLSPATGHHHHHH

SEQ ID NO: 1048 - DNA, 5769 bp, synthetic construct
  misc_feature 1..5769: note = Description of Artificial Sequence: Synthetic polynucleotide
  source 1..5769: mol_type = other DNA
gccaccagaagatactacctgggtgcagtggaactgtcatgggactatatgcaaagtgatctcggtgagctgcctgtggacgcaagatttcctcctagagtgccaaaatcttttccattcaacacctcagtcgtgtacaaaaagactctgtttgtagaattcacggatcaccttttcaacatcgctaagccaaggccaccctggatgggtctgctaggtcctaccatccaggctgaggtttatgatacagtggtcattacacttaagaacatggcttcccatcctgtcagtcttcatgctgttggtgtatcctactggaaagcttctgagggagctgaatatgatgatcagaccagtcaaagggagaaagaagatgataaagtcttccctggtggaagccatacatatgtctggcaggtcctgaaagagaatggtccaatggcctctgacccactgtgccttacctactcatatctttctcatgtggacctggtaaaagacttgaattcaggcctcattggagccctactagtatgtagagaagggagtctggccaaggaaaagacacagaccttgcacaaatttatactactttttgctgtatttgatgaagggaaaagttggcactcagaaacaaagaactccttgatgcaggatagggatgctgcatctgctcgggcctggcctaaaatgcacacagtcaatggttatgtaaacaggtctctgccaggtctgattggatgccacaggaaatcagtctattggcatgtgattggaatgggcaccactcctgaagtgcactcaatattcctcgaaggtcacacatttcttgtgaggaaccatcgccaggctagcttggaaatctcgccaataactttccttactgctcaaacactcttgatggaccttggacagtttctactgttttgtcatatctcttcccaccaacatgatggcatggaagcttatgtcaaagtagacagctgtccagaggaaccccaactacgaatgaaaaataatgaagaagcggaagactatgatgatgatcttactgattctgaaatggatgtggtcaggtttgatgatgacaactctccttcctttatccaaattcgctcagttgccaagaagcatcctaaaacttgggtacattacattgctgctgaagaggaggactgggactatgctcccttagtcctcgcccccgatggcgcgccaaccagtacggagccgtccgaggggagcgcaccaggaagcccggctgggagcccgacttctaccgaagagggtacatctaccgaaccaagtgaaggttcagcaccaggcacctcaacagaaccctctgagggctcggcgcctggtacaagtgagtccgccaccccagaatccgggcctgggacaagcacagaaccttcggaagggagtgcccctggaacatccgaatcggcaaccccagaatcagggccaggatctgagcccgcgacttcgggctccgagacgcctgggacatccaccgagccctccgaaggatcagccccaggcaccagcacggagccctctgagggaagcgcacctggtaccagcgaaagcgcaactcccgaatcaggtcccggtacgagcgagtcggcgaccccggagagcgggccaggtgcctcgagcgacagaagttataaaagtcaatatttgaacaatggccctcagcggattggtaggaagtacaaaaaagtccgatttatggcatacacagatgaaacctttaagactcgtgaagctattcagcatgaatcaggaatcttgggacctttactttatggggaagttggagacacactgttgattatatttaagaatcaagcaagcagaccatataacatctaccctcacggaatcactgatgtccgtcctttgtattcaaggagattaccaaaaggtgtaaaacatttgaaggattttccaattctgccaggagaaatattcaaatataaatggacagtgactgtagaagatgggccaactaaatcagatcctcggtgcctgacccgctattactctagtttcgttaatatggagagagatctagcttcaggactcattggccctctcctcatctgctacaaagaatctgtagatcaaagaggaaaccagataatgtcagacaagaggaatgtcatcctgttttctgtatttgatgagaaccgaagctggtacctcacagagaatatacaacgctttctccccaatccagctggagtgcagcttgaggatccagagttccaagcctccaacatcatgcacagcatcaatggctatgtttttgatagtttgcagttgtcagtttgtttgcatgaggtggcatactggtacattctaagcattggagcacagactgacttcctttctgtcttcttctctggatataccttcaaacacaaaatggtctatgaagacacactcaccctattcccattctcaggagaaactgtcttcatgtcgatggaaaacccaggtctatggattctggggtgccacaactcagactttcggaacagaggcatgaccgccttactgaaggtttctagttgtgacaagaacactggtgattattacgaggacagttatgaagatatttcagcatacttgctgagtaaaaacaatgccattgaaccaagaagcttctctcaaaacccaccagtcttgaaacgccatcaacgggaaataactcgtactactcttcagggcgcgccaggtacacccggatcgggtacagcgtcatcgagccccggtgcgtcacctggtacgtcgagcacggggtcgccaggggcgtcccctgggacgtcctcaacaggctcgcccggtgcgtcacccggcacgtcgtccacgggttcacctggtagctccccttccgcgtccactggcaccgggcctggaactccggggagcggcacagcgagctcgtcgccgggagcatcgcctgggacatcgagcaccgggtcgccaggagcatcgcccggaacatccagcacaggaagccccggcgcgtcgcccgggacatcaagcacaggttccccgggatcgagcacgccgtccggagccactggatcaccagggagctcgacaccttccggcgcaacgggatcgcccggagccagcccgggtacgtcaagcactggctcccctgcctcgagctcagatcaagaggaaatcgattatgatgataccatatcagttgaaatgaagaaggaagattttgacatttatgatgaggatgaaaatcagagcccccgcagctttcaaaagaaaacacgacactattttattgctgcagtggagaggctctgggattatgggatgagtagctccccacatgttctaagaaacagggctcagggcgcgccaggtacacccggatcgggtacagcgtcatcgagccccggtgcgtcacctggtacgtcgagcacggggtcgccaggggcgtcccctgggacgtcctcaacaggctcgcccggtgcgtcacccggcacgtcgtccacgggttcacctggtagctccccttccgcgtccactggcaccgggcctggaactccggggagcggcacagcgagctcgtcgccgggagcatcgcctgggacatcgagcaccgggtcgccaggagcatcgcccggaacatccagcacaggaagccccggcgcgtcgcccgggacatcaagcacaggttccccgggatcgagcacgccgtccggagccactggatcaccagggagctcgacaccttccggcgcaacgggatcgcccggagccagcccgggtacgtcaagcactggctcccctgcctcgagcagggctcagagtggcagtgtccctcagttcaagaaagttgttttccaggaatttactgatggctcctttactcagcccttataccgtggagaactaaatgaacatttgggactcctggggccatatataagagcagaagttgaagataatatcatggtaactttcagaaatcaggcctctcgtccctattccttctattctagccttatttcttatgaggaagatcagaggcaaggagcagaacctagaaaaaactttgtcaagcctaatgaaaccaaaacttacttttggaaagtgcaacatcatatggcacccactaaagatgagtttgactgcaaagcctgggcttatttctctgatgttgacctggaaaaagatgtgcactcaggcctgattggaccccttctggtctgccacactaacacactgaaccctgctcatgggagacaagtgacagtacaggaatttgctctgtttttcaccatctttgatgagaccaaaagctggtacttcactgaaaatatggaaagaaactgcagggctccctgcaatatccagatggaagatcccacttttaaagagaattatcgcttccatgcaatcaatggctacataatggatacactacctggcttagtaatggctcaggatcaaaggattcgatggtatctgctcagcatgggcagcaatgaaaacatccattctattcatttcagtggacatgtgttcactgtacgaaaaaaagaggagtataaaatggcactgtacaatctctatccaggtgtttttgagacagtggaaatgttaccatccaaagctggaatttggcgggtggaatgccttattggcgagcatctacatgctgggatgagcacactttttctggtgtacagcaataagtgtcagactcccctgggaatggcttctggacacattagagattttcagattacagcttcaggacaatatggacagtgggccccaaagctggccagacttcattattccggatcaatcaatgcctggagcaccaaggagcccttttcttggatcaaggtggatctgttggcaccaatgattattcacggcatcaagacccagggtgcccgtcagaagttctccagcctctacatctctcagtttatcatcatgtatagtcttgatgggaagaagtggcagacttatcgaggaaattccactggaaccttaatggtcttctttggcaatgtggattcatctgggataaaacacaatatttttaaccctccaattattgctcgatacatccgtttgcacccaactcattatagcattcgcagcactcttcgcatggagttgatgggctgtgatttaaatagttgcagcatgccattgggaatggagagtaaagcaatatcagatgcacagattactgcttcatcctactttaccaatatgtttgccacctggtctccttcaaaagctcgacttcacctccaagggaggagtaatgcctggagacctcaggtgaataatccaaaagagtggctgcaagtggacttccagaagacaatgaaagtcacaggagtaactactcagggagtaaaatctctgcttaccagcatgtatgtgaaggagttcctcatctccagcagtcaagatggccatcagtggactctcttttttcagaatggcaaagtaaaggtttttcagggaaatcaagactccttcacacctgtggtgaactctctagacccaccgttactgactcgctaccttcgaattcacccccagagttgggtgcaccagattgccctgaggatggaggttctgggctgcgaggcacaggacctctacggcgccggatcacctggggccgaaacggccgaacaaaaactcatctcagaagaggatctgtcacctgcaaccggtcatcatcaccatcaccattga

SEQ ID NO: 1049 - protein, 1919 aa, synthetic construct
  REGION 1..1919: note = Description of Artificial Sequence: Synthetic polypeptide
ATRRYYLGAVELSWDYMQSDLGELPVDARFPPRVPKSFPFNTSVVYKKTLFVEFTDHLFNIAKPRPPWMGLLGPTIQAEVYDTVVITLKNMASHPVSLHAVGVSYWKASEGAEYDDQTSQREKEDDKVFPGGSHTYVWQVLKENGPMASDPLCLTYSYLSHVDLVKDLNSGLIGALLVCREGSLAKEKTQTLHKFILLFAVFDEGKSWHSETKNSLMQDRDAASARAWPKMHTVNGYVNRSLPGLIGCHRKSVYWHVIGMGTTPEVHSIFLEGHTFLVRNHRQASLEISPITFLTAQTLLMDLGQFLLFCHISSHQHDGMEAYVKVDSCPEEPQLRMKNNEEAEDYDDDLTDSEMDVVRFDDDNSPSFIQIRSVAKKHPKTWVHYIAAEEEDWDYAPLVLAPDGAPTSTEPSEGSAPGSPAGSPTSTEEGTSTEPSEGSAPGTSTEPSEGSAPGTSESATPESGPGTSTEPSEGSAPGTSESATPESGPGSEPATSGSETPGTSTEPSEGSAPGTSTEPSEGSAPGTSESATPESGPGTSESATPESGPGASSDRSYKSQYLNNGPQRIGRKYKKVRFMAYTDETFKTREAIQHESGILGPLLYGEVGDTLLIIFKNQASRPYNIYPHGITDVRPLYSRRLPKGVKHLKDFPILPGEIFKYKWTVTVEDGPTKSDPRCLTRYYSSFVNMERDLASGLIGPLLICYKESVDQRGNQIMSDKRNVILFSVFDENRSWYLTENIQRFLPNPAGVQLEDPEFQASNIMHSINGYVFDSLQLSVCLHEVAYWYILSIGAQTDFLSVFFSGYTFKHKMVYEDTLTLFPFSGETVFMSMENPGLWILGCHNSDFRNRGMTALLKVSSCDKNTGDYYEDSYEDISAYLLSKNNAIEPRSFSQNPPVLKRHQREITRTTLQGAPGTPGSGTASSSPGASPGTSSTGSPGASPGTSSTGSPGASPGTSSTGSPGSSPSASTGTGPGTPGSGTASSSPGASPGTSSTGSPGASPGTSSTGSPGASPGTSSTGSPGSSTPSGATGSPGSSTPSGATGSPGASPGTSSTGSPASSSDQEEIDYDDTISVEMKKEDFDIYDEDENQSPRSFQKKTRHYFIAAVERLWDYGMSSSPHVLRNRAQSGSVPQFKKVVFQEFTDGSFTQPLYRGELNEHLGLLGPYIRAEVEDNIMVTFRNQASRPYSFYSSLISYEEDQRQGAEPRKNFVKPNETKTYFWKVQHHMAPTKDEFDCKAWAYFSDVDLEKDVHSGLIGPLLVCHTNTLNPAHGRQVTVQEFALFFTIFDETKSWYFTENMERNCRGAPTSESATPESGPGSEPATSGSETPGTSESATPESGPGSEPATSGSETPGTSESATPESGPGTSTEPSEGSAPGTSESATPESGPGSPAGSPTSTEEGSPAGSPTSTEEGSPAGSPTSTEEGTSESATPESGPGTSTEPSEGSAPGASSAPCNIQMEDPTFKENYRFHAINGYIMDTLPGLVMAQDQRIRWYLLSMGSNENIHSIHFSGHVFTVRKKEEYKMALYNLYPGVFETVEMLPSKAGIWRVECLIGEHLHAGMSTLFLVYSNKCQTPLGMASGHIRDFQITASGQYGQWAPKLARLHYSGSINAWSTKEPFSWIKVDLLAPMIIHGIKTQGARQKFSSLYISQFIIMYSLDGKKWQTYRGNSTGTLMVFFGNVDSSGIKHNIFNPPIIARYIRLHPTHYSIRSTLRMELMGCDLNSCSMPLGMESKAISDAQITASSYFTNMFATWSPSKARLHLQGRSNAWRPQVNNPKEWLQVDFQKTMKVTGVTTQGVKSLLTSMYVKEFLISSSQDGHQWTLFFQNGKVKVFQGNQDSFTPVVNSLDPPLLTRYLRIHPQSWVHQIALRMEVLGCEAQDLYGAGSPGAETAEQKLISEEDLSPATGHHHHHH

SEQ ID NO: 1050 - DNA, 5760 bp, synthetic construct
  misc_feature 1..5760: note = Description of Artificial Sequence: Synthetic polynucleotide
  source 1..5760: mol_type = other DNA
gccaccagaagatactacctgggtgcagtggaactgtcatgggactatatgcaaagtgatctcggtgagctgcctgtggacgcaagatttcctcctagagtgccaaaatcttttccattcaacacctcagtcgtgtacaaaaagactctgtttgtagaattcacggatcaccttttcaacatcgctaagccaaggccaccctggatgggtctgctaggtcctaccatccaggctgaggtttatgatacagtggtcattacacttaagaacatggcttcccatcctgtcagtcttcatgctgttggtgtatcctactggaaagcttctgagggagctgaatatgatgatcagaccagtcaaagggagaaagaagatgataaagtcttccctggtggaagccatacatatgtctggcaggtcctgaaagagaatggtccaatggcctctgacccactgtgccttacctactcatatctttctcatgtggacctggtaaaagacttgaattcaggcctcattggagccctactagtatgtagagaagggagtctggccaaggaaaagacacagaccttgcacaaatttatactactttttgctgtatttgatgaagggaaaagttggcactcagaaacaaagaactccttgatgcaggatagggatgctgcatctgctcgggcctggcctaaaatgcacacagtcaatggttatgtaaacaggtctctgccaggtctgattggatgccacaggaaatcagtctattggcatgtgattggaatgggcaccactcctgaagtgcactcaatattcctcgaaggtcacacatttcttgtgaggaaccatcgccaggctagcttggaaatctcgccaataactttccttactgctcaaacactcttgatggaccttggacagtttctactgttttgtcatatctcttcccaccaacatgatggcatggaagcttatgtcaaagtagacagctgtccagaggaaccccaactacgaatgaaaaataatgaagaagcggaagactatgatgatgatcttactgattctgaaatggatgtggtcaggtttgatgatgacaactctccttcctttatccaaattcgctcagttgccaagaagcatcctaaaacttgggtacattacattgctgctgaagaggaggactgggactatgctcccttagtcctcgcccccgatggcgcgccaaccagtacggagccgtccgaggggagcgcaccaggaagcccggctgggagcccgacttctaccgaagagggtacatctaccgaaccaagtgaaggttcagcaccaggcacctcaacagaaccctctgagggctcggcgcctggtacaagtgagtccgccaccccagaatccgggcctgggacaagcacagaaccttcggaagggagtgcccctggaacatccgaatcggcaaccccagaatcagggccaggatctgagcccgcgacttcgggctccgagacgcctgggacatccaccgagccctccgaaggatcagccccaggcaccagcacggagccctctgagggaagcgcacctggtaccagcgaaagcgcaactcccgaatcaggtcccggtacgagcgagtcggcgaccccggagagcgggccaggtgcctcgagcgacagaagttataaaagtcaatatttgaacaatggccctcagcggattggtaggaagtacaaaaaagtccgatttatggcatacacagatgaaacctttaagactcgtgaagctattcagcatgaatcaggaatcttgggacctttactttatggggaagttggagacacactgttgattatatttaagaatcaagcaagcagaccatataacatctaccctcacggaatcactgatgtccgtcctttgtattcaaggagattaccaaaaggtgtaaaacatttgaaggattttccaattctgccaggagaaatattcaaatataaatggacagtgactgtagaagatgggccaactaaatcagatcctcggtgcctgacccgctattactctagtttcgttaatatggagagagatctagcttcaggactcattggccctctcctcatctgctacaaagaatctgtagatcaaagaggaaaccagataatgtcagacaagaggaatgtcatcctgttttctgtatttgatgagaaccgaagctggtacctcacagagaatatacaacgctttctccccaatccagctggagtgcagcttgaggatccagagttccaagcctccaacatcatgcacagcatcaatggctatgtttttgatagtttgcagttgtcagtttgtttgcatgaggtggcatactggtacattctaagcattggagcacagactgacttcctttctgtcttcttctctggatataccttcaaacacaaaatggtctatgaagacacactcaccctattcccattctcaggagaaactgtcttcatgtcgatggaaaacccaggtctatggattctggggtgccacaactcagactttcggaacagaggcatgaccgccttactgaaggtttctagttgtgacaagaacactggtgattattacgaggacagttatgaagatatttcagcatacttgctgagtaaaaacaatgccattgaaccaagaagcttctctcaaaacccaccagtcttgaaacgccatcaacgggaaataactcgtactactcttcagggcgcgccaggtacacccggatcgggtacagcgtcatcgagccccggtgcgtcacctggtacgtcgagcacggggtcgccaggggcgtcccctgggacgtcctcaacaggctcgcccggtgcgtcacccggcacgtcgtccacgggttcacctggtagctccccttccgcgtccactggcaccgggcctggaactccggggagcggcacagcgagctcgtcgccgggagcatcgcctgggacatcgagcaccgggtcgccaggagcatcgcccggaacatccagcacaggaagccccggcgcgtcgcccgggacatcaagcacaggttccccgggatcgagcacgccgtccggagccactggatcaccagggagctcgacaccttccggcgcaacgggatcgcccggagccagcccgggtacgtcaagcactggctcccctgcctcgagctcagatcaagaggaaatcgattatgatgataccatatcagttgaaatgaagaaggaagattttgacatttatgatgaggatgaaaatcagagcccccgcagctttcaaaagaaaacacgacactattttattgctgcagtggagaggctctgggattatgggatgagtagctccccacatgttctaagaaacagggctcagagtggcagtgtccctcagttcaagaaagttgttttccaggaatttactgatggctcctttactcagcccttataccgtggagaactaaatgaacatttgggactcctggggccatatataagagcagaagttgaagataatatcatggtaactttcagaaatcaggcctctcgtccctattccttctattctagccttatttcttatgaggaagatcagaggcaaggagcagaacctagaaaaaactttgtcaagcctaatgaaaccaaaacttacttttggaaagtgcaacatcatatggcacccactaaagatgagtttgactgcaaagcctgggcttatttctctgatgttgacctggaaaaagatgtgcactcaggcctgattggaccccttctggtctgccacactaacacactgaaccctgctcatgggagacaagtgacagtacaggaatttgctctgtttttcaccatctttgatgagaccaaaagctggtacttcactgaaaatatggaaagaaactgcaggggcgcgccaacgtccgaaagtgctacccctgagtcaggccctggtagtgagcctgccacaagcggaagcgaaactccggggacctcagagtctgccactcccgaatcggggccaggctctgaaccggccacttcagggagcgaaacaccaggaacatcggagagcgctaccccggagagcgggccaggaactagtactgagcctagcgagggaagtgcacctggtacaagcgagtccgccacacccgagtctggccctggctctccagcgggctcacccacgagcactgaagagggctctcccgctggcagcccaacgtcgacagaagaaggatcaccagcaggctcccccacatcaacagaggagggtacatcagaatctgctactcccgagagtggacccggtacctccactgagcccagcgaggggagtgcaccaggtgcctcgagcgctccctgcaatatccagatggaagatcccacttttaaagagaattatcgcttccatgcaatcaatggctacataatggatacactacctggcttagtaatggctcaggatcaaaggattcgatggtatctgctcagcatgggcagcaatgaaaacatccattctattcatttcagtggacatgtgttcactgtacgaaaaaaagaggagtataaaatggcactgtacaatctctatccaggtgtttttgagacagtggaaatgttaccatccaaagctggaatttggcgggtggaatgccttattggcgagcatctacatgctgggatgagcacactttttctggtgtacagcaataagtgtcagactcccctgggaatggcttctggacacattagagattttcagattacagcttcaggacaatatggacagtgggccccaaagctggccagacttcattattccggatcaatcaatgcctggagcaccaaggagcccttttcttggatcaaggtggatctgttggcaccaatgattattcacggcatcaagacccagggtgcccgtcagaagttctccagcctctacatctctcagtttatcatcatgtatagtcttgatgggaagaagtggcagacttatcgaggaaattccactggaaccttaatggtcttctttggcaatgtggattcatctgggataaaacacaatatttttaaccctccaattattgctcgatacatccgtttgcacccaactcattatagcattcgcagcactcttcgcatggagttgatgggctgtgatttaaatagttgcagcatgccattgggaatggagagtaaagcaatatcagatgcacagattactgcttcatcctactttaccaatatgtttgccacctggtctccttcaaaagctcgacttcacctccaagggaggagtaatgcctggagacctcaggtgaataatccaaaagagtggctgcaagtggacttccagaagacaatgaaagtcacaggagtaactactcagggagtaaaatctctgcttaccagcatgtatgtgaaggagttcctcatctccagcagtcaagatggccatcagtggactctcttttttcagaatggcaaagtaaaggtttttcagggaaatcaagactccttcacacctgtggtgaactctctagacccaccgttactgactcgctaccttcgaattcacccccagagttgggtgcaccagattgccctgaggatggaggttctgggctgcgaggcacaggacctctacggcgccggatcacctggggccgaaacggccgaacaaaaactcatctcagaagaggatctgtcacctgcaaccggtcatcatcaccatcaccattga

SEQ ID NO: 1051 - protein, 1922 aa, synthetic construct
  REGION 1..1922: note = Description of Artificial Sequence: Synthetic polypeptide
ATRRYYLGAVELSWDYMQSDLGELPVDARFPPRVPKSFPFNTSVVYKKTLFVEFTDHLFNIAKPRPPWMGLLGPTIQAEVYDTVVITLKNMASHPVSLHAVGVSYWKASEGAEYDDQTSQREKEDDKVFPGGSHTYVWQVLKENGPMASDPLCLTYSYLSHVDLVKDLNSGLIGALLVCREGSLAKEKTQTLHKFILLFAVFDEGKSWHSETKNSLMQDRDAASARAWPKMHTVNGYVNRSLPGLIGCHRKSVYWHVIGMGTTPEVHSIFLEGHTFLVRNHRQASLEISPITFLTAQTLLMDLGQFLLFCHISSHQHDGMEAYVKVDSCPEEPQLRMKNNEEAEDYDDDLTDSEMDVVRFDDDNSPSFIQIRSVAKKHPKTWVHYIAAEEEDWDYAPLVLAPDGAPTSTEPSEGSAPGSPAGSPTSTEEGTSTEPSEGSAPGTSTEPSEGSAPGTSESATPESGPGTSTEPSEGSAPGTSESATPESGPGSEPATSGSETPGTSTEPSEGSAPGTSTEPSEGSAPGTSESATPESGPGTSESATPESGPGASSDRSYKSQYLNNGPQRIGRKYKKVRFMAYTDETFKTREAIQHESGILGPLLYGEVGDTLLIIFKNQASRPYNIYPHGITDVRPLYSRRLPKGVKHLKDFPILPGEIFKYKWTVTVEDGPTKSDPRCLTRYYSSFVNMERDLASGLIGPLLICYKESVDQRGNQIMSDKRNVILFSVFDENRSWYLTENIQRFLPNPAGVQLEDPEFQASNIMHSINGYVFDSLQLSVCLHEVAYWYILSIGAQTDFLSVFFSGYTFKHKMVYEDTLTLFPFSGETVFMSMENPGLWILGCHNSDFRNRGMTALLKVSSCDKNTGDYYEDSYEDISAYLLSKNNAIEPRSFSQNPPVLKRHQREITRTTLQSDQEEIDYDDTISVEMKKEDFDIYDEDENQSPRSFQKKTRHYFIAAVERLWDYGMSSSPHVLRNRAQGAPGTPGSGTASSSPGASPGTSSTGSPGASPGTSSTGSPGASPGTSSTGSPGSSPSASTGTGPGTPGSGTASSSPGASPGTSSTGSPGASPGTSSTGSPGASPGTSSTGSPGSSTPSGATGSPGSSTPSGATGSPGASPGTSSTGSPASSRAQSGSVPQFKKVVFQEFTDGSFTQPLYRGELNEHLGLLGPYIRAEVEDNIMVTFRNQASRPYSFYSSLISYEEDQRQGAEPRKNFVKPNETKTYFWKVQHHMAPTKDEFDCKAWAYFSDVDLEKDVHSGLIGPLLVCHTNTLNPAHGRQVTVQEFALFFTIFDETKSWYFTENMERNCRGAPTSESATPESGPGSEPATSGSETPGTSESATPESGPGSEPATSGSETPGTSESATPESGPGTSTEPSEGSAPGTSESATPESGPGSPAGSPTSTEEGSPAGSPTSTEEGSPAGSPTSTEEGTSESATPESGPGTSTEPSEGSAPGASSAPCNIQMEDPTFKENYRFHAINGYIMDTLPGLVMAQDQRIRWYLLSMGSNENIHSIHFSGHVFTVRKKEEYKMALYNLYPGVFETVEMLPSKAGIWRVECLIGEHLHAGMSTLFLVYSNKCQTPLGMASGHIRDFQITASGQYGQWAPKLARLHYSGSINAWSTKEPFSWIKVDLLAPMIIHGIKTQGARQKFSSLYISQFIIMYSLDGKKWQTYRGNSTGTLMVFFGNVDSSGIKHNIFNPPIIARYIRLHPTHYSIRSTLRMELMGCDLNSCSMPLGMESKAISDAQITASSYFTNMFATWSPSKARLHLQGRSNAWRPQVNNPKEWLQVDFQKTMKVTGVTTQGVKSLLTSMYVKEFLISSSQDGHQWTLFFQNGKVKVFQGNQDSFTPVVNSLDPPLLTRYLRIHPQSWVHQIALRMEVLGCEAQDLYGAGSPGAETAEQKLISEEDLSPATGHHHHHH

SEQ ID NO: 1052 - DNA, 5769 bp, synthetic construct
  misc_feature 1..5769: note = Description of Artificial Sequence: Synthetic polynucleotide
  source 1..5769: mol_type = other DNA
gccaccagaagatactacctgggtgcagtggaactgtcatgggactatatgcaaagtgatctcggtgagctgcctgtggacgcaagatttcctcctagagtgccaaaatcttttccattcaacacctcagtcgtgtacaaaaagactctgtttgtagaattcacggatcaccttttcaacatcgctaagccaaggccaccctggatgggtctgctaggtcctaccatccaggctgaggtttatgatacagtggtcattacacttaagaacatggcttcccatcctgtcagtcttcatgctgttggtgtatcctactggaaagcttctgagggagctgaatatgatgatcagaccagtcaaagggagaaagaagatgataaagtcttccctggtggaagccatacatatgtctggcaggtcctgaaagagaatggtccaatggcctctgacccactgtgccttacctactcatatctttctcatgtggacctggtaaaagacttgaattcaggcctcattggagccctactagtatgtagagaagggagtctggccaaggaaaagacacagaccttgcacaaatttatactactttttgctgtatttgatgaagggaaaagttggcactcagaaacaaagaactccttgatgcaggatagggatgctgcatctgctcgggcctggcctaaaatgcacacagtcaatggttatgtaaacaggtctctgccaggtctgattggatgccacaggaaatcagtctattggcatgtgattggaatgggcaccactcctgaagtgcactcaatattcctcgaaggtcacacatttcttgtgaggaaccatcgccaggctagcttggaaatctcgccaataactttccttactgctcaaacactcttgatggaccttggacagtttctactgttttgtcatatctcttcccaccaacatgatggcatggaagcttatgtcaaagtagacagctgtccagaggaaccccaactacgaatgaaaaataatgaagaagcggaagactatgatgatgatcttactgattctgaaatggatgtggtcaggtttgatgatgacaactctccttcctttatccaaattcgctcagttgccaagaagcatcctaaaacttgggtacattacattgctgctgaagaggaggactgggactatgctcccttagtcctcgcccccgatggcgcgccaaccagtacggagccgtccgaggggagcgcaccaggaagcccggctgggagcccgacttctaccgaagagggtacatctaccgaaccaagtgaaggttcagcaccaggcacctcaacagaaccctctgagggctcggcgcctggtacaagtgagtccgccaccccagaatccgggcctgggacaagcacagaaccttcggaagggagtgcccctggaacatccgaatcggcaaccccagaatcagggccaggatctgagcccgcgacttcgggctccgagacgcctgggacatccaccgagccctccgaaggatcagccccaggcaccagcacggagccctctgagggaagcgcacctggtaccagcgaaagcgcaactcccgaatcaggtcccggtacgagcgagtcggcgaccccggagagcgggccaggtgcctcgagcgacagaagttataaaagtcaatatttgaacaatggccctcagcggattggtaggaagtacaaaaaagtccgatttatggcatacacagatgaaacctttaagactcgtgaagctattcagcatgaatcaggaatcttgggacctttactttatggggaagttggagacacactgttgattatatttaagaatcaagcaagcagaccatataacatctaccctcacggaatcactgatgtccgtcctttgtattcaaggagattaccaaaaggtgtaaaacatttgaaggattttccaattctgccaggagaaatattcaaatataaatggacagtgactgtagaagatgggccaactaaatcagatcctcggtgcctgacccgctattactctagtttcgttaatatggagagagatctagcttcaggactcattggccctctcctcatctgctacaaagaatctgtagatcaaagaggaaaccagataatgtcagacaagaggaatgtcatcctgttttctgtatttgatgagaaccgaagctggtacctcacagagaatatacaacgctttctccccaatccagctggagtgcagcttgaggatccagagttccaagcctccaacatcatgcacagcatcaatggctatgtttttgatagtttgcagttgtcagtttgtttgcatgaggtggcatactggtacattctaagcattggagcacagactgacttcctttctgtcttcttctctggatataccttcaaacacaaaatggtctatgaagacacactcaccctattcccattctcaggagaaactgtcttcatgtcgatggaaaacccaggtctatggattctggggtgccacaactcagactttcggaacagaggcatgaccgccttactgaaggtttctagttgtgacaagaacactggtgattattacgaggacagttatgaagatatttcagcatacttgctgagtaaaaacaatgccattgaaccaagaagcttctctcaaaacccaccagtcttgaaacgccatcaacgggaaataactcgtactactcttcagtcagatcaagaggaaatcgattatgatgataccatatcagttgaaatgaagaaggaagattttgacatttatgatgaggatgaaaatcagagcccccgcagctttcaaaagaaaacacgacactattttattgctgcagtggagaggctctgggattatgggatgagtagctccccacatgttctaagaaacagggctcagggcgcgccaggtacacccggatcgggtacagcgtcatcgagccccggtgcgtcacctggtacgtcgagcacggggtcgccaggggcgtcccctgggacgtcctcaacaggctcgcccggtgcgtcacccggcacgtcgtccacgggttcacctggtagctccccttccgcgtccactggcaccgggcctggaactccggggagcggcacagcgagctcgtcgccgggagcatcgcctgggacatcgagcaccgggtcgccaggagcatcgcccggaacatccagcacaggaagccccggcgcgtcgcccgggacatcaagcacaggttccccgggatcgagcacgccgtccggagccactggatcaccagggagctcgacaccttccggcgcaacgggatcgcccggagccagcccgggtacgtcaagcactggctcccctgcctcgagcagggctcagagtggcagtgtccctcagttcaagaaagttgttttccaggaatttactgatggctcctttactcagcccttataccgtggagaactaaatgaacatttgggactcctggggccatatataagagcagaagttgaagataatatcatggtaactttcagaaatcaggcctctcgtccctattccttctattctagccttatttcttatgaggaagatcagaggcaaggagcagaacctagaaaaaactttgtcaagcctaatgaaaccaaaacttacttttggaaagtgcaacatcatatggcacccactaaagatgagtttgactgcaaagcctgggcttatttctctgatgttgacctggaaaaagatgtgcactcaggcctgattggaccccttctggtctgccacactaacacactgaaccctgctcatgggagacaagtgacagtacaggaatttgctctgtttttcaccatctttgatgagaccaaaagctggtacttcactgaaaatatggaaagaaactgcaggggcgcgccaacgtccgaaagtgctacccctgagtcaggccctggtagtgagcctgccacaagcggaagcgaaactccggggacctcagagtctgccactcccgaatcggggccaggctctgaaccggccacttcagggagcgaaacaccaggaacatcggagagcgctaccccggagagcgggccaggaactagtactgagcctagcgagggaagtgcacctggtacaagcgagtccgccacacccgagtctggccctggctctccagcgggctcacccacgagcactgaagagggctctcccgctggcagcccaacgtcgacagaagaaggatcaccagcaggctcccccacatcaacagaggagggtacatcagaatctgctactcccgagagtggacccggtacctccactgagcccagcgaggggagtgcaccaggtgcctcgagcgctccctgcaatatccagatggaagatcccacttttaaagagaattatcgcttccatgcaatcaatggctacataatggatacactacctggcttagtaatggctcaggatcaaaggattcgatggtatctgctcagcatgggcagcaatgaaaacatccattctattcatttcagtggacatgtgttcactgtacgaaaaaaagaggagtataaaatggcactgtacaatctctatccaggtgtttttgagacagtggaaatgttaccatccaaagctggaatttggcgggtggaatgccttattggcgagcatctacatgctgggatgagcacactttttctggtgtacagcaataagtgtcagactcccctgggaatggcttctggacacattagagattttcagattacagcttcaggacaatatggacagtgggccccaaagctggccagacttcattattccggatcaatcaatgcctggagcaccaaggagcccttttcttggatcaaggtggatctgttggcaccaatgattattcacggcatcaagacccagggtgcccgtcagaagttctccagcctctacatctctcagtttatcatcatgtatagtcttgatgggaagaagtggcagacttatcgaggaaattccactggaaccttaatggtcttctttggcaatgtggattcatctgggataaaacacaatatttttaaccctccaattattgctcgatacatccgtttgcacccaactcattatagcattcgcagcactcttcgcatggagttgatgggctgtgatttaaatagttgcagcatgccattgggaatggagagtaaagcaatatcagatgcacagattactgcttcatcctactttaccaatatgtttgccacctggtctccttcaaaagctcgacttcacctccaagggaggagtaatgcctggagacctcaggtgaataatccaaaagagtggctgcaagtggacttccagaagacaatgaaagtcacaggagtaactactcagggagtaaaatctctgcttaccagcatgtatgtgaaggagttcctcatctccagcagtcaagatggccatcagtggactctcttttttcagaatggcaaagtaaaggtttttcagggaaatcaagactccttcacacctgtggtgaactctctagacccaccgttactgactcgctaccttcgaattcacccccagagttgggtgcaccagattgccctgaggatggaggttctgggctgcgaggcacaggacctctacggcgccggatcacctggggccgaaacggccgaacaaaaactcatctcagaagaggatctgtcacctgcaaccggtcatcatcaccatcaccattga

SEQ ID NO: 1053 - protein, 1922 aa, synthetic construct
  REGION 1..1922: note = Description of Artificial Sequence: Synthetic polypeptide
ATRRYYLGAVELSWDYMQSDLGELPVDARFPPRVPKSFPFNTSVVYKKTLFVEFTDHLFNIAKPRPPWMGLLGPTIQAEVYDTVVITLKNMASHPVSLHAVGVSYWKASEGAEYDDQTSQREKEDDKVFPGGSHTYVWQVLKENGPMASDPLCLTYSYLSHVDLVKDLNSGLIGALLVCREGSLAKEKTQTLHKFILLFAVFDEGKSWHSETKNSLMQDRDAASARAWPKMHTVNGYVNRSLPGLIGCHRKSVYWHVIGMGTTPEVHSIFLEGHTFLVRNHRQASLEISPITFLTAQTLLMDLGQFLLFCHISSHQHDGMEAYVKVDSCPEEPQLRMKNNEEAEDYDDDLTDSEMDVVRFDDDNSPSFIQIRSVAKKHPKTWVHYIAAEEEDWDYAPLVLAPDDRSYKSQYLNNGPQRIGRKYKKVRFMAYTDETFKTREAIQHESGILGPLLYGEVGDTLLIIFKNQASRPYNIYPHGITDVRPLYSRRLPKGVKHLKDFPILPGEIFKYKWTVTVEDGPTKSDPRCLTRYYSSFVNMERDLASGLIGPLLICYKESVDQRGNQIMSDKRNVILFSVFDENRSWYLTENIQRFLPNPAGVQLEDPEFQASNIMHSINGYVFDSLQLSVCLHEVAYWYILSIGAQTDFLSVFFSGYTFKHKMVYEDTLTLFPFSGETVFMSMENPGLWILGCHNSDFRNRGMTALLKVSSCDKNTGDYYEDSYEDISAYLLSKNNAIEPRSFSQNPPVLKRHQREITRTTLQGAPGTPGSGTASSSPGASPGTSSTGSPGASPGTSSTGSPGASPGTSSTGSPGSSPSASTGTGPGTPGSGTASSSPGASPGTSSTGSPGASPGTSSTGSPGASPGTSSTGSPGSSTPSGATGSPGSSTPSGATGSPGASPGTSSTGSPASSSDQEEIDYDDTISVEMKKEDFDIYDEDENQSPRSFQKKTRHYFIAAVERLWDYGMSSSPHVLRNRAQGAPGTPGSGTASSSPGASPGTSSTGSPGASPGTSSTGSPGASPGTSSTGSPGSSPSASTGTGPGTPGSGTASSSPGASPGTSSTGSPGASPGTSSTGSPGASPGTSSTGSPGSSTPSGATGSPGSSTPSGATGSPGASPGTSSTGSPASSRAQSGSVPQFKKVVFQEFTDGSFTQPLYRGELNEHLGLLGPYIRAEVEDNIMVTFRNQASRPYSFYSSLISYEEDQRQGAEPRKNFVKPNETKTYFWKVQHHMAPTKDEFDCKAWAYFSDVDLEKDVHSGLIGPLLVCHTNTLNPAHGRQVTVQEFALFFTIFDETKSWYFTENMERNCRGAPTSESATPESGPGSEPATSGSETPGTSESATPESGPGSEPATSGSETPGTSESATPESGPGTSTEPSEGSAPGTSESATPESGPGSPAGSPTSTEEGSPAGSPTSTEEGSPAGSPTSTEEGTSESATPESGPGTSTEPSEGSAPGASSAPCNIQMEDPTFKENYRFHAINGYIMDTLPGLVMAQDQRIRWYLLSMGSNENIHSIHFSGHVFTVRKKEEYKMALYNLYPGVFETVEMLPSKAGIWRVECLIGEHLHAGMSTLFLVYSNKCQTPLGMASGHIRDFQITASGQYGQWAPKLARLHYSGSINAWSTKEPFSWIKVDLLAPMIIHGIKTQGARQKFSSLYISQFIIMYSLDGKKWQTYRGNSTGTLMVFFGNVDSSGIKHNIFNPPIIARYIRLHPTHYSIRSTLRMELMGCDLNSCSMPLGMESKAISDAQITASSYFTNMFATWSPSKARLHLQGRSNAWRPQVNNPKEWLQVDFQKTMKVTGVTTQGVKSLLTSMYVKEFLISSSQDGHQWTLFFQNGKVKVFQGNQDSFTPVVNSLDPPLLTRYLRIHPQSWVHQIALRMEVLGCEAQDLYGAGSPGAETAEQKLISEEDLSPATGHHHHHH

SEQ ID NO: 1054 - DNA, 5769 bp, synthetic construct
  misc_feature 1..5769: note = Description of Artificial Sequence: Synthetic polynucleotide
  source 1..5769: mol_type = other DNA
gccaccagaagatactacctgggtgcagtggaactgtcatgggactatatgcaaagtgatctcggtgagctgcctgtggacgcaagatttcctcctagagtgccaaaatcttttccattcaacacctcagtcgtgtacaaaaagactctgtttgtagaattcacggatcaccttttcaacatcgctaagccaaggccaccctggatgggtctgctaggtcctaccatccaggctgaggtttatgatacagtggtcattacacttaagaacatggcttcccatcctgtcagtcttcatgctgttggtgtatcctactggaaagcttctgagggagctgaatatgatgatcagaccagtcaaagggagaaagaagatgataaagtcttccctggtggaagccatacatatgtctggcaggtcctgaaagagaatggtccaatggcctctgacccactgtgccttacctactcatatctttctcatgtggacctggtaaaagacttgaattcaggcctcattggagccctactagtatgtagagaagggagtctggccaaggaaaagacacagaccttgcacaaatttatactactttttgctgtatttgatgaagggaaaagttggcactcagaaacaaagaactccttgatgcaggatagggatgctgcatctgctcgggcctggcctaaaatgcacacagtcaatggttatgtaaacaggtctctgccaggtctgattggatgccacaggaaatcagtctattggcatgtgattggaatgggcaccactcctgaagtgcactcaatattcctcgaaggtcacacatttcttgtgaggaaccatcgccaggctagcttggaaatctcgccaataactttccttactgctcaaacactcttgatggaccttggacagtttctactgttttgtcatatctcttcccaccaacatgatggcatggaagcttatgtcaaagtagacagctgtccagaggaaccccaactacgaatgaaaaataatgaagaagcggaagactatgatgatgatcttactgattctgaaatggatgtggtcaggtttgatgatgacaactctccttcctttatccaaattcgctcagttgccaagaagcatcctaaaacttgggtacattacattgctgctgaagaggaggactgggactatgctcccttagtcctcgcccccgatgacagaagttataaaagtcaatatttgaacaatggccctcagcggattggtaggaagtacaaaaaagtccgatttatggcatacacagatgaaacctttaagactcgtgaagctattcagcatgaatcaggaatcttgggacctttactttatggggaagttggagacacactgttgattatatttaagaatcaagcaagcagaccatataacatctaccctcacggaatcactgatgtccgtcctttgtattcaaggagattaccaaaaggtgtaaaacatttgaaggattttccaattctgccaggagaaatattcaaatataaatggacagtgactgtagaagatgggccaactaaatcagatcctcggtgcctgacccgctattactctagtttcgttaatatggagagagatctagcttcaggactcattggccctctcctcatctgctacaaagaatctgtagatcaaagaggaaaccagataatgtcagacaagaggaatgtcatcctgttttctgtatttgatgagaaccgaagctggtacctcacagagaatatacaacgctttctccccaatccagctggagtgcagcttgaggatccagagttccaagcctccaacatcatgcacagcatcaatggctatgtttttgatagtttgcagttgtcagtttgtttgcatgaggtggcatactggtacattctaagcattggagcacagactgacttcctttctgtcttcttctctggatataccttcaaacacaaaatggtctatgaagacacactcaccctattcccattctcaggagaaactgtcttcatgtcgatggaaaacccaggtctatggattctggggtgccacaactcagactttcggaacagaggcatgaccgccttactgaaggtttctagttgtgacaagaacactggtgattattacgaggacagttatgaagatatttcagcatacttgctgagtaaaaacaatgccattgaaccaagaagcttctctcaaaacccaccagtcttgaaacgccatcaacgggaaataactcgtactactcttcagggcgcgccaggtacacccggatcgggtacagcgtcatcgagccccggtgcgtcacctggtacgtcgagcacggggtcgccaggggcgtcccctgggacgtcctcaacaggctcgcccggtgcgtcacccggcacgtcgtccacgggttcacctggtagctccccttccgcgtccactggcaccgggcctggaactccggggagcggcacagcgagctcgtcgccgggagcatcgcctgggacatcgagcaccgggtcgccaggagcatcgcccggaacatccagcacaggaagccccggcgcgtcgcccgggacatcaagcacaggttccccgggatcgagcacgccgtccggagccactggatcaccagggagctcgacaccttccggcgcaacgggatcgcccggagccagcccgggtacgtcaagcactggctcccctgcctcgagctcagatcaagaggaaatcgattatgatgataccatatcagttgaaatgaagaaggaagattttgacatttatgatgaggatgaaaatcagagcccccgcagctttcaaaagaaaacacgacactattttattgctgcagtggagaggctctgggattatgggatgagtagctccccacatgttctaagaaacagggctcagggcgcgccaggtacacccggatcgggtacagcgtcatcgagccccggtgcgtcacctggtacgtcgagcacggggtcgccaggggcgtcccctgggacgtcctcaacaggctcgcccggtgcgtcacccggcacgtcgtccacgggttcacctggtagctccccttccgcgtccactggcaccgggcctggaactccggggagcggcacagcgagctcgtcgccgggagcatcgcctgggacatcgagcaccgggtcgccaggagcatcgcccggaacatccagcacaggaagccccggcgcgtcgcccgggacatcaagcacaggttccccgggatcgagcacgccgtccggagccactggatcaccagggagctcgacaccttccggcgcaacgggatcgcccggagccagcccgggtacgtcaagcactggctcccctgcctcgagcagggctcagagtggcagtgtccctcagttcaagaaagttgttttccaggaatttactgatggctcctttactcagcccttataccgtggagaactaaatgaacatttgggactcctggggccatatataagagcagaagttgaagataatatcatggtaactttcagaaatcaggcctctcgtccctattccttctattctagccttatttcttatgaggaagatcagaggcaaggagcagaacctagaaaaaactttgtcaagcctaatgaaaccaaaacttacttttggaaagtgcaacatcatatggcacccactaaagatgagtttgactgcaaagcctgggcttatttctctgatgttgacctggaaaaagatgtgcactcaggcctgattggaccccttctggtctgccacactaacacactgaaccctgctcatgggagacaagtgacagtacaggaatttgctctgtttttcaccatctttgatgagaccaaaagctggtacttcactgaaaatatggaaagaaactgcaggggcgcgccaacgtccgaaagtgctacccctgagtcaggccctggtagtgagcctgccacaagcggaagcgaaactccggggacctcagagtctgccactcccgaatcggggccaggctctgaaccggccacttcagggagcgaaacaccaggaacatcggagagcgctaccccggagagcgggccaggaactagtactgagcctagcgagggaagtgcacctggtacaagcgagtccgccacacccgagtctggccctggctctccagcgggctcacccacgagcactgaagagggctctcccgctggcagcccaacgtcgacagaagaaggatcaccagcaggctcccccacatcaacagaggagggtacatcagaatctgctactcccgagagtggacccggtacctccactgagcccagcgaggggagtgcaccaggtgcctcgagcgctccctgcaatatccagatggaagatcccacttttaaagagaattatcgcttccatgcaatcaatggctacataatggatacactacctggcttagtaatggctcaggatcaaaggattcgatggtatctgctcagcatgggcagcaatgaaaacatccattctattcatttcagtggacatgtgttcactgtacgaaaaaaagaggagtataaaatggcactgtacaatctctatccaggtgtttttgagacagtggaaatgttaccatccaaagctggaatttggcgggtggaatgccttattggcgagcatctacatgctgggatgagcacactttttctggtgtacagcaataagtgtcagactcccctgggaatggcttctggacacattagagattttcagattacagcttcaggacaatatggacagtgggccccaaagctggccagacttcattattccggatcaatcaatgcctggagcaccaaggagcccttttcttggatcaaggtggatctgttggcaccaatgattattcacggcatcaagacccagggtgcccgtcagaagttctccagcctctacatctctcagtttatcatcatgtatagtcttgatgggaagaagtggcagacttatcgaggaaattccactggaaccttaatggtcttctttggcaatgtggattcatctgggataaaacacaatatttttaaccctccaattattgctcgatacatccgtttgcacccaactcattatagcattcgcagcactcttcgcatggagttgatgggctgtgatttaaatagttgcagcatgccattgggaatggagagtaaagcaatatcagatgcacagattactgcttcatcctactttaccaatatgtttgccacctggtctccttcaaaagctcgacttcacctccaagggaggagtaatgcctggagacctcaggtgaataatccaaaagagtggctgcaagtggacttccagaagacaatgaaagtcacaggagtaactactcagggagtaaaatctctgcttaccagcatgtatgtgaaggagttcctcatctccagcagtcaagatggccatcagtggactctcttttttcagaatggcaaagtaaaggtttttcagggaaatcaagactccttcacacctgtggtgaactctctagacccaccgttactgactcgctaccttcgaattcacccccagagttgggtgcaccagattgccctgaggatggaggttctgggctgcgaggcacaggacctctacggcgccggatcacctggggccgaaacggccgaacaaaaactcatctcagaagaggatctgtcacctgcaaccggtcatcatcaccatcaccattga

SEQ ID NO: 1055 - protein, 2072 aa, synthetic construct
  REGION 1..2072: note = Description of Artificial Sequence: Synthetic polypeptide
ATRRYYLGAVELSWDYMQSDLGELPVGAPGSSPSASTGTGPGSSPSASTGTGPGASPGTSSTGSPGASPGTSSTGSPGSSTPSGATGSPGSSPSASTGTGPGASPGTSSTGSPGSSPSASTGTGPGTPGSGTASSSPGSSTPSGATGSPGSSTPSGATGSPGASPGTSSTGSPASSDARFPPRVPKSFPFNTSVVYKKTLFVEFTDHLFNIAKPRPPWMGLLGPTIQAEVYDTVVITLKNMASHPVSLHAVGVSYWKASEGAEYDDQTSQREKEDDKVFPGGSHTYVWQVLKENGPMASDPLCLTYSYLSHVDLVKDLNSGLIGALLVCREGSLAKEKTQTLHKFILLFAVFDEGKSWHSETKNSLMQDRDAASARAWPKMHTVNGYVNRSLPGLIGCHRKSVYWHVIGMGTTPEVHSIFLEGHTFLVRNHRQASLEISPITFLTAQTLLMDLGQFLLFCHISSHQHDGMEAYVKVDSCPEEPQLRMKNNEEAEDYDDDLTDSEMDVVRFDDDNSPSFIQIRSVAKKHPKTWVHYIAAEEEDWDYAPLVLAPDGAPTSTEPSEGSAPGSPAGSPTSTEEGTSTEPSEGSAPGTSTEPSEGSAPGTSESATPESGPGTSTEPSEGSAPGTSESATPESGPGSEPATSGSETPGTSTEPSEGSAPGTSTEPSEGSAPGTSESATPESGPGTSESATPESGPGASSDRSYKSQYLNNGPQRIGRKYKKVRFMAYTDETFKTREAIQHESGILGPLLYGEVGDTLLIIFKNQASRPYNIYPHGITDVRPLYSRRLPKGVKHLKDFPILPGEIFKYKWTVTVEDGPTKSDPRCLTRYYSSFVNMERDLASGLIGPLLICYKESVDQRGNQIMSDKRNVILFSVFDENRSWYLTENIQRFLPNPAGVQLEDPEFQASNIMHSINGYVFDSLQLSVCLHEVAYWYILSIGAQTDFLSVFFSGYTFKHKMVYEDTLTLFPFSGETVFMSMENPGLWILGCHNSDFRNRGMTALLKVSSCDKNTGDYYEDSYEDISAYLLSKNNAIEPRSFSQNPPVLKRHQREITRTTLQGAPGTPGSGTASSSPGASPGTSSTGSPGASPGTSSTGSPGASPGTSSTGSPGSSPSASTGTGPGTPGSGTASSSPGASPGTSSTGSPGASPGTSSTGSPGASPGTSSTGSPGSSTPSGATGSPGSSTPSGATGSPGASPGTSSTGSPASSSDQEEIDYDDTISVEMKKEDFDIYDEDENQSPRSFQKKTRHYFIAAVERLWDYGMSSSPHVLRNRAQGAPGTPGSGTASSSPGASPGTSSTGSPGASPGTSSTGSPGASPGTSSTGSPGSSPSASTGTGPGTPGSGTASSSPGASPGTSSTGSPGASPGTSSTGSPGASPGTSSTGSPGSSTPSGATGSPGSSTPSGATGSPGASPGTSSTGSPASSRAQSGSVPQFKKVVFQEFTDGSFTQPLYRGELNEHLGLLGPYIRAEVEDNIMVTFRNQASRPYSFYSSLISYEEDQRQGAEPRKNFVKPNETKTYFWKVQHHMAPTKDEFDCKAWAYFSDVDLEKDVHSGLIGPLLVCHTNTLNPAHGRQVTVQEFALFFTIFDETKSWYFTENMERNCRAPCNIQMEDPTFKENYRFHAINGYIMDTLPGLVMAQDQRIRWYLLSMGSNENIHSIHFSGHVFTVRKKEEYKMALYNLYPGVFETVEMLPSKAGIWRVECLIGEHLHAGMSTLFLVYSNKCQTPLGMASGHIRDFQITASGQYGQWAPKLARLHYSGSINAWSTKEPFSWIKVDLLAPMIIHGIKTQGARQKFSSLYISQFIIMYSLDGKKWQTYRGNSTGTLMVFFGNVDSSGIKHNIFNPPIIARYIRLHPTHYSIRSTLRMELMGCDLNSCSMPLGMESKAISDAQITASSYFTNMFATWSPSKARLHLQGRSNAWRPQVNNPKEWLQVDFQKTMKVTGVTTQGVKSLLTSMYVKEFLISSSQDGHQWTLFFQNGKVKVFQGNQDSFTPVVNSLDPPLLTRYLRIHPQSWVHQIALRMEVLGCEAQDLYGAGSPGAETAEQKLISEEDLSPATGHHHHHH

SEQ ID NO: 1056 - DNA, 6219 bp, synthetic construct
  misc_feature 1..6219: note = Description of Artificial Sequence: Synthetic polynucleotide
  source 1..6219: mol_type = other DNA
gccaccagaagatactacctgggtgcagtggaactgtcatgggactatatgcaaagtgatctcggtgagctgcctgtgggcgcgccaggctccagcccctccgcgagcacgggaaccggaccaggttcgtcaccctcagcatcaacggggacgggaccgggggcgtcaccaggaacgtcctccaccggctcgccgggtgcatcacccggaacgtcatcgaccggatcgccagggagctcgacgccatcaggcgcaacaggatcacctggctcaagccctagcgcgtcaaccggcacgggtccgggtgcctcccctggcacgtccagcaccggatcacccggatcgagcccatccgcctcaaccggaaccggacccggtacaccagggtcgggaacagcctcctcgtcaccaggctcctcaaccccctcgggagccacgggttcgcccggttcgtcaacgccttccggagcaactggtagccccggagcatcgccaggaacttcgagcacggggtcgcccgcctcgagcgacgcaagatttcctcctagagtgccaaaatcttttccattcaacacctcagtcgtgtacaaaaagactctgtttgtagaattcacggatcaccttttcaacatcgctaagccaaggccaccctggatgggtctgctaggtcctaccatccaggctgaggtttatgatacagtggtcattacacttaagaacatggcttcccatcctgtcagtcttcatgctgttggtgtatcctactggaaagcttctgagggagctgaatatgatgatcagaccagtcaaagggagaaagaagatgataaagtcttccctggtggaagccatacatatgtctggcaggtcctgaaagagaatggtccaatggcctctgacccactgtgccttacctactcatatctttctcatgtggacctggtaaaagacttgaattcaggcctcattggagccctactagtatgtagagaagggagtctggccaaggaaaagacacagaccttgcacaaatttatactactttttgctgtatttgatgaagggaaaagttggcactcagaaacaaagaactccttgatgcaggatagggatgctgcatctgctcgggcctggcctaaaatgcacacagtcaatggttatgtaaacaggtctctgccaggtctgattggatgccacaggaaatcagtctattggcatgtgattggaatgggcaccactcctgaagtgcactcaatattcctcgaaggtcacacatttcttgtgaggaaccatcgccaggctagcttggaaatctcgccaataactttccttactgctcaaacactcttgatggaccttggacagtttctactgttttgtcatatctcttcccaccaacatgatggcatggaagcttatgtcaaagtagacagctgtccagaggaaccccaactacgaatgaaaaataatgaagaagcggaagactatgatgatgatcttactgattctgaaatggatgtggtcaggtttgatgatgacaactctccttcctttatccaaattcgctcagttgccaagaagcatcctaaaacttgggtacattacattgctgctgaagaggaggactgggactatgctcccttagtcctcgcccccgatggcgcgccaaccagtacggagccgtccgaggggagcgcaccaggaagcccggctgggagcccgacttctaccgaagagggtacatctaccgaaccaagtgaaggttcagcaccaggcacctcaacagaaccctctgagggctcggcgcctggtacaagtgagtccgccaccccagaatccgggcctgggacaagcacagaaccttcggaagggagtgcccctggaacatccgaatcggcaaccccagaatcagggccaggatctgagcccgcgacttcgggctccgagacgcctgggacatccaccgagccctccgaaggatcagccccaggcaccagcacggagccctctgagggaagcgcacctggtaccagcgaaagcgcaactcccgaatcaggtcccggtacgagcgagtcggcgaccccggagagcgggccaggtgcctcgagcgacagaagttataaaagtcaatatttgaacaatggccctcagcggattggtaggaagtacaaaaaagtccgatttatggcatacacagatgaaacctttaagactcgtgaagctattcagcatgaatcaggaatcttgggacctttactttatggggaagttggagacacactgttgattatatttaagaatcaagcaagcagaccatataacatctaccctcacggaatcactgatgtccgtcctttgtattcaaggagattaccaaaaggtgtaaaacatttgaaggattttccaattctgccaggagaaatattcaaatataaatggacagtgactgtagaagatgggccaactaaatcagatcctcggtgcctgacccgctattactctagtttcgttaatatggagagagatctagcttcaggactcattggccctctcctcatctgctacaaagaatctgtagatcaaagaggaaaccagataatgtcagacaagaggaatgtcatcctgttttctgtatttgatgagaaccgaagctggtacctcacagagaatatacaacgctttctccccaatccagctggagtgcagcttgaggatccagagttccaagcctccaacatcatgcacagcatcaatggctatgtttttgatagtttgcagttgtcagtttgtttgcatgaggtggcatactggtacattctaagcattggagcacagactgacttcctttctgtcttcttctctggatataccttcaaacacaaaatggtctatgaagacacactcaccctattcccattctcaggagaaactgtcttcatgtcgatggaaaacccaggtctatggattctggggtgccacaactcagactttcggaacagaggcatgaccgccttactgaaggtttctagttgtgacaagaacactggtgattattacgaggacagttatgaagatatttcagcatacttgctgagtaaaaacaatgccattgaaccaagaagcttctctcaaaacccaccagtcttgaaacgccatcaacgggaaataactcgtactactcttcagggcgcgccaggtacacccggatcgggtacagcgtcatcgagccccggtgcgtcacctggtacgtcgagcacggggtcgccaggggcgtcccctgggacgtcctcaacaggctcgcccggtgcgtcacccggcacgtcgtccacgggttcacctggtagctccccttccgcgtccactggcaccgggcctggaactccggggagcggcacagcgagctcgtcgccgggagcatcgcctgggacatcgagcaccgggtcgccaggagcatcgcccggaacatccagcacaggaagccccggcgcgtcgcccgggacatcaagcacaggttccccgggatcgagcacgccgtccggagccactggatcaccagggagctcgacaccttccggcgcaacgggatcgcccggagccagcccgggtacgtcaagcactggctcccctgcctcgagctcagatcaagaggaaatcgattatgatgataccatatcagttgaaatgaagaaggaagattttgacatttatgatgaggatgaaaatcagagcccccgcagctttcaaaagaaaacacgacactattttattgctgcagtggagaggctctgggattatgggatgagtagctccccacatgttctaagaaacagggctcagggcgcgccaggtacacccggatcgggtacagcgtcatcgagccccggtgcgtcacctggtacgtcgagcacggggtcgccaggggcgtcccctgggacgtcctcaacaggctcgcccggtgcgtcacccggcacgtcgtccacgggttcacctggtagctccccttccgcgtccactggcaccgggcctggaactccggggagcggcacagcgagctcgtcgccgggagcatcgcctgggacatcgagcaccgggtcgccaggagcatcgcccggaacatccagcacaggaagccccggcgcgtcgcccgggacatcaagcacaggttccccgggatcgagcacgccgtccggagccactggatcaccagggagctcgacaccttccggcgcaacgggatcgcccggagccagcccgggtacgtcaagcactggctcccctgcctcgagcagggctcagagtggcagtgtccctcagttcaagaaagttgttttccaggaatttactgatggctcctttactcagcccttataccgtggagaactaaatgaacatttgggactcctggggccatatataagagcagaagttgaagataatatcatggtaactttcagaaatcaggcctctcgtccctattccttctattctagccttatttcttatgaggaagatcagaggcaaggagcagaacctagaaaaaactttgtcaagcctaatgaaaccaaaacttacttttggaaagtgcaacatcatatggcacccactaaagatgagtttgactgcaaagcctgggcttatttctctgatgttgacctggaaaaagatgtgcactcaggcctgattggaccccttctggtctgccacactaacacactgaaccctgctcatgggagacaagtgacagtacaggaatttgctctgtttttcaccatctttgatgagaccaaaagctggtacttcactgaaaatatggaaagaaactgcagggctccctgcaatatccagatggaagatcccacttttaaagagaattatcgcttccatgcaatcaatggctacataatggatacactacctggcttagtaatggctcaggatcaaaggattcgatggtatctgctcagcatgggcagcaatgaaaacatccattctattcatttcagtggacatgtgttcactgtacgaaaaaaagaggagtataaaatggcactgtacaatctctatccaggtgtttttgagacagtggaaatgttaccatccaaagctggaatttggcgggtggaatgccttattggcgagcatctacatgctgggatgagcacactttttctggtgtacagcaataagtgtcagactcccctgggaatggcttctggacacattagagattttcagattacagcttcaggacaatatggacagtgggccccaaagctggccagacttcattattccggatcaatcaatgcctggagcaccaaggagcccttttcttggatcaaggtggatctgttggcaccaatgattattcacggcatcaagacccagggtgcccgtcagaagttctccagcctctacatctctcagtttatcatcatgtatagtcttgatgggaagaagtggcagacttatcgaggaaattccactggaaccttaatggtcttctttggcaatgtggattcatctgggataaaacacaatatttttaaccctccaattattgctcgatacatccgtttgcacccaactcattatagcattcgcagcactcttcgcatggagttgatgggctgtgatttaaatagttgcagcatgccattgggaatggagagtaaagcaatatcagatgcacagattactgcttcatcctactttaccaatatgtttgccacctggtctccttcaaaagctcgacttcacctccaagggaggagtaatgcctggagacctcaggtgaataatccaaaagagtggctgcaagtggacttccagaagacaatgaaagtcacaggagtaactactcagggagtaaaatctctgcttaccagcatgtatgtgaaggagttcctcatctccagcagtcaagatggccatcagtggactctcttttttcagaatggcaaagtaaaggtttttcagggaaatcaagactccttcacacctgtggtgaactctctagacccaccgttactgactcgctaccttcgaattcacccccagagttgggtgcaccagattgccctgaggatggaggttctgggctgcgaggcacaggacctctacggcgccggatcacctggggccgaaacggccgaacaaaaactcatctcagaagaggatctgtcacctgcaaccggtcatcatcaccatcaccattga

SEQ ID NO: 1057 - protein, 2069 aa, synthetic construct
  REGION 1..2069: note = Description of Artificial Sequence: Synthetic polypeptide
ATRRYYLGAVELSWDYMQSDLGELPVGAPGSSPSASTGTGPGSSPSASTGTGPGASPGTSSTGSPGASPGTSSTGSPGSSTPSGATGSPGSSPSASTGTGPGASPGTSSTGSPGSSPSASTGTGPGTPGSGTASSSPGSSTPSGATGSPGSSTPSGATGSPGASPGTSSTGSPASSDARFPPRVPKSFPFNTSVVYKKTLFVEFTDHLFNIAKPRPPWMGLLGPTIQAEVYDTVVITLKNMASHPVSLHAVGVSYWKASEGAEYDDQTSQREKEDDKVFPGGSHTYVWQVLKENGPMASDPLCLTYSYLSHVDLVKDLNSGLIGALLVCREGSLAKEKTQTLHKFILLFAVFDEGKSWHSETKNSLMQDRDAASARAWPKMHTVNGYVNRSLPGLIGCHRKSVYWHVIGMGTTPEVHSIFLEGHTFLVRNHRQASLEISPITFLTAQTLLMDLGQFLLFCHISSHQHDGMEAYVKVDSCPEEPQLRMKNNEEAEDYDDDLTDSEMDVVRFDDDNSPSFIQIRSVAKKHPKTWVHYIAAEEEDWDYAPLVLAPDGAPTSTEPSEGSAPGSPAGSPTSTEEGTSTEPSEGSAPGTSTEPSEGSAPGTSESATPESGPGTSTEPSEGSAPGTSESATPESGPGSEPATSGSETPGTSTEPSEGSAPGTSTEPSEGSAPGTSESATPESGPGTSESATPESGPGASSDRSYKSQYLNNGPQRIGRKYKKVRFMAYTDETFKTREAIQHESGILGPLLYGEVGDTLLIIFKNQASRPYNIYPHGITDVRPLYSRRLPKGVKHLKDFPILPGEIFKYKWTVTVEDGPTKSDPRCLTRYYSSFVNMERDLASGLIGPLLICYKESVDQRGNQIMSDKRNVILFSVFDENRSWYLTENIQRFLPNPAGVQLEDPEFQASNIMHSINGYVFDSLQLSVCLHEVAYWYILSIGAQTDFLSVFFSGYTFKHKMVYEDTLTLFPFSGETVFMSMENPGLWILGCHNSDFRNRGMTALLKVSSCDKNTGDYYEDSYEDISAYLLSKNNAIEPRSFSQNPPVLKRHQREITRTTLQGAPGTPGSGTASSSPGASPGTSSTGSPGASPGTSSTGSPGASPGTSSTGSPGSSPSASTGTGPGTPGSGTASSSPGASPGTSSTGSPGASPGTSSTGSPGASPGTSSTGSPGSSTPSGATGSPGSSTPSGATGSPGASPGTSSTGSPASSSDQEEIDYDDTISVEMKKEDFDIYDEDENQSPRSFQKKTRHYFIAAVERLWDYGMSSSPHVLRNRAQSGSVPQFKKVVFQEFTDGSFTQPLYRGELNEHLGLLGPYIRAEVEDNIMVTFRNQASRPYSFYSSLISYEEDQRQGAEPRKNFVKPNETKTYFWKVQHHMAPTKDEFDCKAWAYFSDVDLEKDVHSGLIGPLLVCHTNTLNPAHGRQVTVQEFALFFTIFDETKSWYFTENMERNCRGAPTSESATPESGPGSEPATSGSETPGTSESATPESGPGSEPATSGSETPGTSESATPESGPGTSTEPSEGSAPGTSESATPESGPGSPAGSPTSTEEGSPAGSPTSTEEGSPAGSPTSTEEGTSESATPESGPGTSTEPSEGSAPGASSAPCNIQMEDPTFKENYRFHAINGYIMDTLPGLVMAQDQRIRWYLLSMGSNENIHSIHFSGHVFTVRKKEEYKMALYNLYPGVFETVEMLPSKAGIWRVECLIGEHLHAGMSTLFLVYSNKCQTPLGMASGHIRDFQITASGQYGQWAPKLARLHYSGSINAWSTKEPFSWIKVDLLAPMIIHGIKTQGARQKFSSLYISQFIIMYSLDGKKWQTYRGNSTGTLMVFFGNVDSSGIKHNIFNPPIIARYIRLHPTHYSIRSTLRMELMGCDLNSCSMPLGMESKAISDAQITASSYFTNMFATWSPSKARLHLQGRSNAWRPQVNNPKEWLQVDFQKTMKVTGVTTQGVKSLLTSMYVKEFLISSSQDGHQWTLFFQNGKVKVFQGNQDSFTPVVNSLDPPLLTRYLRIHPQSWVHQIALRMEVLGCEAQDLYGAGSPGAETAEQKLISEEDLSPATGHHHHHH

SEQ ID NO: 1058 - DNA, 6210 bp, synthetic construct
  misc_feature 1..6210: note = Description of Artificial Sequence: Synthetic polynucleotide
  source 1..6210: mol_type = other DNA
gccaccagaagatactacctgggtgcagtggaactgtcatgggactatatgcaaagtgatctcggtgagctgcctgtgggcgcgccaggctccagcccctccgcgagcacgggaaccggaccaggttcgtcaccctcagcatcaacggggacgggaccgggggcgtcaccaggaacgtcctccaccggctcgccgggtgcatcacccggaacgtcatcgaccggatcgccagggagctcgacgccatcaggcgcaacaggatcacctggctcaagccctagcgcgtcaaccggcacgggtccgggtgcctcccctggcacgtccagcaccggatcacccggatcgagcccatccgcctcaaccggaaccggacccggtacaccagggtcgggaacagcctcctcgtcaccaggctcctcaaccccctcgggagccacgggttcgcccggttcgtcaacgccttccggagcaactggtagccccggagcatcgccaggaacttcgagcacggggtcgcccgcctcgagcgacgcaagatttcctcctagagtgccaaaatcttttccattcaacacctcagtcgtgtacaaaaagactctgtttgtagaattcacggatcaccttttcaacatcgctaagccaaggccaccctggatgggtctgctaggtcctaccatccaggctgaggtttatgatacagtggtcattacacttaagaacatggcttcccatcctgtcagtcttcatgctgttggtgtatcctactggaaagcttctgagggagctgaatatgatgatcagaccagtcaaagggagaaagaagatgataaagtcttccctggtggaagccatacatatgtctggcaggtcctgaaagagaatggtccaatggcctctgacccactgtgccttacctactcatatctttctcatgtggacctggtaaaagacttgaattcaggcctcattggagccctactagtatgtagagaagggagtctggccaaggaaaagacacagaccttgcacaaatttatactactttttgctgtatttgatgaagggaaaagttggcactcagaaacaaagaactccttgatgcaggatagggatgctgcatctgctcgggcctggcctaaaatgcacacagtcaatggttatgtaaacaggtctctgccaggtctgattggatgccacaggaaatcagtctattggcatgtgattggaatgggcaccactcctgaagtgcactcaatattcctcgaaggtcacacatttcttgtgaggaaccatcgccaggctagcttggaaatctcgccaataactttccttactgctcaaacactcttgatggaccttggacagtttctactgttttgtcatatctcttcccaccaacatgatggcatggaagcttatgtcaaagtagacagctgtccagaggaaccccaactacgaatgaaaaataatgaagaagcggaagactatgatgatgatcttactgattctgaaatggatgtggtcaggtttgatgatgacaactctccttcctttatccaaattcgctcagttgccaagaagcatcctaaaacttgggtacattacattgctgctgaagaggaggactgggactatgctcccttagtcctcgcccccgatggcgcgccaaccagtacggagccgtccgaggggagcgcaccaggaagcccggctgggagcccgacttctaccgaagagggtacatctaccgaaccaagtgaaggttcagcaccaggcacctcaacagaaccctctgagggctcggcgcctggtacaagtgagtccgccaccccagaatccgggcctgggacaagcacagaaccttcggaagggagtgcccctggaacatccgaatcggcaaccccagaatcagggccaggatctgagcccgcgacttcgggctccgagacgcctgggacatccaccgagccctccgaaggatcagccccaggcaccagcacggagccctctgagggaagcgcacctggtaccagcgaaagcgcaactcccgaatcaggtcccggtacgagcgagtcggcgaccccggagagcgggccaggtgcctcgagcgacagaagttataaaagtcaatatttgaacaatggccctcagcggattggtaggaagtacaaaaaagtccgatttatggcatacacagatgaaacctttaagactcgtgaagctattcagcatgaatcaggaatcttgggacctttactttatggggaagttggagacacactgttgattatatttaagaatcaagcaagcagaccatataacatctaccctcacggaatcactgatgtccgtcctttgtattcaaggagattaccaaaaggtgtaaaacatttgaaggattttccaattctgccaggagaaatattcaaatataaatggacagtgactgtagaagatgggccaactaaatcagatcctcggtgcctgacccgctattactctagtttcgttaatatggagagagatctagcttcaggactcattggccctctcctcatctgctacaaagaatctgtagatcaaagaggaaaccagataatgtcagacaagaggaatgtcatcctgttttctgtatttgatgagaaccgaagctggtacctcacagagaatatacaacgctttctccccaatccagctggagtgcagcttgaggatccagagttccaagcctccaacatcatgcacagcatcaatggctatgtttttgatagtttgcagttgtcagtttgtttgcatgaggtggcatactggtacattctaagcattggagcacagactgacttcctttctgtcttcttctctggatataccttcaaacacaaaatggtctatgaagacacactcaccctattcccattctcaggagaaactgtcttcatgtcgatggaaaacccaggtctatggattctggggtgccacaactcagactttcggaacagaggcatgaccgccttactgaaggtttctagttgtgacaagaacactggtgattattacgaggacagttatgaagatatttcagcatacttgctgagtaaaaacaatgccattgaaccaagaagcttctctcaaaacccaccagtcttgaaacgccatcaacgggaaataactcgtactactcttcagggcgcgccaggtacacccggatcgggtacagcgtcatcgagccccggtgcgtcacctggtacgtcgagcacggggtcgccaggggcgtcccctgggacgtcctcaacaggctcgcccggtgcgtcacccggcacgtcgtccacgggttcacctggtagctccccttccgcgtccactggcaccgggcctggaactccggggagcggcacagcgagctcgtcgccgggagcatcgcctgggacatcgagcaccgggtcgccaggagcatcgcccggaacatccagcacaggaagccccggcgcgtcgcccgggacatcaagcacaggttccccgggatcgagcacgccgtccggagccactggatcaccagggagctcgacaccttccggcgcaacgggatcgcccggagccagcccgggtacgtcaagcactggctcccctgcctcgagctcagatcaagaggaaatcgattatgatgataccatatcagttgaaatgaagaaggaagattttgacatttatgatgaggatgaaaatcagagcccccgcagctttcaaaagaaaacacgacactattttattgctgcagtggagaggctctgggattatgggatgagtagctccccacatgttctaagaaacagggctcagagtggcagtgtccctcagttcaagaaagttgttttccaggaatttactgatggctcctttactcagcccttataccgtggagaactaaatgaacatttgggactcctggggccatatataagagcagaagttgaagataatatcatggtaactttcagaaatcaggcctctcgtccctattccttctattctagccttatttcttatgaggaagatcagaggcaaggagcagaacctagaaaaaactttgtcaagcctaatgaaaccaaaacttacttttggaaagtgcaacatcatatggcacccactaaagatgagtttgactgcaaagcctgggcttatttctctgatgttgacctggaaaaagatgtgcactcaggcctgattggaccccttctggtctgccacactaacacactgaaccctgctcatgggagacaagtgacagtacaggaatttgctctgtttttcaccatctttgatgagaccaaaagctggtacttcactgaaaatatggaaagaaactgcaggggcgcgccaacgtccgaaagtgctacccctgagtcaggccctggtagtgagcctgccacaagcggaagcgaaactccggggacctcagagtctgccactcccgaatcggggccaggctctgaaccggccacttcagggagcgaaacaccaggaacatcggagagcgctaccccggagagcgggccaggaactagtactgagcctagcgagggaagtgcacctggtacaagcgagtccgccacacccgagtctggccctggctctccagcgggctcacccacgagcactgaagagggctctcccgctggcagcccaacgtcgacagaagaaggatcaccagcaggctcccccacatcaacagaggagggtacatcagaatctgctactcccgagagtggacccggtacctccactgagcccagcgaggggagtgcaccaggtgcctcgagcgctccctgcaatatccagatggaagatcccacttttaaagagaattatcgcttccatgcaatcaatggctacataatggatacactacctggcttagtaatggctcaggatcaaaggattcgatggtatctgctcagcatgggcagcaatgaaaacatccattctattcatttcagtggacatgtgttcactgtacgaaaaaaagaggagtataaaatggcactgtacaatctctatccaggtgtttttgagacagtggaaatgttaccatccaaagctggaatttggcgggtggaatgccttattggcgagcatctacatgctgggatgagcacactttttctggtgtacagcaataagtgtcagactcccctgggaatggcttctggacacattagagattttcagattacagcttcaggacaatatggacagtgggccccaaagctggccagacttcattattccggatcaatcaatgcctggagcaccaaggagcccttttcttggatcaaggtggatctgttggcaccaatgattattcacggcatcaagacccagggtgcccgtcagaagttctccagcctctacatctctcagtttatcatcatgtatagtcttgatgggaagaagtggcagacttatcgaggaaattccactggaaccttaatggtcttctttggcaatgtggattcatctgggataaaacacaatatttttaaccctccaattattgctcgatacatccgtttgcacccaactcattatagcattcgcagcactcttcgcatggagttgatgggctgtgatttaaatagttgcagcatgccattgggaatggagagtaaagcaatatcagatgcacagattactgcttcatcctactttaccaatatgtttgccacctggtctccttcaaaagctcgacttcacctccaagggaggagtaatgcctggagacctcaggtgaataatccaaaagagtggctgcaagtggacttccagaagacaatgaaagtcacaggagtaactactcagggagtaaaatctctgcttaccagcatgtatgtgaaggagttcctcatctccagcagtcaagatggccatcagtggactctcttttttcagaatggcaaagtaaaggtttttcagggaaatcaagactccttcacacctgtggtgaactctctagacccaccgttactgactcgctaccttcgaattcacccccagagttgggtgcaccagattgccctgaggatggaggttctgggctgcgaggcacaggacctctacggcgccggatcacctggggccgaaacggccgaacaaaaactcatctcagaagaggatctgtcacctgcaaccggtcatcatcaccatcaccattga

SEQ ID NO: 1059 - protein, 2072 aa, synthetic construct
  REGION 1..2072: note = Description of Artificial Sequence: Synthetic polypeptide
ATRRYYLGAVELSWDYMQSDLGELPVGAPGSSPSASTGTGPGSSPSASTGTGPGASPGTSSTGSPGASPGTSSTGSPGSSTPSGATGSPGSSPSASTGTGPGASPGTSSTGSPGSSPSASTGTGPGTPGSGTASSSPGSSTPSGATGSPGSSTPSGATGSPGASPGTSSTGSPASSDARFPPRVPKSFPFNTSVVYKKTLFVEFTDHLFNIAKPRPPWMGLLGPTIQAEVYDTVVITLKNMASHPVSLHAVGVSYWKASEGAEYDDQTSQREKEDDKVFPGGSHTYVWQVLKENGPMASDPLCLTYSYLSHVDLVKDLNSGLIGALLVCREGSLAKEKTQTLHKFILLFAVFDEGKSWHSETKNSLMQDRDAASARAWPKMHTVNGYVNRSLPGLIGCHRKSVYWHVIGMGTTPEVHSIFLEGHTFLVRNHRQASLEISPITFLTAQTLLMDLGQFLLFCHISSHQHDGMEAYVKVDSCPEEPQLRMKNNEEAEDYDDDLTDSEMDVVRFDDDNSPSFIQIRSVAKKHPKTWVHYIAAEEEDWDYAPLVLAPDGAPTSTEPSEGSAPGSPAGSPTSTEEGTSTEPSEGSAPGTSTEPSEGSAPGTSESATPESGPGTSTEPSEGSAPGTSESATPESGPGSEPATSGSETPGTSTEPSEGSAPGTSTEPSEGSAPGTSESATPESGPGTSESATPESGPGASSDRSYKSQYLNNGPQRIGRKYKKVRFMAYTDETFKTREAIQHESGILGPLLYGEVGDTLLIIFKNQASRPYNIYPHGITDVRPLYSRRLPKGVKHLKDFPILPGEIFKYKWTVTVEDGPTKSDPRCLTRYYSSFVNMERDLASGLIGPLLICYKESVDQRGNQIMSDKRNVILFSVFDENRSWYLTENIQRFLPNPAGVQLEDPEFQASNIMHSINGYVFDSLQLSVCLHEVAYWYILSIGAQTDFLSVFFSGYTFKHKMVYEDTLTLFPFSGETVFMSMENPGLWILGCHNSDFRNRGMTALLKVSSCDKNTGDYYEDSYEDISAYLLSKNNAIEPRSFSQNPPVLKRHQREITRTTLQSDQEEIDYDDTISVEMKKEDFDIYDEDENQSPRSFQKKTRHYFIAAVERLWDYGMSSSPHVLRNRAQGAPGTPGSGTASSSPGASPGTSSTGSPGASPGTSSTGSPGASPGTSSTGSPGSSPSASTGTGPGTPGSGTASSSPGASPGTSSTGSPGASPGTSSTGSPGASPGTSSTGSPGSSTPSGATGSPGSSTPSGATGSPGASPGTSSTGSPASSRAQSGSVPQFKKVVFQEFTDGSFTQPLYRGELNEHLGLLGPYIRAEVEDNIMVTFRNQASRPYSFYSSLISYEEDQRQGAEPRKNFVKPNETKTYFWKVQHHMAPTKDEFDCKAWAYFSDVDLEKDVHSGLIGPLLVCHTNTLNPAHGRQVTVQEFALFFTIFDETKSWYFTENMERNCRGAPTSESATPESGPGSEPATSGSETPGTSESATPESGPGSEPATSGSETPGTSESATPESGPGTSTEPSEGSAPGTSESATPESGPGSPAGSPTSTEEGSPAGSPTSTEEGSPAGSPTSTEEGTSESATPESGPGTSTEPSEGSAPGASSAPCNIQMEDPTFKENYRFHAINGYIMDTLPGLVMAQDQRIRWYLLSMGSNENIHSIHFSGHVFTVRKKEEYKMALYNLYPGVFETVEMLPSKAGIWRVECLIGEHLHAGMSTLFLVYSNKCQTPLGMASGHIRDFQITASGQYGQWAPKLARLHYSGSINAWSTKEPFSWIKVDLLAPMIIHGIKTQGARQKFSSLYISQFIIMYSLDGKKWQTYRGNSTGTLMVFFGNVDSSGIKHNIFNPPIIARYIRLHPTHYSIRSTLRMELMGCDLNSCSMPLGMESKAISDAQITASSYFTNMFATWSPSKARLHLQGRSNAWRPQVNNPKEWLQVDFQKTMKVTGVTTQGVKSLLTSMYVKEFLISSSQDGHQWTLFFQNGKVKVFQGNQDSFTPVVNSLDPPLLTRYLRIHPQSWVHQIALRMEVLGCEAQDLYGAGSPGAETAEQKLISEEDLSPATGHHHHHH

SEQ ID NO: 1060 - DNA, 6219 bp, synthetic construct
  misc_feature 1..6219: note = Description of Artificial Sequence: Synthetic polynucleotide
  source 1..6219: mol_type = other DNA
gccaccagaagatactacctgggtgcagtggaactgtcatgggactatatgcaaagtgatctcggtgagctgcctgtgggcgcgccaggctccagcccctccgcgagcacgggaaccggaccaggttcgtcaccctcagcatcaacggggacgggaccgggggcgtcaccaggaacgtcctccaccggctcgccgggtgcatcacccggaacgtcatcgaccggatcgccagggagctcgacgccatcaggcgcaacaggatcacctggctcaagccctagcgcgtcaaccggcacgggtccgggtgcctcccctggcacgtccagcaccggatcacccggatcgagcccatccgcctcaaccggaaccggacccggtacaccagggtcgggaacagcctcctcgtcaccaggctcctcaaccccctcgggagccacgggttcgcccggttcgtcaacgccttccggagcaactggtagccccggagcatcgccaggaacttcgagcacggggtcgcccgcctcgagcgacgcaagatttcctcctagagtgccaaaatcttttccattcaacacctcagtcgtgtacaaaaagactctgtttgtagaattcacggatcaccttttcaacatcgctaagccaaggccaccctggatgggtctgctaggtcctaccatccaggctgaggtttatgatacagtggtcattacacttaagaacatggcttcccatcctgtcagtcttcatgctgttggtgtatcctactggaaagcttctgagggagctgaatatgatgatcagaccagtcaaagggagaaagaagatgataaagtcttccctggtggaagccatacatatgtctggcaggtcctgaaagagaatggtccaatggcctctgacccactgtgccttacctactcatatctttctcatgtggacctggtaaaagacttgaattcaggcctcattggagccctactagtatgtagagaagggagtctggccaaggaaaagacacagaccttgcacaaatttatactactttttgctgtatttgatgaagggaaaagttggcactcagaaacaaagaactccttgatgcaggatagggatgctgcatctgctcgggcctggcctaaaatgcacacagtcaatggttatgtaaacaggtctctgccaggtctgattggatgccacaggaaatcagtctattggcatgtgattggaatgggcaccactcctgaagtgcactcaatattcctcgaaggtcacacatttcttgtgaggaaccatcgccaggctagcttggaaatctcgccaataactttccttactgctcaaacactcttgatggaccttggacagtttctactgttttgtcatatctcttcccaccaacatgatggcatggaagcttatgtcaaagtagacagctgtccagaggaaccccaactacgaatgaaaaataatgaagaagcggaagactatgatgatgatcttactgattctgaaatggatgtggtcaggtttgatgatgacaactctccttcctttatccaaattcgctcagttgccaagaagcatcctaaaacttgggtacattacattgctgctgaagaggaggactgggactatgctcccttagtcctcgcccccgatggcgcgccaaccagtacggagccgtccgaggggagcgcaccaggaagcccggctgggagcccgacttctaccgaagagggtacatctaccgaaccaagtgaaggttcagcaccaggcacctcaacagaaccctctgagggctcggcgcctggtacaagtgagtccgccaccccagaatccgggcctgggacaagcacagaaccttcggaagggagtgcccctggaacatccgaatcggcaaccccagaatcagggccaggatctgagcccgcgacttcgggctccgagacgcctgggacatccaccgagccctccgaaggatcagccccaggcaccagcacggagccctctgagggaagcgcacctggtaccagcgaaagcgcaactcccgaatcaggtcccggtacgagcgagtcggcgaccccggagagcgggccaggtgcctcgagcgacagaagttataaaagtcaatatttgaacaatggccctcagcggattggtaggaagtacaaaaaagtccgatttatggcatacacagatgaaacctttaagactcgtgaagctattcagcatgaatcaggaatcttgggacctttactttatggggaagttggagacacactgttgattatatttaagaatcaagcaagcagaccatataacatctaccctcacggaatcactgatgtccgtcctttgtattcaaggagattaccaaaaggtgtaaaacatttgaaggattttccaattctgccaggagaaatattcaaatataaatggacagtgactgtagaagatgggccaactaaatcagatcctcggtgcctgacccgctattactctagtttcgttaatatggagagagatctagcttcaggactcattggccctctcctcatctgctacaaagaatctgtagatcaaagaggaaaccagataatgtcagacaagaggaatgtcatcctgttttctgtatttgatgagaaccgaagctggtacctcacagagaatatacaacgctttctccccaatccagctggagtgcagcttgaggatccagagttccaagcctccaacatcatgcacagcatcaatggctatgtttttgatagtttgcagttgtcagtttgtttgcatgaggtggcatactggtacattctaagcattggagcacagactgacttcctttctgtcttcttctctggatataccttcaaacacaaaatggtctatgaagacacactcaccctattcccattctcaggagaaactgtcttcatgtcgatggaaaacccaggtctatggattctggggtgccacaactcagactttcggaacagaggcatgaccgccttactgaaggtttctagttgtgacaagaacactggtgattattacgaggacagttatgaagatatttcagcatacttgctgagtaaaaacaatgccattgaaccaagaagcttctctcaaaacccaccagtcttgaaacgccatcaacgggaaataactcgtactactcttcagtcagatcaagaggaaatcgattatgatgataccatatcagttgaaatgaagaaggaagattttgacatttatgatgaggatgaaaatcagagcccccgcagctttcaaaagaaaacacgacactattttattgctgcagtggagaggctctgggattatgggatgagtagctccccacatgttctaagaaacagggctcagggcgcgccaggtacacccggatcgggtacagcgtcatcgagccccggtgcgtcacctggtacgtcgagcacggggtcgccaggggcgtcccctgggacgtcctcaacaggctcgcccggtgcgtcacccggcacgtcgtccacgggttcacctggtagctccccttccgcgtccactggcaccgggcctggaactccggggagcggcacagcgagctcgtcgccgggagcatcgcctgggacatcgagcaccgggtcgccaggagcatcgcccggaacatccagcacaggaagccccggcgcgtcgcccgggacatcaagcacaggttccccgggatcgagcacgccgtccggagccactggatcaccagggagctcgacaccttccggcgcaacgggatcgcccggagccagcccgggtacgtcaagcactggctcccctgcctcgagcagggctcagagtggcagtgtccctcagttcaagaaagttgttttccaggaatttactgatggctcctttactcagcccttataccgtggagaactaaatgaacatttgggactcctggggccatatataagagcagaagttgaagataatatcatggtaactttcagaaatcaggcctctcgtccctattccttctattctagccttatttcttatgaggaagatcagaggcaaggagcagaacctagaaaaaactttgtcaagcctaatgaaaccaaaacttacttttggaaagtgcaacatcatatggcacccactaaagatgagtttgactgcaaagcctgggcttatttctctgatgttgacctggaaaaagatgtgcactcaggcctgattggaccccttctggtctgccacactaacacactgaaccctgctcatgggagacaagtgacagtacaggaatttgctctgtttttcaccatctttgatgagaccaaaagctggtacttcactgaaaatatggaaagaaactgcaggggcgcgccaacgtccgaaagtgctacccctgagtcaggccctggtagtgagcctgccacaagcggaagcgaaactccggggacctcagagtctgccactcccgaatcggggccaggctctgaaccggccacttcagggagcgaaacaccaggaacatcggagagcgctaccccggagagcgggccaggaactagtactgagcctagcgagggaagtgcacctggtacaagcgagtccgccacacccgagtctggccctggctctccagcgggctcacccacgagcactgaagagggctctcccgctggcagcccaacgtcgacagaagaaggatcaccagcaggctcccccacatcaacagaggagggtacatcagaatctgctactcccgagagtggacccggtacctccactgagcccagcgaggggagtgcaccaggtgcctcgagcgctccctgcaatatccagatggaagatcccacttttaaagagaattatcgcttccatgcaatcaatggctacataatggatacactacctggcttagtaatggctcaggatcaaaggattcgatggtatctgctcagcatgggcagcaatgaaaacatccattctattcatttcagtggacatgtgttcactgtacgaaaaaaagaggagtataaaatggcactgtacaatctctatccaggtgtttttgagacagtggaaatgttaccatccaaagctggaatttggcgggtggaatgccttattggcgagcatctacatgctgggatgagcacactttttctggtgtacagcaataagtgtcagactcccctgggaatggcttctggacacattagagattttcagattacagcttcaggacaatatggacagtgggccccaaagctggccagacttcattattccggatcaatcaatgcctggagcaccaaggagcccttttcttggatcaaggtggatctgttggcaccaatgattattcacggcatcaagacccagggtgcccgtcagaagttctccagcctctacatctctcagtttatcatcatgtatagtcttgatgggaagaagtggcagacttatcgaggaaattccactggaaccttaatggtcttctttggcaatgtggattcatctgggataaaacacaatatttttaaccctccaattattgctcgatacatccgtttgcacccaactcattatagcattcgcagcactcttcgcatggagttgatgggctgtgatttaaatagttgcagcatgccattgggaatggagagtaaagcaatatcagatgcacagattactgcttcatcctactttaccaatatgtttgccacctggtctccttcaaaagctcgacttcacctccaagggaggagtaatgcctggagacctcaggtgaataatccaaaagagtggctgcaagtggacttccagaagacaatgaaagtcacaggagtaactactcagggagtaaaatctctgcttaccagcatgtatgtgaaggagttcctcatctccagcagtcaagatggccatcagtggactctcttttttcagaatggcaaagtaaaggtttttcagggaaatcaagactccttcacacctgtggtgaactctctagacccaccgttactgactcgctaccttcgaattcacccccagagttgggtgcaccagattgccctgaggatggaggttctgggctgcgaggcacaggacctctacggcgccggatcacctggggccgaaacggccgaacaaaaactcatctcagaagaggatctgtcacctgcaaccggtcatcatcaccatcaccattga

SEQ ID NO: 1061 - protein, 2072 aa, synthetic construct
  REGION 1..2072: note = Description of Artificial Sequence: Synthetic polypeptide
ATRRYYLGAVELSWDYMQSDLGELPVGAPGSSPSASTGTGPGSSPSASTGTGPGASPGTSSTGSPGASPGTSSTGSPGSSTPSGATGSPGSSPSASTGTGPGASPGTSSTGSPGSSPSASTGTGPGTPGSGTASSSPGSSTPSGATGSPGSSTPSGATGSPGASPGTSSTGSPASSDARFPPRVPKSFPFNTSVVYKKTLFVEFTDHLFNIAKPRPPWMGLLGPTIQAEVYDTVVITLKNMASHPVSLHAVGVSYWKASEGAEYDDQTSQREKEDDKVFPGGSHTYVWQVLKENGPMASDPLCLTYSYLSHVDLVKDLNSGLIGALLVCREGSLAKEKTQTLHKFILLFAVFDEGKSWHSETKNSLMQDRDAASARAWPKMHTVNGYVNRSLPGLIGCHRKSVYWHVIGMGTTPEVHSIFLEGHTFLVRNHRQASLEISPITFLTAQTLLMDLGQFLLFCHISSHQHDGMEAYVKVDSCPEEPQLRMKNNEEAEDYDDDLTDSEMDVVRFDDDNSPSFIQIRSVAKKHPKTWVHYIAAEEEDWDYAPLVLAPDDRSYKSQYLNNGPQRIGRKYKKVRFMAYTDETFKTREAIQHESGILGPLLYGEVGDTLLIIFKNQASRPYNIYPHGITDVRPLYSRRLPKGVKHLKDFPILPGEIFKYKWTVTVEDGPTKSDPRCLTRYYSSFVNMERDLASGLIGPLLICYKESVDQRGNQIMSDKRNVILFSVFDENRSWYLTENIQRFLPNPAGVQLEDPEFQASNIMHSINGYVFDSLQLSVCLHEVAYWYILSIGAQTDFLSVFFSGYTFKHKMVYEDTLTLFPFSGETVFMSMENPGLWILGCHNSDFRNRGMTALLKVSSCDKNTGDYYEDSYEDISAYLLSKNNAIEPRSFSQNPPVLKRHQREITRTTLQGAPGTPGSGTASSSPGASPGTSSTGSPGASPGTSSTGSPGASPGTSSTGSPGSSPSASTGTGPGTPGSGTASSSPGASPGTSSTGSPGASPGTSSTGSPGASPGTSSTGSPGSSTPSGATGSPGSSTPSGATGSPGASPGTSSTGSPASSSDQEEIDYDDTISVEMKKEDFDIYDEDENQSPRSFQKKTRHYFIAAVERLWDYGMSSSPHVLRNRAQGAPGTPGSGTASSSPGASPGTSSTGSPGASPGTSSTGSPGASPGTSSTGSPGSSPSASTGTGPGTPGSGTASSSPGASPGTSSTGSPGASPGTSSTGSPGASPGTSSTGSPGSSTPSGATGSPGSSTPSGATGSPGASPGTSSTGSPASSRAQSGSVPQFKKVVFQEFTDGSFTQPLYRGELNEHLGLLGPYIRAEVEDNIMVTFRNQASRPYSFYSSLISYEEDQRQGAEPRKNFVKPNETKTYFWKVQHHMAPTKDEFDCKAWAYFSDVDLEKDVHSGLIGPLLVCHTNTLNPAHGRQVTVQEFALFFTIFDETKSWYFTENMERNCRGAPTSESATPESGPGSEPATSGSETPGTSESATPESGPGSEPATSGSETPGTSESATPESGPGTSTEPSEGSAPGTSESATPESGPGSPAGSPTSTEEGSPAGSPTSTEEGSPAGSPTSTEEGTSESATPESGPGTSTEPSEGSAPGASSAPCNIQMEDPTFKENYRFHAINGYIMDTLPGLVMAQDQRIRWYLLSMGSNENIHSIHFSGHVFTVRKKEEYKMALYNLYPGVFETVEMLPSKAGIWRVECLIGEHLHAGMSTLFLVYSNKCQTPLGMASGHIRDFQITASGQYGQWAPKLARLHYSGSINAWSTKEPFSWIKVDLLAPMIIHGIKTQGARQKFSSLYISQFIIMYSLDGKKWQTYRGNSTGTLMVFFGNVDSSGIKHNIFNPPIIARYIRLHPTHYSIRSTLRMELMGCDLNSCSMPLGMESKAISDAQITASSYFTNMFATWSPSKARLHLQGRSNAWRPQVNNPKEWLQVDFQKTMKVTGVTTQGVKSLLTSMYVKEFLISSSQDGHQWTLFFQNGKVKVFQGNQDSFTPVVNSLDPPLLTRYLRIHPQSWVHQIALRMEVLGCEAQDLYGAGSPGAETAEQKLISEEDLSPATGHHHHHH

SEQ ID NO: 1062 - DNA, 6219 bp, synthetic construct
  misc_feature 1..6219: note = Description of Artificial Sequence: Synthetic polynucleotide
  source 1..6219: mol_type = other DNA
gccaccagaagatactacctgggtgcagtggaactgtcatgggactatatgcaaagtgatctcggtgagctgcctgtgggcgcgccaggctccagcccctccgcgagcacgggaaccggaccaggttcgtcaccctcagcatcaacggggacgggaccgggggcgtcaccaggaacgtcctccaccggctcgccgggtgcatcacccggaacgtcatcgaccggatcgccagggagctcgacgccatcaggcgcaacaggatcacctggctcaagccctagcgcgtcaaccggcacgggtccgggtgcctcccctggcacgtccagcaccggatcacccggatcgagcccatccgcctcaaccggaaccggacccggtacaccagggtcgggaacagcctcctcgtcaccaggctcctcaaccccctcgggagccacgggttcgcccggttcgtcaacgccttccggagcaactggtagccccggagcatcgccaggaacttcgagcacggggtcgcccgcctcgagcgacgcaagatttcctcctagagtgccaaaatcttttccattcaacacctcagtcgtgtacaaaaagactctgtttgtagaattcacggatcaccttttcaacatcgctaagccaaggccaccctggatgggtctgctaggtcctaccatccaggctgaggtttatgatacagtggtcattacacttaagaacatggcttcccatcctgtcagtcttcatgctgttggtgtatcctactggaaagcttctgagggagctgaatatgatgatcagaccagtcaaagggagaaagaagatgataaagtcttccctggtggaagccatacatatgtctggcaggtcctgaaagagaatggtccaatggcctctgacccactgtgccttacctactcatatctttctcatgtggacctggtaaaagacttgaattcaggcctcattggagccctactagtatgtagagaagggagtctggccaaggaaaagacacagaccttgcacaaatttatactactttttgctgtatttgatgaagggaaaagttggcactcagaaacaaagaactccttgatgcaggatagggatgctgcatctgctcgggcctggcctaaaatgcacacagtcaatggttatgtaaacaggtctctgccaggtctgattggatgccacaggaaatcagtctattggcatgtgattggaatgggcaccactcctgaagtgcactcaatattcctcgaaggtcacacatttcttgtgaggaaccatcgccaggctagcttggaaatctcgccaataactttccttactgctcaaacactcttgatggaccttggacagtttctactgttttgtcatatctcttcccaccaacatgatggcatggaagcttatgtcaaagtagacagctgtccagaggaaccccaactacgaatgaaaaataatgaagaagcggaagactatgatgatgatcttactgattctgaaatggatgtggtcaggtttgatgatgacaactctccttcctttatccaaattcgctcagttgccaagaagcatcctaaaacttgggtacattacattgctgctgaagaggaggactgggactatgctcccttagtcctcgcccccgatgacagaagttataaaagtcaatatttgaacaatggccctcagcggattggtaggaagtacaaaaaagtccgatttatggcatacacagatgaaacctttaagactcgtgaagctattcagcatgaatcaggaatcttgggacctttactttatggggaagttggagacacactgttgattatatttaagaatcaagcaagcagaccatataacatctaccctcacggaatcactgatgtccgtcctttgtattcaaggagattaccaaaaggtgtaaaacatttgaaggattttccaattctgccaggagaaatattcaaatataaatggacagtgactgtagaagatgggccaactaaatcagatcctcggtgcctgacccgctattactctagtttcgttaatatggagagagatctagcttcaggactcattggccctctcctcatctgctacaaagaatctgtagatcaaagaggaaaccagataatgtcagacaagaggaatgtcatcctgttttctgtatttgatgagaaccgaagctggtacctcacagagaatatacaacgctttctccccaatccagctggagtgcagcttgaggatccagagttccaagcctccaacatcatgcacagcatcaatggctatgtttttgatagtttgcagttgtcagtttgtttgcatgaggtggcatactggtacattctaagcattggagcacagactgacttcctttctgtcttcttctctggatataccttcaaacacaaaatggtctatgaagacacactcaccctattcccattctcaggagaaactgtcttcatgtcgatggaaaacccaggtctatggattctggggtgccacaactcagactttcggaacagaggcatgaccgccttactgaaggtttctagttgtgacaagaacactggtgattattacgaggacagttatgaagatatttcagcatacttgctgagtaaaaacaatgccattgaaccaagaagcttctctcaaaacccaccagtcttgaaacgccatcaacgggaaataactcgtactactcttcagggcgcgccaggtacacccggatcgggtacagcgtcatcgagccccggtgcgtcacctggtacgtcgagcacggggtcgccaggggcgtcccctgggacgtcctcaacaggctcgcccggtgcgtcacccggcacgtcgtccacgggttcacctggtagctccccttccgcgtccactggcaccgggcctggaactccggggagcggcacagcgagctcgtcgccgggagcatcgcctgggacatcgagcaccgggtcgccaggagcatcgcccggaacatccagcacaggaagccccggcgcgtcgcccgggacatcaagcacaggttccccgggatcgagcacgccgtccggagccactggatcaccagggagctcgacaccttccggcgcaacgggatcgcccggagccagcccgggtacgtcaagcactggctcccctgcctcgagctcagatcaagaggaaatcgattatgatgataccatatcagttgaaatgaagaaggaagattttgacatttatgatgaggatgaaaatcagagcccccgcagctttcaaaagaaaacacgacactattttattgctgcagtggagaggctctgggattatgggatgagtagctccccacatgttctaagaaacagggctcagggcgcgccaggtacacccggatcgggtacagcgtcatcgagccccggtgcgtcacctggtacgtcgagcacggggtcgccaggggcgtcccctgggacgtcctcaacaggctcgcccggtgcgtcacccggcacgtcgtccacgggttcacctggtagctccccttccgcgtccactggcaccgggcctggaactccggggagcggcacagcgagctcgtcgccgggagcatcgcctgggacatcgagcaccgggtcgccaggagcatcgcccggaacatccagcacaggaagccccggcgcgtcgcccgggacatcaagcacaggttccccgggatcgagcacgccgtccggagccactggatcaccagggagctcgacaccttccggcgcaacgggatcgcccggagccagcccgggtacgtcaagcactggctcccctgcctcgagcagggctcagagtggcagtgtccctcagttcaagaaagttgttttccaggaatttactgatggctcctttactcagcccttataccgtggagaactaaatgaacatttgggactcctggggccatatataagagcagaagttgaagataatatcatggtaactttcagaaatcaggcctctcgtccctattccttctattctagccttatttcttatgaggaagatcagaggcaaggagcagaacctagaaaaaactttgtcaagcctaatgaaaccaaaacttacttttggaaagtgcaacatcatatggcacccactaaagatgagtttgactgcaaagcctgggcttatttctctgatgttgacctggaaaaagatgtgcactcaggcctgattggaccccttctggtctgccacactaacacactgaaccctgctcatgggagacaagtgacagtacaggaatttgctctgtttttcaccatctttgatgagaccaaaagctggtacttcactgaaaatatggaaagaaactgcaggggcgcgccaacgtccgaaagtgctacccctgagtcaggccctggtagtgagcctgccacaagcggaagcgaaactccggggacctcagagtctgccactcccgaatcggggccaggctctgaaccggccacttcagggagcgaaacaccaggaacatcggagagcgctaccccggagagcgggccaggaactagtactgagcctagcgagggaagtgcacctggtacaagcgagtccgccacacccgagtctggccctggctctccagcgggctcacccacgagcactgaagagggctctcccgctggcagcccaacgtcgacagaagaaggatcaccagcaggctcccccacatcaacagaggagggtacatcagaatctgctactcccgagagtggacccggtacctccactgagcccagcgaggggagtgcaccaggtgcctcgagcgctccctgcaatatccagatggaagatcccacttttaaagagaattatcgcttccatgcaatcaatggctacataatggatacactacctggcttagtaatggctcaggatcaaaggattcgatggtatctgctcagcatgggcagcaatgaaaacatccattctattcatttcagtggacatgtgttcactgtacgaaaaaaagaggagtataaaatggcactgtacaatctctatccaggtgtttttgagacagtggaaatgttaccatccaaagctggaatttggcgggtggaatgccttattggcgagcatctacatgctgggatgagcacactttttctggtgtacagcaataagtgtcagactcccctgggaatggcttctggacacattagagattttcagattacagcttcaggacaatatggacagtgggccccaaagctggccagacttcattattccggatcaatcaatgcctggagcaccaaggagcccttttcttggatcaaggtggatctgttggcaccaatgattattcacggcatcaagacccagggtgcccgtcagaagttctccagcctctacatctctcagtttatcatcatgtatagtcttgatgggaagaagtggcagacttatcgaggaaattccactggaaccttaatggtcttctttggcaatgtggattcatctgggataaaacacaatatttttaaccctccaattattgctcgatacatccgtttgcacccaactcattatagcattcgcagcactcttcgcatggagttgatgggctgtgatttaaatagttgcagcatgccattgggaatggagagtaaagcaatatcagatgcacagattactgcttcatcctactttaccaatatgtttgccacctggtctccttcaaaagctcgacttcacctccaagggaggagtaatgcctggagacctcaggtgaataatccaaaagagtggctgcaagtggacttccagaagacaatgaaagtcacaggagtaactactcagggagtaaaatctctgcttaccagcatgtatgtgaaggagttcctcatctccagcagtcaagatggccatcagtggactctcttttttcagaatggcaaagtaaaggtttttcagggaaatcaagactccttcacacctgtggtgaactctctagacccaccgttactgactcgctaccttcgaattcacccccagagttgggtgcaccagattgccctgaggatggaggttctgggctgcgaggcacaggacctctacggcgccggatcacctggggccgaaacggccgaacaaaaactcatctcagaagaggatctgtcacctgcaaccggtcatcatcaccatcaccattga

SEQ ID NO: 1063 - protein, 2072 aa, synthetic construct
  REGION 1..2072: note = Description of Artificial Sequence: Synthetic polypeptide
ATRRYYLGAVELSWDYMQSDLGELPVDARFPPRVPKSFPFNTSVVYKKTLFVEFTDHLFNIAKPRPPWMGLLGPTIQAEVYDTVVITLKNMASHPVSLHAVGVSYWKASEGAEYDDQTSQREKEDDKVFPGGSHTYVWQVLKENGPMASDPLCLTYSYLSHVDLVKDLNSGLIGALLVCREGSLAKEKTQTLHKFILLFAVFDEGKSWHSETKNSLMQDRDAASARAWPKMHTVNGYVNRSLPGLIGCHRKSVYWHVIGMGTTPEVHSIFLEGHTFLVRNHRQASLEISPITFLTAQTLLMDLGQFLLFCHISSHQHDGMEAYVKVDSCPEEPQLRMKNNEEAEDYDDDLTDSEMDVVRFDDDNSPSFIQIRSVAKKHPKTWVHYIAAEEEDWDYAPLVLAPDGAPTSTEPSEGSAPGSPAGSPTSTEEGTSTEPSEGSAPGTSTEPSEGSAPGTSESATPESGPGTSTEPSEGSAPGTSESATPESGPGSEPATSGSETPGTSTEPSEGSAPGTSTEPSEGSAPGTSESATPESGPGTSESATPESGPGASSDRSYKSQYLNNGPQRIGRKYKKVRFMAYTDETFKTREAIQHESGILGPLLYGEVGDTLLIIFKNQASRPYNIYPHGITDVRPLYSRRLPKGVKHLKDFPILPGEIFKYKWTVTVEDGPTKSDPRCLTRYYSSFVNMERDLASGLIGPLLICYKESVDQRGNQIMSDKRNVILFSVFDENRSWYLTENIQRFLPNPAGVQLEDPEFQASNIMHSINGYVFDSLQLSVCLHEVAYWYILSIGAQTDFLSVFFSGYTFKHKMVYEDTLTLFPFSGETVFMSMENPGLWILGCHNSDFRNRGMTALLKVSSCDKNTGDYYEDSYEDISAYLLSKNNAIEPRSFSQNPPVLKRHQREITRTTLQGAPGTPGSGTASSSPGASPGTSSTGSPGASPGTSSTGSPGASPGTSSTGSPGSSPSASTGTGPGTPGSGTASSSPGASPGTSSTGSPGASPGTSSTGSPGASPGTSSTGSPGSSTPSGATGSPGSSTPSGATGSPGASPGTSSTGSPASSSDQEEIDYDDTISVEMKKEDFDIYDEDENQSPRSFQKKTRHYFIAAVERLWDYGMSSSPHVLRNRAQGAPGTPGSGTASSSPGASPGTSSTGSPGASPGTSSTGSPGASPGTSSTGSPGSSPSASTGTGPGTPGSGTASSSPGASPGTSSTGSPGASPGTSSTGSPGASPGTSSTGSPGSSTPSGATGSPGSSTPSGATGSPGASPGTSSTGSPASSRAQSGSVPQFKKVVFQEFTDGSFTQPLYRGELNEHLGLLGPYIRAEVEDNIMVTFRNQASRPYSFYSSLISYEEDQRQGAEPRKNFVKPNETKTYFWKVQHHMAPTKDEFDCKAWAYFSDVDLEKDVHSGLIGPLLVCHTNTLNPAHGRQVTVQEFALFFTIFDETKSWYFTENMERNCRGAPTSESATPESGPGSEPATSGSETPGTSESATPESGPGSEPATSGSETPGTSESATPESGPGTSTEPSEGSAPGTSESATPESGPGSPAGSPTSTEEGSPAGSPTSTEEGSPAGSPTSTEEGTSESATPESGPGTSTEPSEGSAPGASSAPCNIQMEDPTFKENYRFHAINGYIMDTLPGLVMAQDQRIRWYLLSMGSNENIHSIHFSGHVFTVRKKEEYKMALYNLYPGVFETVEMLPSKAGIWRVECLIGEHLHAGMSTLFLVYSNKCQTPLGMASGHIRDFQITASGQYGQWAPKLARLHYSGSINAWSTKEPFSWIKVDLLAPMIIHGIKTQGARQKFSSLYISQFIIMYSLDGKKWQTYRGNSTGTLMVFFGNVDSSGIKHNIFNPPIIARYIRLHPTHYSIRSTLRMELMGCDLNSCSMPLGMESKAISDAQITASSYFTNMFATWSPSKARLHLQGRSNAWRPQVNNPKEWLQVDFQKTMKVTGVTTQGVKSLLTSMYVKEFLISSSQDGHQWTLFFQNGKVKVFQGNQDSFTPVVNSLDPPLLTRYLRIHPQSWVHQIALRMEVLGCEAQDLYGAGSPGAETAEQKLISEEDLSPATGHHHHHH

SEQ ID NO: 1064 - DNA, 6219 bp, synthetic construct
  misc_feature 1..6219: note = Description of Artificial Sequence: Synthetic polynucleotide
  source 1..6219: mol_type = other DNA
gccaccagaagatactacctgggtgcagtggaactgtcatgggactatatgcaaagtgatctcggtgagctgcctgtggacgcaagatttcctcctagagtgccaaaatcttttccattcaacacctcagtcgtgtacaaaaagactctgtttgtagaattcacggatcaccttttcaacatcgctaagccaaggccaccctggatgggtctgctaggtcctaccatccaggctgaggtttatgatacagtggtcattacacttaagaacatggcttcccatcctgtcagtcttcatgctgttggtgtatcctactggaaagcttctgagggagctgaatatgatgatcagaccagtcaaagggagaaagaagatgataaagtcttccctggtggaagccatacatatgtctggcaggtcctgaaagagaatggtccaatggcctctgacccactgtgccttacctactcatatctttctcatgtggacctggtaaaagacttgaattcaggcctcattggagccctactagtatgtagagaagggagtctggccaaggaaaagacacagaccttgcacaaatttatactactttttgctgtatttgatgaagggaaaagttggcactcagaaacaaagaactccttgatgcaggatagggatgctgcatctgctcgggcctggcctaaaatgcacacagtcaatggttatgtaaacaggtctctgccaggtctgattggatgccacaggaaatcagtctattggcatgtgattggaatgggcaccactcctgaagtgcactcaatattcctcgaaggtcacacatttcttgtgaggaaccatcgccaggctagcttggaaatctcgccaataactttccttactgctcaaacactcttgatggaccttggacagtttctactgttttgtcatatctcttcccaccaacatgatggcatggaagcttatgtcaaagtagacagctgtccagaggaaccccaactacgaatgaaaaataatgaagaagcggaagactatgatgatgatcttactgattctgaaatggatgtggtcaggtttgatgatgacaactctccttcctttatccaaattcgctcagttgccaagaagcatcctaaaacttgggtacattacattgctgctgaagaggaggactgggactatgctcccttagtcctcgcccccgatggcgcgccaaccagtacggagccgtccgaggggagcgcaccaggaagcccggctgggagcccgacttctaccgaagagggtacatctaccgaaccaagtgaaggttcagcaccaggcacctcaacagaaccctctgagggctcggcgcctggtacaagtgagtccgccaccccagaatccgggcctgggacaagcacagaaccttcggaagggagtgcccctggaacatccgaatcggcaaccccagaatcagggccaggatctgagcccgcgacttcgggctccgagacgcctgggacatccaccgagccctccgaaggatcagccccaggcaccagcacggagccctctgagggaagcgcacctggtaccagcgaaagcgcaactcccgaatcaggtcccggtacgagcgagtcggcgaccccggagagcgggccaggtgcctcgagcgacagaagttataaaagtcaatatttgaacaatggccctcagcggattggtaggaagtacaaaaaagtccgatttatggcatacacagatgaaacctttaagactcgtgaagctattcagcatgaatcaggaatcttgggacctttactttatggggaagttggagacacactgttgattatatttaagaatcaagcaagcagaccatataacatctaccctcacggaatcactgatgtccgtcctttgtattcaaggagattaccaaaaggtgtaaaacatttgaaggattttccaattctgccaggagaaatattcaaatataaatggacagtgactgtagaagatgggccaactaaatcagatcctcggtgcctgacccgctattactctagtttcgttaatatggagagagatctagcttcaggactcattggccctctcctcatctgctacaaagaatctgtagatcaaagaggaaaccagataatgtcagacaagaggaatgtcatcctgttttctgtatttgatgagaaccgaagctggtacctcacagagaatatacaacgctttctccccaatccagctggagtgcagcttgaggatccagagttccaagcctccaacatcatgcacagcatcaatggctatgtttttgatagtttgcagttgtcagtttgtttgcatgaggtggcatactggtacattctaagcattggagcacagactgacttcctttctgtcttcttctctggatataccttcaaacacaaaatggtctatgaagacacactcaccctattcccattctcaggagaaactgtcttcatgtcgatggaaaacccaggtctatggattctggggtgccacaactcagactttcggaacagaggcatgaccgccttactgaaggtttctagttgtgacaagaacactggtgattattacgaggacagttatgaagatatttcagcatacttgctgagtaaaaacaatgccattgaaccaagaagcttctctcaaaacccaccagtcttgaaacgccatcaacgggaaataactcgtactactcttcagggcgcgccaggtacacccggatcgggtacagcgtcatcgagccccggtgcgtcacctggtacgtcgagcacggggtcgccaggggcgtcccctgggacgtcctcaacaggctcgcccggtgcgtcacccggcacgtcgtccacgggttcacctggtagctccccttccgcgtccactggcaccgggcctggaactccggggagcggcacagcgagctcgtcgccgggagcatcgcctgggacatcgagcaccgggtcgccaggagcatcgcccggaacatccagcacaggaagccccggcgcgtcgcccgggacatcaagcacaggttccccgggatcgagcacgccgtccggagccactggatcaccagggagctcgacaccttccggcgcaacgggatcgcccggagccagcccgggtacgtcaagcactggctcccctgcctcgagctcagatcaagaggaaatcgattatgatgataccatatcagttgaaatgaagaaggaagattttgacatttatgatgaggatgaaaatcagagcccccgcagctttcaaaagaaaacacgacactattttattgctgcagtggagaggctctgggattatgggatgagtagctccccacatgttctaagaaacagggctcagggcgcgccaggtacacccggatcgggtacagcgtcatcgagccccggtgcgtcacctggtacgtcgagcacggggtcgccaggggcgtcccctgggacgtcctcaacaggctcgcccggtgcgtcacccggcacgtcgtccacgggttcacctggtagctccccttccgcgtccactggcaccgggcctggaactccggggagcggcacagcgagctcgtcgccgggagcatcgcctgggacatcgagcaccgggtcgccaggagcatcgcccggaacatccagcacaggaagccccggcgcgtcgcccgggacatcaagcacaggttccccgggatcgagcacgccgtccggagccactggatcaccagggagctcgacaccttccggcgcaacgggatcgcccggagccagcccgggtacgtcaagcactggctcccctgcctcgagcagggctcagagtggcagtgtccctcagttcaagaaagttgttttccaggaatttactgatggctcctttactcagcccttataccgtggagaactaaatgaacatttgggactcctggggccatatataagagcagaagttgaagataatatcatggtaactttcagaaatcaggcctctcgtccctattccttctattctagccttatttcttatgaggaagatcagaggcaaggagcagaacctagaaaaaactttgtcaagcctaatgaaaccaaaacttacttttggaaagtgcaacatcatatggcacccactaaagatgagtttgactgcaaagcctgggcttatttctctgatgttgacctggaaaaagatgtgcactcaggcctgattggaccccttctggtctgccacactaacacactgaaccctgctcatgggagacaagtgacagtacaggaatttgctctgtttttcaccatctttgatgagaccaaaagctggtacttcactgaaaatatggaaagaaactgcaggggcgcgccaacgtccgaaagtgctacccctgagtcaggccctggtagtgagcctgccacaagcggaagcgaaactccggggacctcagagtctgccactcccgaatcggggccaggctctgaaccggccacttcagggagcgaaacaccaggaacatcggagagcgctaccccggagagcgggccaggaactagtactgagcctagcgagggaagtgcacctggtacaagcgagtccgccacacccgagtctggccctggctctccagcgggctcacccacgagcactgaagagggctctcccgctggcagcccaacgtcgacagaagaaggatcaccagcaggctcccccacatcaacagaggagggtacatcagaatctgctactcccgagagtggacccggtacctccactgagcccagcgaggggagtgcaccaggtgcctcgagcgctccctgcaatatccagatggaagatcccacttttaaagagaattatcgcttccatgcaatcaatggctacataatggatacactacctggcttagtaatggctcaggatcaaaggattcgatggtatctgctcagcatgggcagcaatgaaaacatccattctattcatttcagtggacatgtgttcactgtacgaaaaaaagaggagtataaaatggcactgtacaatctctatccaggtgtttttgagacagtggaaatgttaccatccaaagctggaatttggcgggtggaatgccttattggcgagcatctacatgctgggatgagcacactttttctggtgtacagcaataagtgtcagactcccctgggaatggcttctggacacattagagattttcagattacagcttcaggacaatatggacagtgggccccaaagctggccagacttcattattccggatcaatcaatgcctggagcaccaaggagcccttttcttggatcaaggtggatctgttggcaccaatgattattcacggcatcaagacccagggtgcccgtcagaagttctccagcctctacatctctcagtttatcatcatgtatagtcttgatgggaagaagtggcagacttatcgaggaaattccactggaaccttaatggtcttctttggcaatgtggattcatctgggataaaacacaatatttttaaccctccaattattgctcgatacatccgtttgcacccaactcattatagcattcgcagcactcttcgcatggagttgatgggctgtgatttaaatagttgcagcatgccattgggaatggagagtaaagcaatatcagatgcacagattactgcttcatcctactttaccaatatgtttgccacctggtctccttcaaaagctcgacttcacctccaagggaggagtaatgcctggagacctcaggtgaataatccaaaagagtggctgcaagtggacttccagaagacaatgaaagtcacaggagtaactactcagggagtaaaatctctgcttaccagcatgtatgtgaaggagttcctcatctccagcagtcaagatggccatcagtggactctcttttttcagaatggcaaagtaaaggtttttcagggaaatcaagactccttcacacctgtggtgaactctctagacccaccgttactgactcgctaccttcgaattcacccccagagttgggtgcaccagattgccctgaggatggaggttctgggctgcgaggcacaggacctctacggcgccggatcacctggggccgaaacggccgaacaaaaactcatctcagaagaggatctgtcacctgcaaccggtcatcatcaccatcaccattga

SEQ ID NO: 1065 - protein, 2222 aa, synthetic construct
  REGION 1..2222: note = Description of Artificial Sequence: Synthetic polypeptide
ATRRYYLGAVELSWDYMQSDLGELPVGAPGSSPSASTGTGPGSSPSASTGTGPGASPGTSSTGSPGASPGTSSTGSPGSSTPSGATGSPGSSPSASTGTGPGASPGTSSTGSPGSSPSASTGTGPGTPGSGTASSSPGSSTPSGATGSPGSSTPSGATGSPGASPGTSSTGSPASSDARFPPRVPKSFPFNTSVVYKKTLFVEFTDHLFNIAKPRPPWMGLLGPTIQAEVYDTVVITLKNMASHPVSLHAVGVSYWKASEGAEYDDQTSQREKEDDKVFPGGSHTYVWQVLKENGPMASDPLCLTYSYLSHVDLVKDLNSGLIGALLVCREGSLAKEKTQTLHKFILLFAVFDEGKSWHSETKNSLMQDRDAASARAWPKMHTVNGYVNRSLPGLIGCHRKSVYWHVIGMGTTPEVHSIFLEGHTFLVRNHRQASLEISPITFLTAQTLLMDLGQFLLFCHISSHQHDGMEAYVKVDSCPEEPQLRMKNNEEAEDYDDDLTDSEMDVVRFDDDNSPSFIQIRSVAKKHPKTWVHYIAAEEEDWDYAPLVLAPDGAPTSTEPSEGSAPGSPAGSPTSTEEGTSTEPSEGSAPGTSTEPSEGSAPGTSESATPESGPGTSTEPSEGSAPGTSESATPESGPGSEPATSGSETPGTSTEPSEGSAPGTSTEPSEGSAPGTSESATPESGPGTSESATPESGPGASSDRSYKSQYLNNGPQRIGRKYKKVRFMAYTDETFKTREAIQHESGILGPLLYGEVGDTLLIIFKNQASRPYNIYPHGITDVRPLYSRRLPKGVKHLKDFPILPGEIFKYKWTVTVEDGPTKSDPRCLTRYYSSFVNMERDLASGLIGPLLICYKESVDQRGNQIMSDKRNVILFSVFDENRSWYLTENIQRFLPNPAGVQLEDPEFQASNIMHSINGYVFDSLQLSVCLHEVAYWYILSIGAQTDFLSVFFSGYTFKHKMVYEDTLTLFPFSGETVFMSMENPGLWILGCHNSDFRNRGMTALLKVSSCDKNTGDYYEDSYEDISAYLLSKNNAIEPRSFSQNPPVLKRHQREITRTTLQGAPGTPGSGTASSSPGASPGTSSTGSPGASPGTSSTGSPGASPGTSSTGSPGSSPSASTGTGPGTPGSGTASSSPGASPGTSSTGSPGASPGTSSTGSPGASPGTSSTGSPGSSTPSGATGSPGSSTPSGATGSPGASPGTSSTGSPASSSDQEEIDYDDTISVEMKKEDFDIYDEDENQSPRSFQKKTRHYFIAAVERLWDYGMSSSPHVLRNRAQGAPGTPGSGTASSSPGASPGTSSTGSPGASPGTSSTGSPGASPGTSSTGSPGSSPSASTGTGPGTPGSGTASSSPGASPGTSSTGSPGASPGTSSTGSPGASPGTSSTGSPGSSTPSGATGSPGSSTPSGATGSPGASPGTSSTGSPASSRAQSGSVPQFKKVVFQEFTDGSFTQPLYRGELNEHLGLLGPYIRAEVEDNIMVTFRNQASRPYSFYSSLISYEEDQRQGAEPRKNFVKPNETKTYFWKVQHHMAPTKDEFDCKAWAYFSDVDLEKDVHSGLIGPLLVCHTNTLNPAHGRQVTVQEFALFFTIFDETKSWYFTENMERNCRGAPTSESATPESGPGSEPATSGSETPGTSESATPESGPGSEPATSGSETPGTSESATPESGPGTSTEPSEGSAPGTSESATPESGPGSPAGSPTSTEEGSPAGSPTSTEEGSPAGSPTSTEEGTSESATPESGPGTSTEPSEGSAPGASSAPCNIQMEDPTFKENYRFHAINGYIMDTLPGLVMAQDQRIRWYLLSMGSNENIHSIHFSGHVFTVRKKEEYKMALYNLYPGVFETVEMLPSKAGIWRVECLIGEHLHAGMSTLFLVYSNKCQTPLGMASGHIRDFQITASGQYGQWAPKLARLHYSGSINAWSTKEPFSWIKVDLLAPMIIHGIKTQGARQKFSSLYISQFIIMYSLDGKKWQTYRGNSTGTLMVFFGNVDSSGIKHNIFNPPIIARYIRLHPTHYSIRSTLRMELMGCDLNSCSMPLGMESKAISDAQITASSYFTNMFATWSPSKARLHLQGRSNAWRPQVNNPKEWLQVDFQKTMKVTGVTTQGVKSLLTSMYVKEFLISSSQDGHQWTLFFQNGKVKVFQGNQDSFTPVVNSLDPPLLTRYLRIHPQSWVHQIALRMEVLGCEAQDLYGAGSPGAETAEQKLISEEDLSPATGHHHHHH

SEQ ID NO: 1066 - DNA, 6669 bp, synthetic construct
  misc_feature 1..6669: note = Description of Artificial Sequence: Synthetic polynucleotide
  source 1..6669: mol_type = other DNA
gccaccagaagatactacctgggtgcagtggaactgtcatgggactatatgcaaagtgatctcggtgagctgcctgtgggcgcgccaggctccagcccctccgcgagcacgggaaccggaccaggttcgtcaccctcagcatcaacggggacgggaccgggggcgtcaccaggaacgtcctccaccggctcgccgggtgcatcacccggaacgtcatcgaccggatcgccagggagctcgacgccatcaggcgcaacaggatcacctggctcaagccctagcgcgtcaaccggcacgggtccgggtgcctcccctggcacgtccagcaccggatcacccggatcgagcccatccgcctcaaccggaaccggacccggtacaccagggtcgggaacagcctcctcgtcaccaggctcctcaaccccctcgggagccacgggttcgcccggttcgtcaacgccttccggagcaactggtagccccggagcatcgccaggaacttcgagcacggggtcgcccgcctcgagcgacgcaagatttcctcctagagtgccaaaatcttttccattcaacacctcagtcgtgtacaaaaagactctgtttgtagaattcacggatcaccttttcaacatcgctaagccaaggccaccctggatgggtctgctaggtcctaccatccaggctgaggtttatgatacagtggtcattacacttaagaacatggcttcccatcctgtcagtcttcatgctgttggtgtatcctactggaaagcttctgagggagctgaatatgatgatcagaccagtcaaagggagaaagaagatgataaagtcttccctggtggaagccatacatatgtctggcaggtcctgaaagagaatggtccaatggcctctgacccactgtgccttacctactcatatctttctcatgtggacctggtaaaagacttgaattcaggcctcattggagccctactagtatgtagagaagggagtctggccaaggaaaagacacagaccttgcacaaatttatactactttttgctgtatttgatgaagggaaaagttggcactcagaaacaaagaactccttgatgcaggatagggatgctgcatctgctcgggcctggcctaaaatgcacacagtcaatggttatgtaaacaggtctctgccaggtctgattggatgccacaggaaatcagtctattggcatgtgattggaatgggcaccactcctgaagtgcactcaatattcctcgaaggtcacacatttcttgtgaggaaccatcgccaggctagcttggaaatctcgccaataactttccttactgctcaaacactcttgatggaccttggacagtttctactgttttgtcatatctcttcccaccaacatgatggcatggaagcttatgtcaaagtagacagctgtccagaggaaccccaactacgaatgaaaaataatgaagaagcggaagactatgatgatgatcttactgattctgaaatggatgtggtcaggtttgatgatgacaactctccttcctttatccaaattcgctcagttgccaagaagcatcctaaaacttgggtacattacattgctgctgaagaggaggactgggactatgctcccttagtcctcgcccccgatggcgcgccaaccagtacggagccgtccgaggggagcgcaccaggaagcccggctgggagcccgacttctaccgaagagggtacatctaccgaaccaagtgaaggttcagcaccaggcacctcaacagaaccctctgagggctcggcgcctggtacaagtgagtccgccaccccagaatccgggcctgggacaagcacagaaccttcggaagggagtgcccctggaacatccgaatcggcaaccccagaatcagggccaggatctgagcccgcgacttcgggctccgagacgcctgggacatccaccgagccctccgaaggatcagccccaggcaccagcacggagccctctgagggaagcgcacctggtaccagcgaaagcgcaactcccgaatcaggtcccggtacgagcgagtcggcgaccccggagagcgggccaggtgcctcgagcgacagaagttataaaagtcaatatttgaacaatggccctcagcggattggtaggaagtacaaaaaagtccgatttatggcatacacagatgaaacctttaagactcgtgaagctattcagcatgaatcaggaatcttgggacctttactttatggggaagttggagacacactgttgattatatttaagaatcaagcaagcagaccatataacatctaccctcacggaatcactgatgtccgtcctttgtattcaaggagattaccaaaaggtgtaaaacatttgaaggattttccaattctgccaggagaaatattcaaatataaatggacagtgactgtagaagatgggccaactaaatcagatcctcggtgcctgacccgctattactctagtttcgttaatatggagagagatctagcttcaggactcattggccctctcctcatctgctacaaagaatctgtagatcaaagaggaaaccagataatgtcagacaagaggaatgtcatcctgttttctgtatttgatgagaaccgaagctggtacctcacagagaatatacaacgctttctccccaatccagctggagtgcagcttgaggatccagagttccaagcctccaacatcatgcacagcatcaatggctatgtttttgatagtttgcagttgtcagtttgtttgcatgaggtggcatactggtacattctaagcattggagcacagactgacttcctttctgtcttcttctctggatataccttcaaacacaaaatggtctatgaagacacactcaccctattcccattctcaggagaaactgtcttcatgtcgatggaaaacccaggtctatggattctggggtgccacaactcagactttcggaacagaggcatgaccgccttactgaaggtttctagttgtgacaagaacactggtgattattacgaggacagttatgaagatatttcagcatacttgctgagtaaaaacaatgccattgaaccaagaagcttctctcaaaacccaccagtcttgaaacgccatcaacgggaaataactcgtactactcttcagggcgcgccaggtacacccggatcgggtacagcgtcatcgagccccggtgcgtcacctggtacgtcgagcacggggtcgccaggggcgtcccctgggacgtcctcaacaggctcgcccggtgcgtcacccggcacgtcgtccacgggttcacctggtagctccccttccgcgtccactggcaccgggcctggaactccggggagcggcacagcgagctcgtcgccgggagcatcgcctgggacatcgagcaccgggtcgccaggagcatcgcccggaacatccagcacaggaagccccggcgcgtcgcccgggacatcaagcacaggttccccgggatcgagcacgccgtccggagccactggatcaccagggagctcgacaccttccggcgcaacgggatcgcccggagccagcccgggtacgtcaagcactggctcccctgcctcgagctcagatcaagaggaaatcgattatgatgataccatatcagttgaaatgaagaaggaagattttgacatttatgatgaggatgaaaatcagagcccccgcagctttcaaaagaaaacacgacactattttattgctgcagtggagaggctctgggattatgggatgagtagctccccacatgttctaagaaacagggctcagggcgcgccaggtacacccggatcgggtacagcgtcatcgagccccggtgcgtcacctggtacgtcgagcacggggtcgccaggggcgtcccctgggacgtcctcaacaggctcgcccggtgcgtcacccggcacgtcgtccacgggttcacctggtagctccccttccgcgtccactggcaccgggcctggaactccggggagcggcacagcgagctcgtcgccgggagcatcgcctgggacatcgagcaccgggtcgccaggagcatcgcccggaacatccagcacaggaagccccggcgcgtcgcccgggacatcaagcacaggttccccgggatcgagcacgccgtccggagccactggatcaccagggagctcgacaccttccggcgcaacgggatcgcccggagccagcccgggtacgtcaagcactggctcccctgcctcgagcagggctcagagtggcagtgtccctcagttcaagaaagttgttttccaggaatttactgatggctcctttactcagcccttataccgtggagaactaaatgaacatttgggactcctggggccatatataagagcagaagttgaagataatatcatggtaactttcagaaatcaggcctctcgtccctattccttctattctagccttatttcttatgaggaagatcagaggcaaggagcagaacctagaaaaaactttgtcaagcctaatgaaaccaaaacttacttttggaaagtgcaacatcatatggcacccactaaagatgagtttgactgcaaagcctgggcttatttctctgatgttgacctggaaaaagatgtgcactcaggcctgattggaccccttctggtctgccacactaacacactgaaccctgctcatgggagacaagtgacagtacaggaatttgctctgtttttcaccatctttgatgagaccaaaagctggtacttcactgaaaatatggaaagaaactgcaggggcgcgccaacgtccgaaagtgctacccctgagtcaggccctggtagtgagcctgccacaagcggaagcgaaactccggggacctcagagtctgccactcccgaatcggggccaggctctgaaccggccacttcagggagcgaaacaccaggaacatcggagagcgctaccccggagagcgggccaggaactagtactgagcctagcgagggaagtgcacctggtacaagcgagtccgccacacccgagtctggccctggctctccagcgggctcacccacgagcactgaagagggctctcccgctggcagcccaacgtcgacagaagaaggatcaccagcaggctcccccacatcaacagaggagggtacatcagaatctgctactcccgagagtggacccggtacctccactgagcccagcgaggggagtgcaccaggtgcctcgagcgctccctgcaatatccagatggaagatcccacttttaaagagaattatcgcttccatgcaatcaatggctacataatggatacactacctggcttagtaatggctcaggatcaaaggattcgatggtatctgctcagcatgggcagcaatgaaaacatccattctattcatttcagtggacatgtgttcactgtacgaaaaaaagaggagtataaaatggcactgtacaatctctatccaggtgtttttgagacagtggaaatgttaccatccaaagctggaatttggcgggtggaatgccttattggcgagcatctacatgctgggatgagcacactttttctggtgtacagcaataagtgtcagactcccctgggaatggcttctggacacattagagattttcagattacagcttcaggacaatatggacagtgggccccaaagctggccagacttcattattccggatcaatcaatgcctggagcaccaaggagcccttttcttggatcaaggtggatctgttggcaccaatgattattcacggcatcaagacccagggtgcccgtcagaagttctccagcctctacatctctcagtttatcatcatgtatagtcttgatgggaagaagtggcagacttatcgaggaaattccactggaaccttaatggtcttctttggcaatgtggattcatctgggataaaacacaatatttttaaccctccaattattgctcgatacatccgtttgcacccaactcattatagcattcgcagcactcttcgcatggagttgatgggctgtgatttaaatagttgcagcatgccattgggaatggagagtaaagcaatatcagatgcacagattactgcttcatcctactttaccaatatgtttgccacctggtctccttcaaaagctcgacttcacctccaagggaggagtaatgcctggagacctcaggtgaataatccaaaagagtggctgcaagtggacttccagaagacaatgaaagtcacaggagtaactactcagggagtaaaatctctgcttaccagcatgtatgtgaaggagttcctcatctccagcagtcaagatggccatcagtggactctcttttttcagaatggcaaagtaaaggtttttcagggaaatcaagactccttcacacctgtggtgaactctctagacccaccgttactgactcgctaccttcgaattcacccccagagttgggtgcaccagattgccctgaggatggaggttctgggctgcgaggcacaggacctctacggcgccggatcacctggggccgaaacggccgaacaaaaactcatctcagaagaggatctgtcacctgcaaccggtcatcatcaccatcaccattga

SEQ ID NO: 1067 - protein, 2053 aa, synthetic construct
  REGION 1..2053: note = Description of Artificial Sequence: Synthetic polypeptide
ATRRYYLGAVELSWDYMQGAPGSSPSASTGTGPGSSPSASTGTGPGASPGTSSTGSPGASPGTSSTGSPGSSTPSGATGSPGSSPSASTGTGPGASPGTSSTGSPGSSPSASTGTGPGTPGSGTASSSPGSSTPSGATGSPGSSTPSGATGSPGASPGTSSTGSPASSSDLGELPVDARFPPRVPKSFPFNTSVVYKKTLFVEFTDHLFNIAKPRPPWMGLLGPTIQAEVYDTVVITLKNMASHPVSLHAVGVSYWKASEGAEYDDQTSQREKEDDKVFPGGSHTYVWQVLKENGPMASDPLCLTYSYLSHVDLVKDLNSGLIGALLVCREGSLAKEKTQTLHKFILLFAVFDEGKSWHSETKNSLMQDRDAASARAWPKMHTVNGYVNRSLPGLIGCHRKSVYWHVIGMGTTPEVHSIFLEGHTFLVRNHRQASLEISPITFLTAQTLLMDLGQFLLFCHISSHQHDGMEAYVKVDSCPEEPQLRMKNNEEAEDYDDDLTDSEMDVVRFDDDNSPSFIQIRSVAKKHPKTWVHYIAAEEEDWDYAPLVLAPDDRSYKSQYLNNGPQRIGRKYKKVRFMAYTDETFKTREAIQHESGILGPLLYGEVGDTLLIIFKNQASRPYNIYPHGITDVRPLYSRRLPKGVKHLKDFPILPGEIFKYKWTVTVEDGPTKSDPRCLTRYYSSFVNMERDLASGLIGPLLICYKESVDQRGNQIMSDKRNVILFSVFDENRSWYLTENIQRFLPNPAGVQLEDPEFQASNIMHSINGYVFDSLQLSVCLHEVAYWYILSIGAQTDFLSVFFSGYTFKHKMVYEDTLTLFPFSGETVFMSMENPGLWILGCHNSDFRNRGMTALLKVSSCDKNTGDYYEDSYEDISAYLLSKNNAIEPRSFSQNGAPSPAGSPTSTEEGTSESATPESGPGSEPATSGSETPGTSESATPESGPGTSTEPSEGSAPGTSTEPSEGSAPGTSTEPSEGSAPGTSTEPSEGSAPGTSTEPSEGSAPGTSTEPSEGSAPGSPAGSPTSTEEGTSTEPSEGSAPGASSPPVLKRHQAEITRTTLQSDQEEIDYDDTISVEMKKEDFDIYDEDENQSPRSFQKKTRHYFIAAVERLWDYGMSSSPHVLRNRAQSGSVPQFKKVVFQEFTDGSFTQPLYRGELNEHLGLLGPYIRAEVEDNIMVTFRNQASRPYSFYSSLISYEEDQRQGAEPRKNFVKPNETKTYFWKVQHHMAPTKDEFDCKAWAYFSDVDLEKDVHSGLIGPLLVCHTNTLNPAHGRQVTVQEFALFFTIFDETKSWYFTENMERNCRAPCNIQMEDPTFKENYRFHAINGYIMDTLPGLVMAQDQRIRWYLLSMGSNENIHSIHFSGHVFTVRKKEEYKMALYNLYPGVFETVEMLPSKAGIWRVECLIGEHLHAGMSTLFLVYSNKCQTPLGMASGHIRDFQITASGQYGQWAPKLARLHYSGSINAWSTKEPFSWIKVDLLAPMIIHGIKTQGARQKFSSLYISQFIIMYSLDGKKWQTYRGNSTGTLMVFFGNVDSSGIKHNIFNPPIIARYIRLHPTHYSIRSTLRMELMGCDLNSCSMPLGMESKAISDAQITASSYFTNMFATWSPSKARLHLQGRSNAWRPQVNNPKEWLQVDFQKTMKVTGVTTQGVKSLLTSMYVKEFLISSSQDGHQWTLFFQNGKVKVFQGNQDSFTPVVNSLDPPLLTRYLRIHPQSWVHQIALRMEVLGCEAQDLYGAPGTSESATPESGPGSEPATSGSETPGTSESATPESGPGSEPATSGSETPGTSESATPESGPGTSTEPSEGSAPGSPAGSPTSTEEGTSESATPESGPGSEPATSGSETPGTSESATPESGPGSPAGSPTSTEEGSPAGSPTSTEEGTSTEPSEGSAPGTSESATPESGPGTSESATPESGPGTSESATPESGPGSEPATSGSETPGSEPATSGSETPGSPAGSPTSTEEGTSTEPSEGSAPGTSTEPSEGSAPGSEPATSGSETPGTSESATPESGPGTSTEPSEGSAPASSEQKLISEEDLSPATGHHHHHH

SEQ ID NO: 1068 - DNA, 6162 bp, synthetic construct
  misc_feature 1..6162: note = Description of Artificial Sequence: Synthetic polynucleotide
  source 1..6162: mol_type = other DNA
gccaccagaagatactacctgggtgcagtggaactgtcatgggactatatgcaaggcgcgccaggctccagcccctccgcgagcacgggaaccggaccaggttcgtcaccctcagcatcaacggggacgggaccgggggcgtcaccaggaacgtcctccaccggctcgccgggtgcatcacccggaacgtcatcgaccggatcgccagggagctcgacgccatcaggcgcaacaggatcacctggctcaagccctagcgcgtcaaccggcacgggtccgggtgcctcccctggcacgtccagcaccggatcacccggatcgagcccatccgcctcaaccggaaccggacccggtacaccagggtcgggaacagcctcctcgtcaccaggctcctcaaccccctcgggagccacgggttcgcccggttcgtcaacgccttccggagcaactggtagccccggagcatcgccaggaacttcgagcacggggtcgcccgcctcgagcagtgatctcggtgagctgcctgtggacgcaagatttcctcctagagtgccaaaatcttttccattcaacacctcagtcgtgtacaaaaagactctgtttgtagaattcacggatcaccttttcaacatcgctaagccaaggccaccctggatgggtctgctaggtcctaccatccaggctgaggtttatgatacagtggtcattacacttaagaacatggcttcccatcctgtcagtcttcatgctgttggtgtatcctactggaaagcttctgagggagctgaatatgatgatcagaccagtcaaagggagaaagaagatgataaagtcttccctggtggaagccatacatatgtctggcaggtcctgaaagagaatggtccaatggcctctgacccactgtgccttacctactcatatctttctcatgtggacctggtaaaagacttgaattcaggcctcattggagccctactagtatgtagagaagggagtctggccaaggaaaagacacagaccttgcacaaatttatactactttttgctgtatttgatgaagggaaaagttggcactcagaaacaaagaactccttgatgcaggatagggatgctgcatctgctcgggcctggcctaaaatgcacacagtcaatggttatgtaaacaggtctctgccaggtctgattggatgccacaggaaatcagtctattggcatgtgattggaatgggcaccactcctgaagtgcactcaatattcctcgaaggtcacacatttcttgtgaggaaccatcgccaggctagcttggaaatctcgccaataactttccttactgctcaaacactcttgatggaccttggacagtttctactgttttgtcatatctcttcccaccaacatgatggcatggaagcttatgtcaaagtagacagctgtccagaggaaccccaactacgaatgaaaaataatgaagaagcggaagactatgatgatgatcttactgattctgaaatggatgtggtcaggtttgatgatgacaactctccttcctttatccaaattcgctcagttgccaagaagcatcctaaaacttgggtacattacattgctgctgaagaggaggactgggactatgctcccttagtcctcgcccccgatgacagaagttataaaagtcaatatttgaacaatggccctcagcggattggtaggaagtacaaaaaagtccgatttatggcatacacagatgaaacctttaagactcgtgaagctattcagcatgaatcaggaatcttgggacctttactttatggggaagttggagacacactgttgattatatttaagaatcaagcaagcagaccatataacatctaccctcacggaatcactgatgtccgtcctttgtattcaaggagattaccaaaaggtgtaaaacatttgaaggattttccaattctgccaggagaaatattcaaatataaatggacagtgactgtagaagatgggccaactaaatcagatcctcggtgcctgacccgctattactctagtttcgttaatatggagagagatctagcttcaggactcattggccctctcctcatctgctacaaagaatctgtagatcaaagaggaaaccagataatgtcagacaagaggaatgtcatcctgttttctgtatttgatgagaaccgaagctggtacctcacagagaatatacaacgctttctccccaatccagctggagtgcagcttgaggatccagagttccaagcctccaacatcatgcacagcatcaatggctatgtttttgatagtttgcagttgtcagtttgtttgcatgaggtggcatactggtacattctaagcattggagcacagactgacttcctttctgtcttcttctctggatataccttcaaacacaaaatggtctatgaagacacactcaccctattcccattctcaggagaaactgtcttcatgtcgatggaaaacccaggtctatggattctggggtgccacaactcagactttcggaacagaggcatgaccgccttactgaaggtttctagttgtgacaagaacactggtgattattacgaggacagttatgaagatatttcagcatacttgctgagtaaaaacaatgccattgaaccaagaagcttctctcaaaacggcgcgccaagtcccgctggaagcccaactagcaccgaagaggggacctcagagtccgccacccccgagtccggccctggctctgagcctgccactagcggctccgagactcctggcacatccgaaagcgctacacccgagagtggacccggcacctctaccgagcccagtgagggctccgcccctggaacaagcaccgagcccagcgaaggcagcgccccagggacctccacagagcccagtgaaggcagtgctcctggcaccagcaccgaaccaagcgagggctctgcacccgggacctccaccgagccaagcgaaggctctgcccctggcacttccaccgagcccagcgaaggcagcgcccctgggagccccgctggctctcccaccagcactgaggagggcacatctaccgaaccaagtgaaggctctgcaccaggtgcctcgagcccaccagtcttgaaacgccatcaagctgaaataactcgtactactcttcagtcagatcaagaggaaatcgattatgatgataccatatcagttgaaatgaagaaggaagattttgacatttatgatgaggatgaaaatcagagcccccgcagctttcaaaagaaaacacgacactattttattgctgcagtggagaggctctgggattatgggatgagtagctccccacatgttctaagaaacagggctcagagtggcagtgtccctcagttcaagaaagttgttttccaggaatttactgatggctcctttactcagcccttataccgtggagaactaaatgaacatttgggactcctggggccatatataagagcagaagttgaagataatatcatggtaactttcagaaatcaggcctctcgtccctattccttctattctagccttatttcttatgaggaagatcagaggcaaggagcagaacctagaaaaaactttgtcaagcctaatgaaaccaaaacttacttttggaaagtgcaacatcatatggcacccactaaagatgagtttgactgcaaagcctgggcttatttctctgatgttgacctggaaaaagatgtgcactcaggcctgattggaccccttctggtctgccacactaacacactgaaccctgctcatgggagacaagtgacagtacaggaatttgctctgtttttcaccatctttgatgagaccaaaagctggtacttcactgaaaatatggaaagaaactgcagggctccctgcaatatccagatggaagatcccacttttaaagagaattatcgcttccatgcaatcaatggctacataatggatacactacctggcttagtaatggctcaggatcaaaggattcgatggtatctgctcagcatgggcagcaatgaaaacatccattctattcatttcagtggacatgtgttcactgtacgaaaaaaagaggagtataaaatggcactgtacaatctctatccaggtgtttttgagacagtggaaatgttaccatccaaagctggaatttggcgggtggaatgccttattggcgagcatctacatgctgggatgagcacactttttctggtgtacagcaataagtgtcagactcccctgggaatggcttctggacacattagagattttcagattacagcttcaggacaatatggacagtgggccccaaagctggccagacttcattattccggatcaatcaatgcctggagcaccaaggagcccttttcttggatcaaggtggatctgttggcaccaatgattattcacggcatcaagacccagggtgcccgtcagaagttctccagcctctacatctctcagtttatcatcatgtatagtcttgatgggaagaagtggcagacttatcgaggaaattccactggaaccttaatggtcttctttggcaatgtggattcatctgggataaaacacaatatttttaaccctccaattattgctcgatacatccgtttgcacccaactcattatagcattcgcagcactcttcgcatggagttgatgggctgtgatttaaatagttgcagcatgccattgggaatggagagtaaagcaatatcagatgcacagattactgcttcatcctactttaccaatatgtttgccacctggtctccttcaaaagctcgacttcacctccaagggaggagtaatgcctggagacctcaggtgaataatccaaaagagtggctgcaagtggacttccagaagacaatgaaagtcacaggagtaactactcagggagtaaaatctctgcttaccagcatgtatgtgaaggagttcctcatctccagcagtcaagatggccatcagtggactctcttttttcagaatggcaaagtaaaggtttttcagggaaatcaagactccttcacacctgtggtgaactctctagacccaccgttactgactcgctaccttcgaattcacccccagagttgggtgcaccagattgccctgaggatggaggttctgggctgcgaggcacaggacctctacggcgcgccaggtacctcagagtctgctacccccgagtcagggccaggatcagagccagccacctccgggtctgagacacccgggacttccgagagtgccacccctgagtccggacccgggtccgagcccgccacttccggctccgaaactcccggcacaagcgagagcgctaccccagagtcaggaccaggaacatctacagagccctctgaaggctccgctccagggtccccagccggcagtcccactagcaccgaggagggaacctctgaaagcgccacacccgaatcagggccagggtctgagcctgctaccagcggcagcgagacaccaggcacctctgagtccgccacaccagagtccggacccggatctcccgctgggagccccacctccactgaggagggatctcctgctggctctccaacatctactgaggaaggtacctcaaccgagccatccgagggatcagctcccggcacctcagagtcggcaaccccggagtctggacccggaacttccgaaagtgccacaccagagtccggtcccgggacttcagaatcagcaacacccgagtccggccctgggtctgaacccgccacaagtggtagtgagacaccaggatcagaacctgctacctcagggtcagagacacccggatctccggcaggctcaccaacctccactgaggagggcaccagcacagaaccaagcgagggctccgcacccggaacaagcactgaacccagtgagggttcagcacccggctctgagccggccacaagtggcagtgagacacccggcacttcagagagtgccacccccgagagtggcccaggcactagtaccgagccctctgaaggcagtgcgccagcctcgagcgaacaaaaactcatctcagaagaggatctgtcacctgcaaccggtcatcatcaccatcaccattga

SEQ ID NO: 1069 - protein, 2053 aa, synthetic construct
  REGION 1..2053: note = Description of Artificial Sequence: Synthetic polypeptide
ATRRYYLGAVELSWDYMQSDLGELPVGAPTSESATPESGPGSEPATSGSETPGTSESATPESGPGSEPATSGSETPGTSESATPESGPGTSTEPSEGSAPGSPAGSPTSTEEGTSESATPESGPGSEPATSGSETPGTSESATPESGPGSPAGSPTSTEEGSPAGSPTSTEEGASSDARFPPRVPKSFPFNTSVVYKKTLFVEFTDHLFNIAKPRPPWMGLLGPTIQAEVYDTVVITLKNMASHPVSLHAVGVSYWKASEGAEYDDQTSQREKEDDKVFPGGSHTYVWQVLKENGPMASDPLCLTYSYLSHVDLVKDLNSGLIGALLVCREGSLAKEKTQTLHKFILLFAVFDEGKSWHSETKNSLMQDRDAASARAWPKMHTVNGYVNRSLPGLIGCHRKSVYWHVIGMGTTPEVHSIFLEGHTFLVRNHRQASLEISPITFLTAQTLLMDLGQFLLFCHISSHQHDGMEAYVKVDSCPEEPQLRMKNNEEAEDYDDDLTDSEMDVVRFDDDNSPSFIQIRSVAKKHPKTWVHYIAAEEEDWDYAPLVLAPDDRSYKSQYLNNGPQRIGRKYKKVRFMAYTDETFKTREAIQHESGILGPLLYGEVGDTLLIIFKNQASRPYNIYPHGITDVRPLYSRRLPKGVKHLKDFPILPGEIFKYKWTVTVEDGPTKSDPRCLTRYYSSFVNMERDLASGLIGPLLICYKESVDQRGNQIMSDKRNVILFSVFDENRSWYLTENIQRFLPNPAGVQLEDPEFQASNIMHSINGYVFDSLQLSVCLHEVAYWYILSIGAQTDFLSVFFSGYTFKHKMVYEDTLTLFPFSGETVFMSMENPGLWILGCHNSDFRNRGMTALLKVSSCDKNTGDYYEDSYEDISAYLLSKNNAIEPRSFSQNGAPSPAGSPTSTEEGTSESATPESGPGSEPATSGSETPGTSESATPESGPGTSTEPSEGSAPGTSTEPSEGSAPGTSTEPSEGSAPGTSTEPSEGSAPGTSTEPSEGSAPGTSTEPSEGSAPGSPAGSPTSTEEGTSTEPSEGSAPGASSPPVLKRHQAEITRTTLQSDQEEIDYDDTISVEMKKEDFDIYDEDENQSPRSFQKKTRHYFIAAVERLWDYGMSSSPHVLRNRAQSGSVPQFKKVVFQEFTDGSFTQPLYRGELNEHLGLLGPYIRAEVEDNIMVTFRNQASRPYSFYSSLISYEEDQRQGAEPRKNFVKPNETKTYFWKVQHHMAPTKDEFDCKAWAYFSDVDLEKDVHSGLIGPLLVCHTNTLNPAHGRQVTVQEFALFFTIFDETKSWYFTENMERNCRAPCNIQMEDPTFKENYRFHAINGYIMDTLPGLVMAQDQRIRWYLLSMGSNENIHSIHFSGHVFTVRKKEEYKMALYNLYPGVFETVEMLPSKAGIWRVECLIGEHLHAGMSTLFLVYSNKCQTPLGMASGHIRDFQITASGQYGQWAPKLARLHYSGSINAWSTKEPFSWIKVDLLAPMIIHGIKTQGARQKFSSLYISQFIIMYSLDGKKWQTYRGNSTGTLMVFFGNVDSSGIKHNIFNPPIIARYIRLHPTHYSIRSTLRMELMGCDLNSCSMPLGMESKAISDAQITASSYFTNMFATWSPSKARLHLQGRSNAWRPQVNNPKEWLQVDFQKTMKVTGVTTQGVKSLLTSMYVKEFLISSSQDGHQWTLFFQNGKVKVFQGNQDSFTPVVNSLDPPLLTRYLRIHPQSWVHQIALRMEVLGCEAQDLYGAPGTSESATPESGPGSEPATSGSETPGTSESATPESGPGSEPATSGSETPGTSESATPESGPGTSTEPSEGSAPGSPAGSPTSTEEGTSESATPESGPGSEPATSGSETPGTSESATPESGPGSPAGSPTSTEEGSPAGSPTSTEEGTSTEPSEGSAPGTSESATPESGPGTSESATPESGPGTSESATPESGPGSEPATSGSETPGSEPATSGSETPGSPAGSPTSTEEGTSTEPSEGSAPGTSTEPSEGSAPGSEPATSGSETPGTSESATPESGPGTSTEPSEGSAPASSEQKLISEEDLSPATGHHHHHH

SEQ ID NO: 1070 - DNA, 6162 bp, synthetic construct
  misc_feature 1..6162: note = Description of Artificial Sequence: Synthetic polynucleotide
  source 1..6162: mol_type = other DNA
gccaccagaagatactacctgggtgcagtggaactgtcatgggactatatgcaaagtgatctcggtgagctgcctgtgggcgcgccaacatcagagagcgccacccctgaaagtggtcccgggagcgagccagccacatctgggtcggaaacgccaggcacaagtgagtctgcaactcccgagtccggacctggctccgagcctgccactagcggctccgagactccgggaacttccgagagcgctacaccagaaagcggacccggaaccagtaccgaacctagcgagggctctgctccgggcagcccagccggctctcctacatccacggaggagggcacttccgaatccgccaccccggagtcagggccaggatctgaacccgctacctcaggcagtgagacgccaggaacgagcgagtccgctacaccggagagtgggccagggagccctgctggatctcctacgtccactgaggaagggtcaccagcgggctcgcccaccagcactgaagaaggtgcctcgagcgacgcaagatttcctcctagagtgccaaaatcttttccattcaacacctcagtcgtgtacaaaaagactctgtttgtagaattcacggatcaccttttcaacatcgctaagccaaggccaccctggatgggtctgctaggtcctaccatccaggctgaggtttatgatacagtggtcattacacttaagaacatggcttcccatcctgtcagtcttcatgctgttggtgtatcctactggaaagcttctgagggagctgaatatgatgatcagaccagtcaaagggagaaagaagatgataaagtcttccctggtggaagccatacatatgtctggcaggtcctgaaagagaatggtccaatggcctctgacccactgtgccttacctactcatatctttctcatgtggacctggtaaaagacttgaattcaggcctcattggagccctactagtatgtagagaagggagtctggccaaggaaaagacacagaccttgcacaaatttatactactttttgctgtatttgatgaagggaaaagttggcactcagaaacaaagaactccttgatgcaggatagggatgctgcatctgctcgggcctggcctaaaatgcacacagtcaatggttatgtaaacaggtctctgccaggtctgattggatgccacaggaaatcagtctattggcatgtgattggaatgggcaccactcctgaagtgcactcaatattcctcgaaggtcacacatttcttgtgaggaaccatcgccaggctagcttggaaatctcgccaataactttccttactgctcaaacactcttgatggaccttggacagtttctactgttttgtcatatctcttcccaccaacatgatggcatggaagcttatgtcaaagtagacagctgtccagaggaaccccaactacgaatgaaaaataatgaagaagcggaagactatgatgatgatcttactgattctgaaatggatgtggtcaggtttgatgatgacaactctccttcctttatccaaattcgctcagttgccaagaagcatcctaaaacttgggtacattacattgctgctgaagaggaggactgggactatgctcccttagtcctcgcccccgatgacagaagttataaaagtcaatatttgaacaatggccctcagcggattggtaggaagtacaaaaaagtccgatttatggcatacacagatgaaacctttaagactcgtgaagctattcagcatgaatcaggaatcttgggacctttactttatggggaagttggagacacactgttgattatatttaagaatcaagcaagcagaccatataacatctaccctcacggaatcactgatgtccgtcctttgtattcaaggagattaccaaaaggtgtaaaacatttgaaggattttccaattctgccaggagaaatattcaaatataaatggacagtgactgtagaagatgggccaactaaatcagatcctcggtgcctgacccgctattactctagtttcgttaatatggagagagatctagcttcaggactcattggccctctcctcatctgctacaaagaatctgtagatcaaagaggaaaccagataatgtcagacaagaggaatgtcatcctgttttctgtatttgatgagaaccgaagctggtacctcacagagaatatacaacgctttctccccaatccagctggagtgcagcttgaggatccagagttccaagcctccaacatcatgcacagcatcaatggctatgtttttgatagtttgcagttgtcagtttgtttgcatgaggtggcatactggtacattctaagcattggagcacagactgacttcctttctgtcttcttctctggatataccttcaaacacaaaatggtctatgaagacacactcaccctattcccattctcaggagaaactgtcttcatgtcgatggaaaacccaggtctatggattctggggtgccacaactcagactttcggaacagaggcatgaccgccttactgaaggtttctagttgtgacaagaacactggtgattattacgaggacagttatgaagatatttcagcatacttgctgagtaaaaacaatgccattgaaccaagaagcttctctcaaaacggcgcgccaagtcccgctggaagcccaactagcaccgaagaggggacctcagagtccgccacccccgagtccggccctggctctgagcctgccactagcggctccgagactcctggcacatccgaaagcgctacacccgagagtggacccggcacctctaccgagcccagtgagggctccgcccctggaacaagcaccgagcccagcgaaggcagcgccccagggacctccacagagcccagtgaaggcagtgctcctggcaccagcaccgaaccaagcgagggctctgcacccgggacctccaccgagccaagcgaaggctctgcccctggcacttccaccgagcccagcgaaggcagcgcccctgggagccccgctggctctcccaccagcactgaggagggcacatctaccgaaccaagtgaaggctctgcaccaggtgcctcgagcccaccagtcttgaaacgccatcaagctgaaataactcgtactactcttcagtcagatcaagaggaaatcgattatgatgataccatatcagttgaaatgaagaaggaagattttgacatttatgatgaggatgaaaatcagagcccccgcagctttcaaaagaaaacacgacactattttattgctgcagtggagaggctctgggattatgggatgagtagctccccacatgttctaagaaacagggctcagagtggcagtgtccctcagttcaagaaagttgttttccaggaatttactgatggctcctttactcagcccttataccgtggagaactaaatgaacatttgggactcctggggccatatataagagcagaagttgaagataatatcatggtaactttcagaaatcaggcctctcgtccctattccttctattctagccttatttcttatgaggaagatcagaggcaaggagcagaacctagaaaaaactttgtcaagcctaatgaaaccaaaacttacttttggaaagtgcaacatcatatggcacccactaaagatgagtttgactgcaaagcctgggcttatttctctgatgttgacctggaaaaagatgtgcactcaggcctgattggaccccttctggtctgccacactaacacactgaaccctgctcatgggagacaagtgacagtacaggaatttgctctgtttttcaccatctttgatgagaccaaaagctggtacttcactgaaaatatggaaagaaactgcagggctccctgcaatatccagatggaagatcccacttttaaagagaattatcgcttccatgcaatcaatggctacataatggatacactacctggcttagtaatggctcaggatcaaaggattcgatggtatctgctcagcatgggcagcaatgaaaacatccattctattcatttcagtggacatgtgttcactgtacgaaaaaaagaggagtataaaatggcactgtacaatctctatccaggtgtttttgagacagtggaaatgttaccatccaaagctggaatttggcgggtggaatgccttattggcgagcatctacatgctgggatgagcacactttttctggtgtacagcaataagtgtcagactcccctgggaatggcttctggacacattagagattttcagattacagcttcaggacaatatggacagtgggccccaaagctggccagacttcattattccggatcaatcaatgcctggagcaccaaggagcccttttcttggatcaaggtggatctgttggcaccaatgattattcacggcatcaagacccagggtgcccgtcagaagttctccagcctctacatctctcagtttatcatcatgtatagtcttgatgggaagaagtggcagacttatcgaggaaattccactggaaccttaatggtcttctttggcaatgtggattcatctgggataaaacacaatatttttaaccctccaattattgctcgatacatccgtttgcacccaactcattatagcattcgcagcactcttcgcatggagttgatgggctgtgatttaaatagttgcagcatgccattgggaatggagagtaaagcaatatcagatgcacagattactgcttcatcctactttaccaatatgtttgccacctggtctccttcaaaagctcgacttcacctccaagggaggagtaatgcctggagacctcaggtgaataatccaaaagagtggctgcaagtggacttccagaagacaatgaaagtcacaggagtaactactcagggagtaaaatctctgcttaccagcatgtatgtgaaggagttcctcatctccagcagtcaagatggccatcagtggactctcttttttcagaatggcaaagtaaaggtttttcagggaaatcaagactccttcacacctgtggtgaactctctagacccaccgttactgactcgctaccttcgaattcacccccagagttgggtgcaccagattgccctgaggatggaggttctgggctgcgaggcacaggacctctacggcgcgccaggtacctcagagtctgctacccccgagtcagggccaggatcagagccagccacctccgggtctgagacacccgggacttccgagagtgccacccctgagtccggacccgggtccgagcccgccacttccggctccgaaactcccggcacaagcgagagcgctaccccagagtcaggaccaggaacatctacagagccctctgaaggctccgctccagggtccccagccggcagtcccactagcaccgaggagggaacctctgaaagcgccacacccgaatcagggccagggtctgagcctgctaccagcggcagcgagacaccaggcacctctgagtccgccacaccagagtccggacccggatctcccgctgggagccccacctccactgaggagggatctcctgctggctctccaacatctactgaggaaggtacctcaaccgagccatccgagggatcagctcccggcacctcagagtcggcaaccccggagtctggacccggaacttccgaaagtgccacaccagagtccggtcccgggacttcagaatcagcaacacccgagtccggccctgggtctgaacccgccacaagtggtagtgagacaccaggatcagaacctgctacctcagggtcagagacacccggatctccggcaggctcaccaacctccactgaggagggcaccagcacagaaccaagcgagggctccgcacccggaacaagcactgaacccagtgagggttcagcacccggctctgagccggccacaagtggcagtgagacacccggcacttcagagagtgccacccccgagagtggcccaggcactagtaccgagccctctgaaggcagtgcgccagcctcgagcgaacaaaaactcatctcagaagaggatctgtcacctgcaaccggtcatcatcaccatcaccattga

SEQ ID NO: 1071 - protein, 2053 aa, synthetic construct
  REGION 1..2053: note = Description of Artificial Sequence: Synthetic polypeptide
ATRRYYLGAVELSWDYMQSDLGELPVGAPGSSPSASTGTGPGSSPSASTGTGPGASPGTSSTGSPGASPGTSSTGSPGSSTPSGATGSPGSSPSASTGTGPGASPGTSSTGSPGSSPSASTGTGPGTPGSGTASSSPGSSTPSGATGSPGSSTPSGATGSPGASPGTSSTGSPASSDARFPPRVPKSFPFNTSVVYKKTLFVEFTDHLFNIAKPRPPWMGLLGPTIQAEVYDTVVITLKNMASHPVSLHAVGVSYWKASEGAEYDDQTSQREKEDDKVFPGGSHTYVWQVLKENGPMASDPLCLTYSYLSHVDLVKDLNSGLIGALLVCREGSLAKEKTQTLHKFILLFAVFDEGKSWHSETKNSLMQDRDAASARAWPKMHTVNGYVNRSLPGLIGCHRKSVYWHVIGMGTTPEVHSIFLEGHTFLVRNHRQASLEISPITFLTAQTLLMDLGQFLLFCHISSHQHDGMEAYVKVDSCPEEPQLRMKNNEEAEDYDDDLTDSEMDVVRFDDDNSPSFIQIRSVAKKHPKTWVHYIAAEEEDWDYAPLVLAPDDRSYKSQYLNNGPQRIGRKYKKVRFMAYTDETFKTREAIQHESGILGPLLYGEVGDTLLIIFKNQASRPYNIYPHGITDVRPLYSRRLPKGVKHLKDFPILPGEIFKYKWTVTVEDGPTKSDPRCLTRYYSSFVNMERDLASGLIGPLLICYKESVDQRGNQIMSDKRNVILFSVFDENRSWYLTENIQRFLPNPAGVQLEDPEFQASNIMHSINGYVFDSLQLSVCLHEVAYWYILSIGAQTDFLSVFFSGYTFKHKMVYEDTLTLFPFSGETVFMSMENPGLWILGCHNSDFRNRGMTALLKVSSCDKNTGDYYEDSYEDISAYLLSKNNAIEPRSFSQNGAPSPAGSPTSTEEGTSESATPESGPGSEPATSGSETPGTSESATPESGPGTSTEPSEGSAPGTSTEPSEGSAPGTSTEPSEGSAPGTSTEPSEGSAPGTSTEPSEGSAPGTSTEPSEGSAPGSPAGSPTSTEEGTSTEPSEGSAPGASSPPVLKRHQAEITRTTLQSDQEEIDYDDTISVEMKKEDFDIYDEDENQSPRSFQKKTRHYFIAAVERLWDYGMSSSPHVLRNRAQSGSVPQFKKVVFQEFTDGSFTQPLYRGELNEHLGLLGPYIRAEVEDNIMVTFRNQASRPYSFYSSLISYEEDQRQGAEPRKNFVKPNETKTYFWKVQHHMAPTKDEFDCKAWAYFSDVDLEKDVHSGLIGPLLVCHTNTLNPAHGRQVTVQEFALFFTIFDETKSWYFTENMERNCRAPCNIQMEDPTFKENYRFHAINGYIMDTLPGLVMAQDQRIRWYLLSMGSNENIHSIHFSGHVFTVRKKEEYKMALYNLYPGVFETVEMLPSKAGIWRVECLIGEHLHAGMSTLFLVYSNKCQTPLGMASGHIRDFQITASGQYGQWAPKLARLHYSGSINAWSTKEPFSWIKVDLLAPMIIHGIKTQGARQKFSSLYISQFIIMYSLDGKKWQTYRGNSTGTLMVFFGNVDSSGIKHNIFNPPIIARYIRLHPTHYSIRSTLRMELMGCDLNSCSMPLGMESKAISDAQITASSYFTNMFATWSPSKARLHLQGRSNAWRPQVNNPKEWLQVDFQKTMKVTGVTTQGVKSLLTSMYVKEFLISSSQDGHQWTLFFQNGKVKVFQGNQDSFTPVVNSLDPPLLTRYLRIHPQSWVHQIALRMEVLGCEAQDLYGAPGTSESATPESGPGSEPATSGSETPGTSESATPESGPGSEPATSGSETPGTSESATPESGPGTSTEPSEGSAPGSPAGSPTSTEEGTSESATPESGPGSEPATSGSETPGTSESATPESGPGSPAGSPTSTEEGSPAGSPTSTEEGTSTEPSEGSAPGTSESATPESGPGTSESATPESGPGTSESATPESGPGSEPATSGSETPGSEPATSGSETPGSPAGSPTSTEEGTSTEPSEGSAPGTSTEPSEGSAPGSEPATSGSETPGTSESATPESGPGTSTEPSEGSAPASSEQKLISEEDLSPATGHHHHHH

(The sequence listing continues in the following parts.)

1. A recombinant factor VIII fusion protein comprising a factor VIII polypeptide and at least a first extended recombinant polypeptide (XTEN), wherein said factor VIII polypeptide comprises an A1 domain including an a1 acidic spacer region, an A2 domain including an a2 acidic spacer region, an A3 domain including an a3 acidic spacer region, a C1 domain, a C2 domain and optionally all or a portion of a B domain, and wherein said first XTEN is linked to said factor VIII polypeptide at (i) the C-terminus of said factor VIII polypeptide; (ii) within the B domain of said factor VIII polypeptide if all or a portion of the B domain is present; (iii) within the A1 domain of said factor VIII polypeptide; (iv) within the A2 domain of said factor VIII polypeptide; (v) within the A3 domain of said factor VIII polypeptide; (vi) within the C1 domain of said factor VIII polypeptide; (vii) within the C2 domain of said factor VIII polypeptide; (viii) at the N-terminus of said factor VIII polypeptide, (ix) between two domains of said factor VIII polypeptide; and wherein when compared to a corresponding factor VIII protein not linked to XTEN, the fusion protein (a) retains at least about 10%, 20%, 30%, 40%, 50%, 60%, 70%, 80%, 90% 100%, 200%, 300%, 400%, or 500% of the procoagulant activity in an in vitro coagulation assay, or (b) exhibits reduced binding to an anti-factor VIII antibody in an in vitro binding assay.

2. (canceled)

3. The recombinant factor VIII fusion protein of claim 1, wherein the first XTEN is linked to said factor VIII polypeptide at an insertion site selected from Table 5, Table 6, Table 7, Table 8, or Table 9.

4-10. (canceled)

11. The recombinant factor VIII fusion protein of claim 1, comprising at least a second XTEN, optionally a third XTEN, optionally a fourth XTEN, optionally a fifth XTEN and optionally a sixth XTEN, wherein each of the second, third, fourth, fifth, or sixth XTEN is linked to said factor VIII polypeptide at a second, third, fourth, fifth, or sixth site selected from the group consisting of:
(a) an insertion site from Table 5, Table 6, Table 7, Table 8, or Table 9;
(b) an insertion site within 6 amino acids of amino acid residue number 32, 220, 224, 336, 339, 390, 399, 416, 603, 1656, 1711, 1725, 1905 or 1910 with reference to full-length human factor VIII sequence as set forth in FIG. 3;
(c) an insertion site between any two adjacent domains of said factor VIII polypeptide, wherein said two adjacent domains are selected from the group consisting of A1 and A2 domains, A2 and B domains, B and A3 domains, A3 and C1 domains, and C1 and C2 domains;
(d) within the B domain of said factor VIII polypeptide, wherein the second XTEN 15 linked to the C-terminal end of about amino acid residue number 741 to about 750 and to the N-terminal end of amino acid residue numbers 1635 to about 1648 with reference to full-length human factor VIII sequence as set forth in FIG. 3;
(e) the C-terminus of said factor VIII polypeptide; and
(f) the N-terminus of said factor VIII polypeptide.

12-18. (canceled)

19. A recombinant factor VIII fusion protein comprising at least one extended recombinant polypeptide (XTEN), said fusion protein having a structure of formula IX: (A1_{N})-(S)ₐ-(XTEN)ₜ-(S)_{b}-(A1_{C})-(A2_{N})-(S)_{c}-(XTEN)ᵤ-(S)_{d}-(A2_{C})-(B_{N})-(S)ₑ-(XTEN)ᵥ-(S)_{f}-(B_{C})-(A3_{N})-(S)_{g}-(XTEN)_{w}-(S)ₕ-(A3_{C})-(C1_{N})-(S)ᵢ-(XTEN)ₓ-(S)ⱼ-(C1_{C})-(C2_{N})-(S)ₖ-(XTEN)_{y}-(S)ₗ-(C2_{C})-(S)ₘ-(XTEN)_{z} IX, wherein independently for each occurrence,
a) A1_{N} is a fragment of the A1 domain of factor VIII having a sequence ranging from at least amino acid residue number 1, with reference to full-length human factor VIII sequence as set forth in FIG. 3, to no more than amino acid residue number 371;
b) A1_{c} is a fragment of the A1 domain of factor VIII having a sequence ranging from at least amino acid residue number 2 to no more than amino acid residue number 372, with the priviso that no sequence of the A1_{N} fragment is duplicated in the A1_{c} is a fragment;
c) A2_{N} is a fragment of the A2 domain of factor VIII having a sequence ranging from at least amino acid residue number 373 to no more than amino acid residue number 739;
d) A2_{c} is a fragment of the A2 domain of factor VIII having a sequence ranging from at least amino acid residue number 374 to no more than amino acid residue number 740, with the priviso that no sequence of the A2_{N} fragment is duplicated in the A2_{c} is a fragment;
e) B_{N} is a fragment of the B domain of factor VIII having a sequence ranging from at least amino acid residue number 741 to no more than amino acid residue number 1647;
f) B_{c} is a fragment of the B domain of factor VIII having a sequence ranging from at least amino acid residue number 742 to no more than amino acid residue number 1648, with the priviso that no sequence of the B_{N} fragment is duplicated in the B_{c} is a fragment;
g) A3_{N} is a fragment of the A3 domain of factor VIII having a sequence ranging from at least amino acid residue number 1649 to no more than amino acid residue number 2018;
h) A3_{c} is a fragment of the A3 domain of factor VIII having a sequence ranging from at least amino acid residue number 1650 to no more than amino acid residue number 2019, with the priviso that no sequence of the A3_{N} fragment is duplicated in the A3_{c} is a fragment;
i) C1_{N} is a fragment of the C1 domain of factor VIII having a sequence ranging from at least amino acid residue number 2020 to no more than amino acid residue number 2171;
j) C1_{c} is a fragment of the C1 domain of factor VIII having a sequence ranging from at least amino acid residue number 2021 to no more than amino acid residue number 2172, with the priviso that no sequence of the C1_{N} fragment is duplicated in the C1_{c} is a fragment;
k) C2_{N} is a fragment of the C2 domain of factor VIII having a sequence ranging from at least amino acid residue number 2173 to no more than amino acid residue number 2331;
l) C2_{c} is a fragment of the C2 domain of factor VIII having a sequence ranging from at least amino acid residue number 2174 to no more than amino acid residue number 2332, with the priviso that no sequence of the C2_{N} fragment is duplicated in the C2_{c} is a fragment;
m) S is a spacer sequence having between 1 to about 50 amino acid residues that can optionally include a cleavage sequence or amino acids compatible with restrictions sites;
n) a is either 0 or 1;
o) b is either 0 or 1;
p) c is either 0 or 1;
q) d is either 0 or 1;
r) e is either 0 or 1;
s) f is either 0 or 1;
t) g is either 0 or 1;
u) h is either 0 or 1;
v) i is either 0 or 1;
w) j is either 0 or 1;
x) k is either 0 or 1;
y) l is either 0 or 1;
z) m is either 0 or 1;
aa) t is either 0 or 1;
bb) u is either 0 or 1;
cc) v is either 0 or 1;
dd) w is either 0 or 1;
ee) x is either 0 or 1;
ff) y is either 0 or 1;
gg) z is either 0 or 1 with the proviso that t+u+v+w+x+y+z≥1;
hh) each XTEN is independently an extended recombinant protein;
and wherein the fusion protein has at least about 10%, 20%, 30%, 40%, 50%, 60%, 70%, 80%, 90% or 100% of the procoagulant activity of a corresponding factor VIII polypeptide not linked to an XTEN or wherein said fusion protein exhibits reduced binding to an anti-factor VIII antibody as compared to the corresponding factor VIII not linked to XTEN when measured by an in vitro assay which is an ELISA or Bethesda assay.

20-28. (canceled)

29. The recombinant factor VIII fusion protein of claim 19, wherein an XTEN is inserted immediately downstream of an amino acid which corresponds to an amino acid in mature native human factor VIII selected from the group consisting of amino acid residue numbers 32, 220, 224, 336, 339, 399, 416, 603, 1656, 1711, 1725, 1905 and 1910.

30. A recombinant factor VIII fusion protein comprising: a first polypeptide comprising formula X: (A1)-a1-(A2)-a2-[B]; and a second polypeptide comprising Formula XI: a3-(A3)-(C1)-(C2);
wherein the first polypeptide and the second polypeptide are fused or exist as a heterodimer;
wherein, a) A1 is an A1 domain of factor VIII; b) A2 is an A2 domain of factor VIII; c) [B] is a B domain of factor VIII, a fragment thereof, or is deleted; d) A3 is an A3 domain of factor VIII; e) C1 is a C1 domain of factor VIII; f) C2 is a C2 domain of factor VIII; g) a1, a2, and a3 are acidic spacer regions;
wherein the A1 domain comprises an XTEN permissive loop-1 (A1-1) region and an XTEN permissive loop-2 (A1-2) region;
wherein the A2 domain comprises an XTEN permissive loop-1 (A2-1) region and an XTEN permissive loop-2 (A2-2) region;
wherein the A3 domain comprises an XTEN permissive loop-1 (A3-1) region and an XTEN permissive loop-2 (A3-2) region;
wherein an XTEN sequence is inserted into at least one of the regions A1-1, A1-2, A2-1, A2-2, A3-1, or A3-2; and
wherein the recombinant factor VIII protein exhibits procoagulant activity.

31-73. (canceled)

74. The recombinant factor VIII fusion protein of claim 1, comprising one, two or three amino acid substitutions in the factor VIII sequence selected from the group consisting of residues R1645, R1648, Y1680, R1689, and any combinations thereof, numbered relative to mature human factor VIII, wherein each substitution is independently to an amino acid which is alanine, glycine, or phenylalanine.

75. (canceled)

76. The recombinant factor VIII fusion protein of claim 1, wherein the factor VIII polypeptide is linked to a least one XTEN via one or two cleavage sequences that each is cleavable by a mammalian protease selected from the group consisting of factor XIa, factor XIIa, kallikrein, factor VIIa, factor IXa, factor Xa, factor IIa (thrombin), Elastase-2, MMP-12, MMP13, MMP-17 and MMP-20, wherein cleavage at the cleavage sequence by the mammalian protease releases the factor VIII sequence from the XTEN, and wherein the released factor VIII sequence exhibits an increase in procoagulant activity compared to the uncleaved fusion protein.

77-86. (canceled)

87. A pharmaceutical composition comprising the recombinant factor VIII fusion protein of claim 1 and a pharmaceutically acceptable carrier.

88-92. (canceled)

93. A method of treating a bleeding episode in a subject, comprising administering to said subject a clotting effective amount of the pharmaceutical composition of claim 0, wherein the clotting effective amount of the fusion protein arrests a bleeding episode for a period that is at least two-fold, or at least three-fold longer compared to the corresponding factor VIII not linked to XTEN and administered using a comparable amount to said subject.

94. (canceled)

95. A recombinant factor VIII fusion protein for use in a pharmaceutical regimen for treatment of a hemophilia A subject, said regimen comprising a pharmaceutical composition comprising the recombinant factor VIII fusion protein of claim 1.

96-98. (canceled)

99. A recombinant factor VIII fusion protein used in the treatment of hemophilia A, comprising the recombinant factor VIII fusion protein of claim 1.

100. A nucleic acid encoding the recombinant factor VIII fusion protein of claim 1, or the complement thereof.

101-107. (canceled)
